United States Patent Application Publication US 2023/0212319 A1 - sequence listing, part 2

SEQ ID NO: 2242 - DNA, 2856 bp, Artificial Sequence
  Synthetic Polynucloetide
atggccttaccagtgaccgccttgctcctgccgctggccttgctgctccacgccgccaggccggaagtgcagctggttgaatctggcggaggactggttcagcctggcggatctctgagactgtcttgtgccgccagcggcttcagcttcagcgacttttggatgagctgggtccgacaggcccctggcaaaggacttgaatgggtcgccacaatcagccaggccggcagcgagaaggactacgtggactctgtgaagggcagattcaccatcagccgggacaacgccaagaagtccctgtacctccagatgaacagcctgagagccgaggacaccgccgtgtactattgtgcctctggcgtgtacagcttcgactacagaggccagggcaccctggtcacagtctcttctggtaccggcggaggcggatctggcggcggaggtagcggtggcggaggatctgaattcgacgacatcgtgctgacccagagccccgccagcctggccgtgagcctgggccagagcgtgaccatcagctgcagagccagcgagagcgtggagtactacggcaccagcctgatgcagtggtaccagcagaagcccggccagccccccaagctgctgatctacgccaccagcaacgtggagagcggcgtgcccgccagattcagcggcagcggcagcggcaccgacttcagcctgaacatccaccccgtggaggaggacgacatcgccatgtacttctgccagcagagcagaaagctgcccagcaccttcggcggcggcaccaagctggagatcaagctcgaggacctgaagaacgtgttcccacctgaggtggccgtgttcgagcctagcgaggccgagatcagccacacccagaaagccaccctcgtgtgcctggctaccggcttctaccccgaccatgtggaactgtcttggtgggtcaacggcaaagaggtgcacagcggcgtgtctaccgacccccagccactgaaagaacagcccgccctgaacgacagccggtactgcctgagcagcagactgagagtgtccgccaccttctggcagaacccccggaaccacttcagatgccaggtgcagttctacggcctgagcgagaacgacgagtggacccaggacagagccaagcccgtgacccagatcgtgtctgccgaagcctggggcagagccgattgcggatcccagagcttcggcctgctggaccccaagctgtgctacctgctggatggcatcctgttcatctacggcgtgatcctgaccgccctgttcctgagagtgaagttcagcagaagcgccgacgcccctgcctaccagcagggacagaaccaactgtacaacgagctgaacctgggcagacgggaagagtacgacgtgctggacaagcggagaggcagggaccctgagatgggcggaaagccccagcggagaaagaacccccaggaaggactgtataacgaactccagaaagacaagatggccgaagcctacagcgagatcggcatgaagggcgagcggagaagaggcaagggccacgatggcctgtaccagggcctgagcaccgccaccaaggacacctatgacgccctgcacatgcaggccctgcctccaagaagggccaagcgatctggatctggagcaacaaacttctcactactcaaacaagcaggtgacgtggaggagaatcccgggcctactagtatggactggatttggcgcatccttttccttgtcggcgctgctaccggcgcgcattccttcgaagacgtgagactgcaggagagcggccccggccaggtgaagcccagccagaccgtgagcctgacctgcagcgtgaccggctacagcatcaccaacggcaaccactggtggaactggatcagacaggtgagcggcagcaagctggagtggatcggctacatcagcagcagcggcagcaccgacagcaaccccagcctgaagagcagaatcagcatcaccagagacaccagcaagaaccagctgttcctgcagctgaacagcgtgaccaccgaggacatcgccacctactactgcgccagaggctactacttcgactactggggccagggcaccaccctgaccgtgagcagcacgcgtatccagaaccctgatcctgccgtgtaccagctgcgggatagcaagagcagcgacaagagcgtgtgtctgttcaccgacttcgacagccagaccaacgtgtcccagagcaaggactccgacgtgtacatcaccgataagaccgtgctggacatgcggagcatggacttcaagagcaactccgccgtggcctggtccaacaagtccgatttcgcctgcgccaacgccttcaacaacagcattatccccgaggacacattcttcccaagccccgagagcagctgcggtacccagagttttgggttgttggaccctaaattgtgctatctgttggacggaatcctgttcatttacggagtgatcctgaccgcattgttcctgcgggttaagttttccagatccgcagacgcacccgcttaccaacaagggcagaaccaactctacaatgaacttaatttggggcggagggaagagtacgacgttctggacaaaaggaggggacgagatcccgagatgggcggaaagcctcagcgaaggaagaatccgcaagaggggctttataacgaactccagaaagataaaatggcagaagcctatagtgagattgggatgaagggagaaaggaggaggggtaaaggtcacgatgggttgtaccaaggattgagcacagccactaaagatacctatgatgcgctccacatgcaggccctgccgccaaga

SEQ ID NO: 2243 - DNA, 2853 bp, Artificial Sequence
  Synthetic Polynucloetide
atggccttaccagtgaccgccttgctcctgccgctggccttgctgctccacgccgccaggccggaagtgcagctggttgaatctggcggaggactggttcagcctggcggatctctgagactgtcttgtgccgccagcggcttcagcttcagcgacttttggatgagctgggtccgacaggcccctggcaaaggacttgaatgggtcgccacaatcagccaggccggcagcgagaaggactacgtggactctgtgaagggcagattcaccatcagccgggacaacgccaagaagtccctgtacctccagatgaacagcctgagagccgaggacaccgccgtgtactattgtgcctctggcgtgtacagcttcgactacagaggccagggcaccctggtcacagtctcttctggtaccggcggaggcggatctggcggcggaggtagcggtggcggaggatctgaattcgacatccagatgacccagagccccagcagcctgtctgccagcgtgggcgacagagtgaccatcacctgtagagccagccaggacgtgaacaccgccgtggcctggtatcagcagaagcctggcaaggcccccaagctgctgatctacagcgccagcttcctggaaagcggcgtgcccagcagattcagcggaagcagaagcggcaccgacttcaccctgaccatcagctccctccagcccgaggacttcgccacctactactgccagcagcactacaccacccctcccaccttcggccagaccaaggtggaaatcaagagactcgaggacctgaagaacgtgttcccacctgaggtggccgtgttcgagcctagcgaggccgagatcagccacacccagaaagccaccctcgtgtgcctggctaccggcttctaccccgaccatgtggaactgtcttggtgggtcaacggcaaagaggtgcacagcggcgtgtctaccgacccccagccactgaaagaacagcccgccctgaacgacagccggtactgcctgagcagcagactgagagtgtccgccaccttctggcagaacccccggaaccacttcagatgccaggtgcagttctacggcctgagcgagaacgacgagtggacccaggacagagccaagcccgtgacccagatcgtgtctgccgaagcctggggcagagccgattgcggatcccagagcttcggcctgctggaccccaagctgtgctacctgctggatggcatcctgttcatctacggcgtgatcctgaccgccctgttcctgagagtgaagttcagcagaagcgccgacgcccctgcctaccagcagggacagaaccaactgtacaacgagctgaacctgggcagacgggaagagtacgacgtgctggacaagcggagaggcagggaccctgagatgggcggaaagccccagcggagaaagaacccccaggaaggactgtataacgaactccagaaagacaagatggccgaagcctacagcgagatcggcatgaagggcgagcggagaagaggcaagggccacgatggcctgtaccagggcctgagcaccgccaccaaggacacctatgacgccctgcacatgcaggccctgcctccaagaagggccaagcgatctggatctggagcaacaaacttctcactactcaaacaagcaggtgacgtggaggagaatcccgggcctactagtatggactggatttggcgcatccttttccttgtcggcgctgctaccggcgcgcattccttcgaagaagtgcaactggtggaatctggcggcggactggtgcagcctggcggatctctgagactgagctgtgccgccagcggcttcaacatcaaggacacctacatccactgggtgcgccaggcccctggaaagggactggaatgggtggcccggatctaccccaccaacggctacaccagatacgccgacagcgtgaagggccggttcaccatcagcgccgacaccagcaagaataccgcctacctccagatgaacagcctgcgggccgaggataccgccgtgtactactgctcaagatggggaggcgacggcttctacgctatggacgtgtggggccagggcacccttgtgaccgtgtcatctacgcgtatccagaaccctgatcctgccgtgtaccagctgcgggatagcaagagcagcgacaagagcgtgtgtctgttcaccgacttcgacagccagaccaacgtgtcccagagcaaggactccgacgtgtacatcaccgataagaccgtgctggacatgcggagcatggacttcaagagcaactccgccgtggcctggtccaacaagtccgatttcgcctgcgccaacgccttcaacaacagcattatccccgaggacacattcttcccaagccccgagagcagctgcggtacccagagttttgggttgttggaccctaaattgtgctatctgttggacggaatcctgttcatttacggagtgatcctgaccgcattgttcctgcgggttaagttttccagatccgcagacgcacccgcttaccaacaagggcagaaccaactctacaatgaacttaatttggggcggagggaagagtacgacgttctggacaaaaggaggggacgagatcccgagatgggcggaaagcctcagcgaaggaagaatccgcaagaggggctttataacgaactccagaaagataaaatggcagaagcctatagtgagattgggatgaagggagaaaggaggaggggtaaaggtcacgatgggttgtaccaaggattgagcacagccactaaagatacctatgatgcgctccacatgcaggccctgccgccaaga

SEQ ID NO: 2244 - DNA, 2850 bp, Artificial Sequence
  Synthetic Polynucloetide
atggccttaccagtgaccgccttgctcctgccgctggccttgctgctccacgccgccaggccggaagtgcagctggttgaatctggcggaggactggttcagcctggcggatctctgagactgtcttgtgccgccagcggcttcagcttcagcgacttttggatgagctgggtccgacaggcccctggcaaaggacttgaatgggtcgccacaatcagccaggccggcagcgagaaggactacgtggactctgtgaagggcagattcaccatcagccgggacaacgccaagaagtccctgtacctccagatgaacagcctgagagccgaggacaccgccgtgtactattgtgcctctggcgtgtacagcttcgactacagaggccagggcaccctggtcacagtctcttctggtaccggcggaggcggatctggcggcggaggtagcggtggcggaggatctgaattcgaccagagcgtgctgacacagcctcctagcgtgtcagtggcccctggcaagaccgccagaatcccctgcgagggcaactacatcggcagcagcaacgtgcactggtatcagcagaagcccggccaggctcccgtgctcgtgatccacttcgacagcgacagacccagcggcatccccgacagattcagcggcagcaacagcggcaacatggctaccctgaccatcagcagagtggaagccggggacgaggccgactactactgtcaagtgtgggagaaccacggctgggtgttcggcggaggcaccaagctgacagtgctgtctctcgaggacctgaagaacgtgttcccacctgaggtggccgtgttcgagcctagcgaggccgagatcagccacacccagaaagccaccctcgtgtgcctggctaccggcttctaccccgaccatgtggaactgtcttggtgggtcaacggcaaagaggtgcacagcggcgtgtctaccgacccccagccactgaaagaacagcccgccctgaacgacagccggtactgcctgagcagcagactgagagtgtccgccaccttctggcagaacccccggaaccacttcagatgccaggtgcagttctacggcctgagcgagaacgacgagtggacccaggacagagccaagcccgtgacccagatcgtgtctgccgaagcctggggcagagccgattgcggatcccagagcttcggcctgctggaccccaagctgtgctacctgctggatggcatcctgttcatctacggcgtgatcctgaccgccctgttcctgagagtgaagttcagcagaagcgccgacgcccctgcctaccagcagggacagaaccaactgtacaacgagctgaacctgggcagacgggaagagtacgacgtgctggacaagcggagaggcagggaccctgagatgggcggaaagccccagcggagaaagaacccccaggaaggactgtataacgaactccagaaagacaagatggccgaagcctacagcgagatcggcatgaagggcgagcggagaagaggcaagggccacgatggcctgtaccagggcctgagcaccgccaccaaggacacctatgacgccctgcacatgcaggccctgcctccaagaagggccaagcgatctggatctggagcaacaaacttctcactactcaaacaagcaggtgacgtggaggagaatcccgggcctactagtatggactggatttggcgcatccttttccttgtcggcgctgctaccggcgcgcattccttcgaagaggtgcaactggtggaaacaggcggcggactggtgcagcctggcgagtctctgagactgagctgtgccgccagcggcttcaccttcagcgactacgagatgaactgggtgcgccaggcccctggaaagggcctggaatgggtgtcctacatcagcagctccggcagcaccatctactacgccgacagcgtgaagggccggtttaccatctaccgggacaacgccaagaacagcctgtacctccagatgaactccctgcgggccgaggacaccgccctgtactattgtgccagagcctggggcgtgggaccccctgattattggggacagggcaccctcgtgaccgtgtcctctacgcgtatccagaaccctgatcctgccgtgtaccagctgcgggatagcaagagcagcgacaagagcgtgtgtctgttcaccgacttcgacagccagaccaacgtgtcccagagcaaggactccgacgtgtacatcaccgataagaccgtgctggacatgcggagcatggacttcaagagcaactccgccgtggcctggtccaacaagtccgatttcgcctgcgccaacgccttcaacaacagcattatccccgaggacacattcttcccaagccccgagagcagctgcggtacccagagttttgggttgttggaccctaaattgtgctatctgttggacggaatcctgttcatttacggagtgatcctgaccgcattgttcctgcgggttaagttttccagatccgcagacgcacccgcttaccaacaagggcagaaccaactctacaatgaacttaatttggggcggagggaagagtacgacgttctggacaaaaggaggggacgagatcccgagatgggcggaaagcctcagcgaaggaagaatccgcaagaggggctttataacgaactccagaaagataaaatggcagaagcctatagtgagattgggatgaagggagaaaggaggaggggtaaaggtcacgatgggttgtaccaaggattgagcacagccactaaagatacctatgatgcgctccacatgcaggccctgccgccaaga

SEQ ID NO: 2245 - DNA, 2874 bp, Artificial Sequence
  Synthetic Polynucloetide
atggccttaccagtgaccgccttgctcctgccgctggccttgctgctccacgccgccaggccggaagtgcagctggttgaatctggcggaggactggttcagcctggcggatctctgagactgtcttgtgccgccagcggcttcagcttcagcgacttttggatgagctgggtccgacaggcccctggcaaaggacttgaatgggtcgccacaatcagccaggccggcagcgagaaggactacgtggactctgtgaagggcagattcaccatcagccgggacaacgccaagaagtccctgtacctccagatgaacagcctgagagccgaggacaccgccgtgtactattgtgcctctggcgtgtacagcttcgactacagaggccagggcaccctggtcacagtctcttctggtaccggcggaggcggatctggcggcggaggtagcggtggcggaggatctgaattcgacatccagatgacccagagccccagcagcctgtctgccagcgtgggcgataccgtgaccatcacctgtcaggccaacggctacctgaactggtatcagcagcggagaggcaaggcccccaagctgctgatctacgacggcagcaagctggaaagaggcgtgcccagcagattcagcggcagaagatggggccaggagtacaacctgaccatcaacaacctccagcccgaggatattgccacatacttttgccaggtgtacgagttcgtggtgcccggcacacggctggacctgaagagaacagtggctgctcctctcgaggacctgaagaacgtgttcccacctgaggtggccgtgttcgagcctagcgaggccgagatcagccacacccagaaagccaccctcgtgtgcctggctaccggcttctaccccgaccatgtggaactgtcttggtgggtcaacggcaaagaggtgcacagcggcgtgtctaccgacccccagccactgaaagaacagcccgccctgaacgacagccggtactgcctgagcagcagactgagagtgtccgccaccttctggcagaacccccggaaccacttcagatgccaggtgcagttctacggcctgagcgagaacgacgagtggacccaggacagagccaagcccgtgacccagatcgtgtctgccgaagcctggggcagagccgattgcggatcccagagcttcggcctgctggaccccaagctgtgctacctgctggatggcatcctgttcatctacggcgtgatcctgaccgccctgttcctgagagtgaagttcagcagaagcgccgacgcccctgcctaccagcagggacagaaccaactgtacaacgagctgaacctgggcagacgggaagagtacgacgtgctggacaagcggagaggcagggaccctgagatgggcggaaagccccagcggagaaagaacccccaggaaggactgtataacgaactccagaaagacaagatggccgaagcctacagcgagatcggcatgaagggcgagcggagaagaggcaagggccacgatggcctgtaccagggcctgagcaccgccaccaaggacacctatgacgccctgcacatgcaggccctgcctccaagaagggccaagcgatctggatctggagcaacaaacttctcactactcaaacaagcaggtgacgtggaggagaatcccgggcctactagtatggactggatttggcgcatccttttccttgtcggcgctgctaccggcgcgcattccttcgaacaggtgcagctgctccagtctggcgctgccgtgacaaagcctggcgcttctgtgcgggtgtcctgtgaagccagcggctacaacatccgggactacttcatccactggtggcggcaggctccaggccagggactccagtgggtgggatggatcaaccccaagaccggccagcccaacaaccccagacagttccagggcagagtgtccctgaccagacacgccagctgggacttcgacaccttcagcttctacatggatctgaaggccctgcggagcgacgataccgccgtgtacttctgcgccagacagagaagcgactactgggatttcgacgtgtggggcagcggcacccaagtgacagtgtctagcgccagcaccaagggacccacgcgtatccagaaccctgatcctgccgtgtaccagctgcgggatagcaagagcagcgacaagagcgtgtgtctgttcaccgacttcgacagccagaccaacgtgtcccagagcaaggactccgacgtgtacatcaccgataagaccgtgctggacatgcggagcatggacttcaagagcaactccgccgtggcctggtccaacaagtccgatttcgcctgcgccaacgccttcaacaacagcattatccccgaggacacattcttcccaagccccgagagcagctgcggtacccagagttttgggttgttggaccctaaattgtgctatctgttggacggaatcctgttcatttacggagtgatcctgaccgcattgttcctgcgggttaagttttccagatccgcagacgcacccgcttaccaacaagggcagaaccaactctacaatgaacttaatttggggcggagggaagagtacgacgttctggacaaaaggaggggacgagatcccgagatgggcggaaagcctcagcgaaggaagaatccgcaagaggggctttataacgaactccagaaagataaaatggcagaagcctatagtgagattgggatgaagggagaaaggaggaggggtaaaggtcacgatgggttgtaccaaggattgagcacagccactaaagatacctatgatgcgctccacatgcaggccctgccgccaaga

SEQ ID NO: 2246 - DNA, 2892 bp, Artificial Sequence
  Synthetic Polynucloetide
atggccttaccagtgaccgccttgctcctgccgctggccttgctgctccacgccgccaggccggaagtgcagctggttgaatctggcggaggactggttcagcctggcggatctctgagactgtcttgtgccgccagcggcttcagcttcagcgacttttggatgagctgggtccgacaggcccctggcaaaggacttgaatgggtcgccacaatcagccaggccggcagcgagaaggactacgtggactctgtgaagggcagattcaccatcagccgggacaacgccaagaagtccctgtacctccagatgaacagcctgagagccgaggacaccgccgtgtactattgtgcctctggcgtgtacagcttcgactacagaggccagggcaccctggtcacagtctcttctggtaccggcggaggcggatctggcggcggaggtagcggtggcggaggatctgaattccagtctgccctgacacagcctcctagcgcctctggctctcccggccagagcatcaccatcagctgtaccggcaccagcaacaacttcgtgtcctggtatcagcagcacgccggcaaggcccccaagctcgtgatctacgacgtgaacaagcggcccagcggcgtgcccgatagattcagcggcagcaagagcggcaacaccgccagcctgacagtgtctggcctccagaccgatgacgaggccgtgtactactgcggcagcctcgtgggcaactgggacgtgatctttggcggaggcaccaagctgaccgtgctgctcgaggacctgaagaacgtgttcccacctgaggtggccgtgttcgagcctagcgaggccgagatcagccacacccagaaagccaccctcgtgtgcctggctaccggcttctaccccgaccatgtggaactgtcttggtgggtcaacggcaaagaggtgcacagcggcgtgtctaccgacccccagccactgaaagaacagcccgccctgaacgacagccggtactgcctgagcagcagactgagagtgtccgccaccttctggcagaacccccggaaccacttcagatgccaggtgcagttctacggcctgagcgagaacgacgagtggacccaggacagagccaagcccgtgacccagatcgtgtctgccgaagcctggggcagagccgattgcggatcccagagcttcggcctgctggaccccaagctgtgctacctgctggatggcatcctgttcatctacggcgtgatcctgaccgccctgttcctgagagtgaagttcagcagaagcgccgacgcccctgcctaccagcagggacagaaccaactgtacaacgagctgaacctgggcagacgggaagagtacgacgtgctggacaagcggagaggcagggaccctgagatgggcggaaagccccagcggagaaagaacccccaggaaggactgtataacgaactccagaaagacaagatggccgaagcctacagcgagatcggcatgaagggcgagcggagaagaggcaagggccacgatggcctgtaccagggcctgagcaccgccaccaaggacacctatgacgccctgcacatgcaggccctgcctccaagaagggccaagcgatctggatctggagcaacaaacttctcactactcaaacaagcaggtgacgtggaggagaatcccgggcctactagtatggactggatttggcgcatccttttccttgtcggcgctgctaccggcgcgcattccttcgaacagccccagctccaggaatctggccccacactggtggaagccagcgagacactgagcctgacctgtgccgtgtccggcgattctaccgccgcctgcaatagcttctggggctgggtgcgccagcctcctggaaagggactggaatgggtgggaagcctgagccactgcgccagctattggaaccggggctggacctaccacaaccccagcctgaagtccagactgaccctggccctggacacccccaagaacctggtgttcctgaagctgaacagcgtgacagccgccgacaccgccacctactactgtgccagatttggcggcgaggtgctgcggtacaccgactggcctaaacctgcctgggtggacctgtggggcagaggaacactcgtgaccgtgtccagcacgcgtatccagaaccctgatcctgccgtgtaccagctgcgggatagcaagagcagcgacaagagcgtgtgtctgttcaccgacttcgacagccagaccaacgtgtcccagagcaaggactccgacgtgtacatcaccgataagaccgtgctggacatgcggagcatggacttcaagagcaactccgccgtggcctggtccaacaagtccgatttcgcctgcgccaacgccttcaacaacagcattatccccgaggacacattcttcccaagccccgagagcagctgcggtacccagagttttgggttgttggaccctaaattgtgctatctgttggacggaatcctgttcatttacggagtgatcctgaccgcattgttcctgcgggttaagttttccagatccgcagacgcacccgcttaccaacaagggcagaaccaactctacaatgaacttaatttggggcggagggaagagtacgacgttctggacaaaaggaggggacgagatcccgagatgggcggaaagcctcagcgaaggaagaatccgcaagaggggctttataacgaactccagaaagataaaatggcagaagcctatagtgagattgggatgaagggagaaaggaggaggggtaaaggtcacgatgggttgtaccaaggattgagcacagccactaaagatacctatgatgcgctccacatgcaggccctgccgccaaga

SEQ ID NO: 2247 - DNA, 2847 bp, Artificial Sequence
  Synthetic Polynucloetide
atggccttaccagtgaccgccttgctcctgccgctggccttgctgctccacgccgccaggccggaagtgcagctggttgaatctggcggaggactggttcagcctggcggatctctgagactgtcttgtgccgccagcggcttcagcttcagcgacttttggatgagctgggtccgacaggcccctggcaaaggacttgaatgggtcgccacaatcagccaggccggcagcgagaaggactacgtggactctgtgaagggcagattcaccatcagccgggacaacgccaagaagtccctgtacctccagatgaacagcctgagagccgaggacaccgccgtgtactattgtgcctctggcgtgtacagcttcgactacagaggccagggcaccctggtcacagtctcttctggtaccggcggaggcggatctggcggcggaggtagcggtggcggaggatctgaattcgagatcgtgctgacacagagccctggcaccctgagcctgtctccaggcgagacagccatcatcagctgccggacaagccagtacggcagcctggcctggtatcagcagaggccaggacaggcccccagactcgtgatctacagcggcagcacaagagccgccggaatccccgatagattcagcggctccagatggggacccgactacaacctgaccatcagcaacctggaaagcggcgacttcggcgtgtactactgccagcagtacgagttcttcggccagggcaccaaggtgcaggtggacatcaaaagactcgaggacctgaagaacgtgttcccacctgaggtggccgtgttcgagcctagcgaggccgagatcagccacacccagaaagccaccctcgtgtgcctggctaccggcttctaccccgaccatgtggaactgtcttggtgggtcaacggcaaagaggtgcacagcggcgtgtctaccgacccccagccactgaaagaacagcccgccctgaacgacagccggtactgcctgagcagcagactgagagtgtccgccaccttctggcagaacccccggaaccacttcagatgccaggtgcagttctacggcctgagcgagaacgacgagtggacccaggacagagccaagcccgtgacccagatcgtgtctgccgaagcctggggcagagccgattgcggatcccagagcttcggcctgctggaccccaagctgtgctacctgctggatggcatcctgttcatctacggcgtgatcctgaccgccctgttcctgagagtgaagttcagcagaagcgccgacgcccctgcctaccagcagggacagaaccaactgtacaacgagctgaacctgggcagacgggaagagtacgacgtgctggacaagcggagaggcagggaccctgagatgggcggaaagccccagcggagaaagaacccccaggaaggactgtataacgaactccagaaagacaagatggccgaagcctacagcgagatcggcatgaagggcgagcggagaagaggcaagggccacgatggcctgtaccagggcctgagcaccgccaccaaggacacctatgacgccctgcacatgcaggccctgcctccaagaagggccaagcgatctggatctggagcaacaaacttctcactactcaaacaagcaggtgacgtggaggagaatcccgggcctactagtatggactggatttggcgcatccttttccttgtcggcgctgctaccggcgcgcattccttcgaacaggtgcagctggtgcagtctggcggccagatgaagaaacccggcgagagcatgagaatcagctgtcgggcctccggctacgagttcatcgactgcaccctgaactggatcagactggcccctggcaagcggcctgagtggatgggatggctgaagcctagaggcggagccgtgaactacgccagacctctccagggcagagtgaccatgaccagggacgtgtacagcgataccgccttcctggaactgcggagcctgaccgtggatgataccgccgtgtacttctgcaccagaggcaagaactgcgattacaactgggacttcgagcactggggcagaggcacccctgtgatcgtgtctagcacgcgtatccagaaccctgatcctgccgtgtaccagctgcgggatagcaagagcagcgacaagagcgtgtgtctgttcaccgacttcgacagccagaccaacgtgtcccagagcaaggactccgacgtgtacatcaccgataagaccgtgctggacatgcggagcatggacttcaagagcaactccgccgtggcctggtccaacaagtccgatttcgcctgcgccaacgccttcaacaacagcattatccccgaggacacattcttcccaagccccgagagcagctgcggtacccagagttttgggttgttggaccctaaattgtgctatctgttggacggaatcctgttcatttacggagtgatcctgaccgcattgttcctgcgggttaagttttccagatccgcagacgcacccgcttaccaacaagggcagaaccaactctacaatgaacttaatttggggcggagggaagagtacgacgttctggacaaaaggaggggacgagatcccgagatgggcggaaagcctcagcgaaggaagaatccgcaagaggggctttataacgaactccagaaagataaaatggcagaagcctatagtgagattgggatgaagggagaaaggaggaggggtaaaggtcacgatgggttgtaccaaggattgagcacagccactaaagatacctatgatgcgctccacatgcaggccctgccgccaaga

SEQ ID NO: 2248 - DNA, 2877 bp, Artificial Sequence
  Synthetic Polynucloetide
atggccttaccagtgaccgccttgctcctgccgctggccttgctgctccacgccgccaggccggaagtgcagctggttgaatctggcggaggactggttcagcctggcggatctctgagactgtcttgtgccgccagcggcttcagcttcagcgacttttggatgagctgggtccgacaggcccctggcaaaggacttgaatgggtcgccacaatcagccaggccggcagcgagaaggactacgtggactctgtgaagggcagattcaccatcagccgggacaacgccaagaagtccctgtacctccagatgaacagcctgagagccgaggacaccgccgtgtactattgtgcctctggcgtgtacagcttcgactacagaggccagggcaccctggtcacagtctcttctggtaccggcggaggcggatctggcggcggaggtagcggtggcggaggatctgaattcgagctggtgctgacacagagccctggcaccctgtctctgtctgccggcgaaagagccaccctgagctgtagagccagccagagcgtgtcctctggcagcctggcttggtatcagcagaagccaggccaggcccccagactgctgatctacggcgcttctaccagagccaccggcatccccgatagattcagcggctctggctccggcaccgacttcaccctgacaatcggcagactggaacccgaggacctggccgtgtactactgccagcagtacggcaccagcccctacacattcggccagggcaccaagctggaaatcctcgaggacctgaagaacgtgttcccacctgaggtggccgtgttcgagcctagcgaggccgagatcagccacacccagaaagccaccctcgtgtgcctggctaccggcttctaccccgaccatgtggaactgtcttggtgggtcaacggcaaagaggtgcacagcggcgtgtctaccgacccccagccactgaaagaacagcccgccctgaacgacagccggtactgcctgagcagcagactgagagtgtccgccaccttctggcagaacccccggaaccacttcagatgccaggtgcagttctacggcctgagcgagaacgacgagtggacccaggacagagccaagcccgtgacccagatcgtgtctgccgaagcctggggcagagccgattgcggatcccagagcttcggcctgctggaccccaagctgtgctacctgctggatggcatcctgttcatctacggcgtgatcctgaccgccctgttcctgagagtgaagttcagcagaagcgccgacgcccctgcctaccagcagggacagaaccaactgtacaacgagctgaacctgggcagacgggaagagtacgacgtgctggacaagcggagaggcagggaccctgagatgggcggaaagccccagcggagaaagaacccccaggaaggactgtataacgaactccagaaagacaagatggccgaagcctacagcgagatcggcatgaagggcgagcggagaagaggcaagggccacgatggcctgtaccagggcctgagcaccgccaccaaggacacctatgacgccctgcacatgcaggccctgcctccaagaagggccaagcgatctggatctggagcaacaaacttctcactactcaaacaagcaggtgacgtggaggagaatcccgggcctactagtatggactggatttggcgcatccttttccttgtcggcgctgctaccggcgcgcattccttcgaactggaacagagcggagccgaagtgaagaaacccggcagcagcgtgcaggtgtcctgcaaagcaagcggcggcaccttctctatgtacggcttcaactgggtgcgccaggctcctggacacggcctggaatggatgggcggcatcatccccatcttcggcacctccaactacgcccagaaattccggggcagagtgaccttcaccgccgaccaggccacaagcaccgcctacatggaactgaccaacctgcggagcgacgacaccgccgtgtattattgcgccagagacttcggccccgactgggaggatggcgacagctacgatggcagcggcagaggcttcttcgacttctggggccagggaacccttgtgaccgtgtcctcaacgcgtatccagaaccctgatcctgccgtgtaccagctgcgggatagcaagagcagcgacaagagcgtgtgtctgttcaccgacttcgacagccagaccaacgtgtcccagagcaaggactccgacgtgtacatcaccgataagaccgtgctggacatgcggagcatggacttcaagagcaactccgccgtggcctggtccaacaagtccgatttcgcctgcgccaacgccttcaacaacagcattatccccgaggacacattcttcccaagccccgagagcagctgcggtacccagagttttgggttgttggaccctaaattgtgctatctgttggacggaatcctgttcatttacggagtgatcctgaccgcattgttcctgcgggttaagttttccagatccgcagacgcacccgcttaccaacaagggcagaaccaactctacaatgaacttaatttggggcggagggaagagtacgacgttctggacaaaaggaggggacgagatcccgagatgggcggaaagcctcagcgaaggaagaatccgcaagaggggctttataacgaactccagaaagataaaatggcagaagcctatagtgagattgggatgaagggagaaaggaggaggggtaaaggtcacgatgggttgtaccaaggattgagcacagccactaaagatacctatgatgcgctccacatgcaggccctgccgccaaga

SEQ ID NO: 2249 - DNA, 2817 bp, Artificial Sequence
  Synthetic Polynucloetide
atggccttaccagtgaccgccttgctcctgccgctggccttgctgctccacgccgccaggccggaagtgcagctggttgaatctggcggaggactggttcagcctggcggatctctgagactgtcttgtgccgccagcggcttcagcttcagcgacttttggatgagctgggtccgacaggcccctggcaaaggacttgaatgggtcgccacaatcagccaggccggcagcgagaaggactacgtggactctgtgaagggcagattcaccatcagccgggacaacgccaagaagtccctgtacctccagatgaacagcctgagagccgaggacaccgccgtgtactattgtgcctctggcgtgtacagcttcgactacagaggccagggcaccctggtcacagtctcttctggtaccggcggaggcggatctggcggcggaggtagcggtggcggaggatctgaattcgacatccagatgacccagagccccagcagcctgtctgccagcgtgggcgacagagtgaccatcacctgtcaggccagccaggacatcaacaactacctgaactggtatcagcagaagcccggcaaggcccccaagctgctgatctacgacgccagcaatctgcagaccggcgtgcccagcagattttccggctctggcagcggcaccgacttcaccttcaccatcgaggacattgccacctactactgccagcagtacaccttcggccctggcaccaaggtggacatcaaactcgaggacctgaagaacgtgttcccacctgaggtggccgtgttcgagcctagcgaggccgagatcagccacacccagaaagccaccctcgtgtgcctggctaccggcttctaccccgaccatgtggaactgtcttggtgggtcaacggcaaagaggtgcacagcggcgtgtctaccgacccccagccactgaaagaacagcccgccctgaacgacagccggtactgcctgagcagcagactgagagtgtccgccaccttctggcagaacccccggaaccacttcagatgccaggtgcagttctacggcctgagcgagaacgacgagtggacccaggacagagccaagcccgtgacccagatcgtgtctgccgaagcctggggcagagccgattgcggatcccagagcttcggcctgctggaccccaagctgtgctacctgctggatggcatcctgttcatctacggcgtgatcctgaccgccctgttcctgagagtgaagttcagcagaagcgccgacgcccctgcctaccagcagggacagaaccaactgtacaacgagctgaacctgggcagacgggaagagtacgacgtgctggacaagcggagaggcagggaccctgagatgggcggaaagccccagcggagaaagaacccccaggaaggactgtataacgaactccagaaagacaagatggccgaagcctacagcgagatcggcatgaagggcgagcggagaagaggcaagggccacgatggcctgtaccagggcctgagcaccgccaccaaggacacctatgacgccctgcacatgcaggccctgcctccaagaagggccaagcgatctggatctggagcaacaaacttctcactactcaaacaagcaggtgacgtggaggagaatcccgggcctactagtatggactggatttggcgcatccttttccttgtcggcgctgctaccggcgcgcattccttcgaagaagtgcaactgctggaatctggcggcggactggtgcagcctggcggatctctgagactgagctgtgccgccagcggcttcacctttagctggtacagcatgacctgggtgcgccaggcccctggcaaaggactggaatgggtgtccagcatcgtgccctggggcgatttcacccagtacgccgatagcgtgaagggccggttcaccatcagccgggacaacagcaagaacaccctgtacctgcagatgaacagcctgcgggccgaggacaccgccgtgtactattgtgccaagggacctggctggggcagcttcgatctgtggggcagaggaacccttgtgaccgtgtccagcacgcgtatccagaaccctgatcctgccgtgtaccagctgcgggatagcaagagcagcgacaagagcgtgtgtctgttcaccgacttcgacagccagaccaacgtgtcccagagcaaggactccgacgtgtacatcaccgataagaccgtgctggacatgcggagcatggacttcaagagcaactccgccgtggcctggtccaacaagtccgatttcgcctgcgccaacgccttcaacaacagcattatccccgaggacacattcttcccaagccccgagagcagctgcggtacccagagttttgggttgttggaccctaaattgtgctatctgttggacggaatcctgttcatttacggagtgatcctgaccgcattgttcctgcgggttaagttttccagatccgcagacgcacccgcttaccaacaagggcagaaccaactctacaatgaacttaatttggggcggagggaagagtacgacgttctggacaaaaggaggggacgagatcccgagatgggcggaaagcctcagcgaaggaagaatccgcaagaggggctttataacgaactccagaaagataaaatggcagaagcctatagtgagattgggatgaagggagaaaggaggaggggtaaaggtcacgatgggttgtaccaaggattgagcacagccactaaagatacctatgatgcgctccacatgcaggccctgccgccaaga

SEQ ID NO: 2250 - DNA, 2847 bp, Artificial Sequence
  Synthetic Polynucloetide
atggccttaccagtgaccgccttgctcctgccgctggccttgctgctccacgccgccaggccggaagtgcagctggttgaatctggcggaggactggttcagcctggcggatctctgagactgtcttgtgccgccagcggcttcagcttcagcgacttttggatgagctgggtccgacaggcccctggcaaaggacttgaatgggtcgccacaatcagccaggccggcagcgagaaggactacgtggactctgtgaagggcagattcaccatcagccgggacaacgccaagaagtccctgtacctccagatgaacagcctgagagccgaggacaccgccgtgtactattgtgcctctggcgtgtacagcttcgactacagaggccagggcaccctggtcacagtctcttctggtaccggcggaggcggatctggcggcggaggtagcggtggcggaggatctgaattcgacatccagatgacccagagccccagcagcctgtctgccagcgtgggcgacagagtgaccatcacctgtaccgccagcctgagcgtgtccagcacctacctgcactggtatcagcagaagcccggcagcagccccaagctgtggatctacagcaccagcaacctggcctccggcgtgcccagcagattttctggcagcggctctggcaccagctacaccctgaccatcagctccctccagcccgaggacttcgccacctactactgccaccagtaccacagaagccccctgacctttggcggaggcaccaaggtggaaatcaagagactcgaggacctgaagaacgtgttcccacctgaggtggccgtgttcgagcctagcgaggccgagatcagccacacccagaaagccaccctcgtgtgcctggctaccggcttctaccccgaccatgtggaactgtcttggtgggtcaacggcaaagaggtgcacagcggcgtgtctaccgacccccagccactgaaagaacagcccgccctgaacgacagccggtactgcctgagcagcagactgagagtgtccgccaccttctggcagaacccccggaaccacttcagatgccaggtgcagttctacggcctgagcgagaacgacgagtggacccaggacagagccaagcccgtgacccagatcgtgtctgccgaagcctggggcagagccgattgcggatcccagagcttcggcctgctggaccccaagctgtgctacctgctggatggcatcctgttcatctacggcgtgatcctgaccgccctgttcctgagagtgaagttcagcagaagcgccgacgcccctgcctaccagcagggacagaaccaactgtacaacgagctgaacctgggcagacgggaagagtacgacgtgctggacaagcggagaggcagggaccctgagatgggcggaaagccccagcggagaaagaacccccaggaaggactgtataacgaactccagaaagacaagatggccgaagcctacagcgagatcggcatgaagggcgagcggagaagaggcaagggccacgatggcctgtaccagggcctgagcaccgccaccaaggacacctatgacgccctgcacatgcaggccctgcctccaagaagggccaagcgatctggatctggagcaacaaacttctcactactcaaacaagcaggtgacgtggaggagaatcccgggcctactagtatggactggatttggcgcatccttttccttgtcggcgctgctaccggcgcgcattccttcgaagaagtgcaactggtggaatctggcggcggactggtgcagcctggcggatctctgagactgagctgtgccgccagcggcttcagcctgaccaaatacggcgtgcactgggtgcgccaggcccctggaaaaggactggaatgggtgggagtgaagtgggctggcggctccaccgactacaacagcgccctgatgagccggttcaccatcagcaaggacaacgccaagaacagcctgtacctccagatgaactccctgcgggccgaggacaccgccgtgtactactgtgccagagatcaccgggacgctatggactactggggccagggaacactcgtgaccgtgtcctctacgcgtatccagaaccctgatcctgccgtgtaccagctgcgggatagcaagagcagcgacaagagcgtgtgtctgttcaccgacttcgacagccagaccaacgtgtcccagagcaaggactccgacgtgtacatcaccgataagaccgtgctggacatgcggagcatggacttcaagagcaactccgccgtggcctggtccaacaagtccgatttcgcctgcgccaacgccttcaacaacagcattatccccgaggacacattcttcccaagccccgagagcagctgcggtacccagagttttgggttgttggaccctaaattgtgctatctgttggacggaatcctgttcatttacggagtgatcctgaccgcattgttcctgcgggttaagttttccagatccgcagacgcacccgcttaccaacaagggcagaaccaactctacaatgaacttaatttggggcggagggaagagtacgacgttctggacaaaaggaggggacgagatcccgagatgggcggaaagcctcagcgaaggaagaatccgcaagaggggctttataacgaactccagaaagataaaatggcagaagcctatagtgagattgggatgaagggagaaaggaggaggggtaaaggtcacgatgggttgtaccaaggattgagcacagccactaaagatacctatgatgcgctccacatgcaggccctgccgccaaga

SEQ ID NO: 2251 - DNA, 2859 bp, Artificial Sequence
  Synthetic Polynucloetide
atggccttaccagtgaccgccttgctcctgccgctggccttgctgctccacgccgccaggccggaagtgcagctggttgaatctggcggaggactggttcagcctggcggatctctgagactgtcttgtgccgccagcggcttcagcttcagcgacttttggatgagctgggtccgacaggcccctggcaaaggacttgaatgggtcgccacaatcagccaggccggcagcgagaaggactacgtggactctgtgaagggcagattcaccatcagccgggacaacgccaagaagtccctgtacctccagatgaacagcctgagagccgaggacaccgccgtgtactattgtgcctctggcgtgtacagcttcgactacagaggccagggcaccctggtcacagtctcttctggtaccggcggaggcggatctggcggcggaggtagcggtggcggaggatctgaattcgacatccagatgacccagagccccagcagcctgtctgccagcgtgggcgacagagtgaccatcacatgcaaggccagccaggacgtgggaacagccgtggcctggtatcagcagaagcctggcaaggcccccaagctgctgatctacagcgccagctacagatccaccggcgtgcccagcagattttccggctctggcagcggcaccgacttcaccctgaccatctctagcctccagcccgaggacttcgccacctactactgccagcaccactactccgccccctggacatttggcggaggcaccaaggtggaaatcaagctcgaggacctgaagaacgtgttcccacctgaggtggccgtgttcgagcctagcgaggccgagatcagccacacccagaaagccaccctcgtgtgcctggctaccggcttctaccccgaccatgtggaactgtcttggtgggtcaacggcaaagaggtgcacagcggcgtgtctaccgacccccagccactgaaagaacagcccgccctgaacgacagccggtactgcctgagcagcagactgagagtgtccgccaccttctggcagaacccccggaaccacttcagatgccaggtgcagttctacggcctgagcgagaacgacgagtggacccaggacagagccaagcccgtgacccagatcgtgtctgccgaagcctggggcagagccgattgcggatcccagagcttcggcctgctggaccccaagctgtgctacctgctggatggcatcctgttcatctacggcgtgatcctgaccgccctgttcctgagagtgaagttcagcagaagcgccgacgcccctgcctaccagcagggacagaaccaactgtacaacgagctgaacctgggcagacgggaagagtacgacgtgctggacaagcggagaggcagggaccctgagatgggcggaaagccccagcggagaaagaacccccaggaaggactgtataacgaactccagaaagacaagatggccgaagcctacagcgagatcggcatgaagggcgagcggagaagaggcaagggccacgatggcctgtaccagggcctgagcaccgccaccaaggacacctatgacgccctgcacatgcaggccctgcctccaagaagggccaagcgatctggatctggagcaacaaacttctcactactcaaacaagcaggtgacgtggaggagaatcccgggcctactagtatggactggatttggcgcatccttttccttgtcggcgctgctaccggcgcgcattccttcgaagaagtgcaactggtggaatcaggcggcggactggtgcagcctggcggatctctgagactgagctgtgccgccagcggcttcaccttcagcagaaacggcatgagctgggtgcgccaggcccctggaaaaggactggaatgggtggcaaccgtgtccagcggcggcagctacatctactacgccgacagcgtgaagggccggttcaccatctccagagacaacgccaagaacagcctgtacctccagatgaactccctgcgggccgaggacaccgccgtgtactattgtgccagacagggcaccaccgccctggctaccagattcttcgatgtgtggggccagggcaccctcgtgaccgtgtcatctacgcgtatccagaaccctgatcctgccgtgtaccagctgcgggatagcaagagcagcgacaagagcgtgtgtctgttcaccgacttcgacagccagaccaacgtgtcccagagcaaggactccgacgtgtacatcaccgataagaccgtgctggacatgcggagcatggacttcaagagcaactccgccgtggcctggtccaacaagtccgatttcgcctgcgccaacgccttcaacaacagcattatccccgaggacacattcttcccaagccccgagagcagctgcggtacccagagttttgggttgttggaccctaaattgtgctatctgttggacggaatcctgttcatttacggagtgatcctgaccgcattgttcctgcgggttaagttttccagatccgcagacgcacccgcttaccaacaagggcagaaccaactctacaatgaacttaatttggggcggagggaagagtacgacgttctggacaaaaggaggggacgagatcccgagatgggcggaaagcctcagcgaaggaagaatccgcaagaggggctttataacgaactccagaaagataaaatggcagaagcctatagtgagattgggatgaagggagaaaggaggaggggtaaaggtcacgatgggttgtaccaaggattgagcacagccactaaagatacctatgatgcgctccacatgcaggccctgccgccaaga

SEQ ID NO: 2252 - DNA, 2847 bp, Artificial Sequence
  Synthetic Polynucloetide
atggccttaccagtgaccgccttgctcctgccgctggccttgctgctccacgccgccaggccggaagtgcagctggttgaatctggcggaggactggttcagcctggcggatctctgagactgtcttgtgccgccagcggcttcagcttcagcgacttttggatgagctgggtccgacaggcccctggcaaaggacttgaatgggtcgccacaatcagccaggccggcagcgagaaggactacgtggactctgtgaagggcagattcaccatcagccgggacaacgccaagaagtccctgtacctccagatgaacagcctgagagccgaggacaccgccgtgtactattgtgcctctggcgtgtacagcttcgactacagaggccagggcaccctggtcacagtctcttctggtaccggcggaggcggatctggcggcggaggtagcggtggcggaggatctgaattcgacatccagatgacccagagcccccctagcctgtctgcctctgtgggcggcaaagtgaccatcacatgcaaggccagccaggacatcgaccgctacatggcctggtatcaggacaagcccggcaagggacccaagctgctgatccacgataccagcaccctccagcccggcatccccagcagattttctggcagcggctccggcagagactacagcttcagcatcagcaacctggaacccgaggacattgccacctactactgcctccagtacgacaacctgtggaccttcggcggaggcaccaagctggaaatcaagagactcgaggacctgaagaacgtgttcccacctgaggtggccgtgttcgagcctagcgaggccgagatcagccacacccagaaagccaccctcgtgtgcctggctaccggcttctaccccgaccatgtggaactgtcttggtgggtcaacggcaaagaggtgcacagcggcgtgtctaccgacccccagccactgaaagaacagcccgccctgaacgacagccggtactgcctgagcagcagactgagagtgtccgccaccttctggcagaacccccggaaccacttcagatgccaggtgcagttctacggcctgagcgagaacgacgagtggacccaggacagagccaagcccgtgacccagatcgtgtctgccgaagcctggggcagagccgattgcggatcccagagcttcggcctgctggaccccaagctgtgctacctgctggatggcatcctgttcatctacggcgtgatcctgaccgccctgttcctgagagtgaagttcagcagaagcgccgacgcccctgcctaccagcagggacagaaccaactgtacaacgagctgaacctgggcagacgggaagagtacgacgtgctggacaagcggagaggcagggaccctgagatgggcggaaagccccagcggagaaagaacccccaggaaggactgtataacgaactccagaaagacaagatggccgaagcctacagcgagatcggcatgaagggcgagcggagaagaggcaagggccacgatggcctgtaccagggcctgagcaccgccaccaaggacacctatgacgccctgcacatgcaggccctgcctccaagaagggccaagcgatctggatctggagcaacaaacttctcactactcaaacaagcaggtgacgtggaggagaatcccgggcctactagtatggactggatttggcgcatccttttccttgtcggcgctgctaccggcgcgcattccttcgaacaggtgcaactggtgcagagcggagccgagcttgtgaagcctggcgcttccgtgaagatgagctgcaaagccagcggctacatcttcaccaactacaacatccactgggtcaagaagtccccaggccagggcctggaatggatcggagccatctaccccggaaacggcgacgccccttacagccagaagttccaggacagagccaccctgaccgccgacaccagcagcagcaccacctacatggaactgagcagcctgaccagcgaggacagcgccgtgtactattgcgtgcgggccaactgggatgtggccttcgcctattggggccagggcacactggtgtccgtgtcctctacgcgtatccagaaccctgatcctgccgtgtaccagctgcgggatagcaagagcagcgacaagagcgtgtgtctgttcaccgacttcgacagccagaccaacgtgtcccagagcaaggactccgacgtgtacatcaccgataagaccgtgctggacatgcggagcatggacttcaagagcaactccgccgtggcctggtccaacaagtccgatttcgcctgcgccaacgccttcaacaacagcattatccccgaggacacattcttcccaagccccgagagcagctgcggtacccagagttttgggttgttggaccctaaattgtgctatctgttggacggaatcctgttcatttacggagtgatcctgaccgcattgttcctgcgggttaagttttccagatccgcagacgcacccgcttaccaacaagggcagaaccaactctacaatgaacttaatttggggcggagggaagagtacgacgttctggacaaaaggaggggacgagatcccgagatgggcggaaagcctcagcgaaggaagaatccgcaagaggggctttataacgaactccagaaagataaaatggcagaagcctatagtgagattgggatgaagggagaaaggaggaggggtaaaggtcacgatgggttgtaccaaggattgagcacagccactaaagatacctatgatgcgctccacatgcaggccctgccgccaaga

SEQ ID NO: 2253 - DNA, 2850 bp, Artificial Sequence
  Synthetic Polynucloetide
atggccttaccagtgaccgccttgctcctgccgctggccttgctgctccacgccgccaggccggaagtgcagctggttgaatctggcggaggactggttcagcctggcggatctctgagactgtcttgtgccgccagcggcttcagcttcagcgacttttggatgagctgggtccgacaggcccctggcaaaggacttgaatgggtcgccacaatcagccaggccggcagcgagaaggactacgtggactctgtgaagggcagattcaccatcagccgggacaacgccaagaagtccctgtacctccagatgaacagcctgagagccgaggacaccgccgtgtactattgtgcctctggcgtgtacagcttcgactacagaggccagggcaccctggtcacagtctcttctggtaccggcggaggcggatctggcggcggaggtagcggtggcggaggatctgaattcgacatccagatgacccagagccctgccagcctgtctgcctctgtgggcgagacagtgaccatcacctgtcgggtgtccggcaacatccacaactacctggcctggtatcagcagaagcagggcaagagcccccaactgctggtgtacaacgccaagaccctggccgatggcgtgcccagcagattttctggctctggcagcggcacccagtacagcctgaagatcaacagcctccagcccgaggacttcggcagctactactgccagcacttctggtccaacccctacaccttcggcggaggcaccaagctggaaatcaagctcgaggacctgaagaacgtgttcccacctgaggtggccgtgttcgagcctagcgaggccgagatcagccacacccagaaagccaccctcgtgtgcctggctaccggcttctaccccgaccatgtggaactgtcttggtgggtcaacggcaaagaggtgcacagcggcgtgtctaccgacccccagccactgaaagaacagcccgccctgaacgacagccggtactgcctgagcagcagactgagagtgtccgccaccttctggcagaacccccggaaccacttcagatgccaggtgcagttctacggcctgagcgagaacgacgagtggacccaggacagagccaagcccgtgacccagatcgtgtctgccgaagcctggggcagagccgattgcggatcccagagcttcggcctgctggaccccaagctgtgctacctgctggatggcatcctgttcatctacggcgtgatcctgaccgccctgttcctgagagtgaagttcagcagaagcgccgacgcccctgcctaccagcagggacagaaccaactgtacaacgagctgaacctgggcagacgggaagagtacgacgtgctggacaagcggagaggcagggaccctgagatgggcggaaagccccagcggagaaagaacccccaggaaggactgtataacgaactccagaaagacaagatggccgaagcctacagcgagatcggcatgaagggcgagcggagaagaggcaagggccacgatggcctgtaccagggcctgagcaccgccaccaaggacacctatgacgccctgcacatgcaggccctgcctccaagaagggccaagcgatctggatctggagcaacaaacttctcactactcaaacaagcaggtgacgtggaggagaatcccgggcctactagtatggactggatttggcgcatccttttccttgtcggcgctgctaccggcgcgcattccttcgaacaggtgcaactccagcagtctggcgcttccgtgaaggtgtcctgcaaggccagcgaactcgtgcggcctggcacaggctacgccttcaccaattacctgatcgagtgggtcaagcagaggcccggacagggcctggaatggatcggagtgattaacccaggcagcggcggcaccaactacaacgagaagttcaagggcaaggccaccctgaccgccgacaagagcagcagcacagcctacatgcaactgagcagcctgaccagcgacgacagcgccgtgtacttctgcgcccggtacagaagctacgactggtacttcgacgtgtggggagccggcaccaccgtgacagtgtcatctacgcgtatccagaaccctgatcctgccgtgtaccagctgcgggatagcaagagcagcgacaagagcgtgtgtctgttcaccgacttcgacagccagaccaacgtgtcccagagcaaggactccgacgtgtacatcaccgataagaccgtgctggacatgcggagcatggacttcaagagcaactccgccgtggcctggtccaacaagtccgatttcgcctgcgccaacgccttcaacaacagcattatccccgaggacacattcttcccaagccccgagagcagctgcggtacccagagttttgggttgttggaccctaaattgtgctatctgttggacggaatcctgttcatttacggagtgatcctgaccgcattgttcctgcgggttaagttttccagatccgcagacgcacccgcttaccaacaagggcagaaccaactctacaatgaacttaatttggggcggagggaagagtacgacgttctggacaaaaggaggggacgagatcccgagatgggcggaaagcctcagcgaaggaagaatccgcaagaggggctttataacgaactccagaaagataaaatggcagaagcctatagtgagattgggatgaagggagaaaggaggaggggtaaaggtcacgatgggttgtaccaaggattgagcacagccactaaagatacctatgatgcgctccacatgcaggccctgccgccaaga

SEQ ID NO: 2254 - DNA, 2847 bp, Artificial Sequence
  Synthetic Polynucloetide
atggccttaccagtgaccgccttgctcctgccgctggccttgctgctccacgccgccaggccggaagtgcagctggttgaatctggcggaggactggttcagcctggcggatctctgagactgtcttgtgccgccagcggcttcagcttcagcgacttttggatgagctgggtccgacaggcccctggcaaaggacttgaatgggtcgccacaatcagccaggccggcagcgagaaggactacgtggactctgtgaagggcagattcaccatcagccgggacaacgccaagaagtccctgtacctccagatgaacagcctgagagccgaggacaccgccgtgtactattgtgcctctggcgtgtacagcttcgactacagaggccagggcaccctggtcacagtctcttctggtaccggcggaggcggatctggcggcggaggtagcggtggcggaggatctgaattcgacatccagatgacccagagcttcagcagcctgagcgccagcgtgggcgacagagtgaccatcacctgtagagccagccaggacatcagcaactacctgaactggtatcagcagaagcccggcaaggcccccaagctgctgatctactacaccagcagactgcacagcggcgtgcccagcagattttctggcagcggctccggcaccgactacaccctgacaatcagctccctgcagcccgaggacttcgctacctacttctgtcagcaaggcaacaccctgccctggacctttggcggaggcaccaagctggaaatcaagagactcgaggacctgaagaacgtgttcccacctgaggtggccgtgttcgagcctagcgaggccgagatcagccacacccagaaagccaccctcgtgtgcctggctaccggcttctaccccgaccatgtggaactgtcttggtgggtcaacggcaaagaggtgcacagcggcgtgtctaccgacccccagccactgaaagaacagcccgccctgaacgacagccggtactgcctgagcagcagactgagagtgtccgccaccttctggcagaacccccggaaccacttcagatgccaggtgcagttctacggcctgagcgagaacgacgagtggacccaggacagagccaagcccgtgacccagatcgtgtctgccgaagcctggggcagagccgattgcggatcccagagcttcggcctgctggaccccaagctgtgctacctgctggatggcatcctgttcatctacggcgtgatcctgaccgccctgttcctgagagtgaagttcagcagaagcgccgacgcccctgcctaccagcagggacagaaccaactgtacaacgagctgaacctgggcagacgggaagagtacgacgtgctggacaagcggagaggcagggaccctgagatgggcggaaagccccagcggagaaagaacccccaggaaggactgtataacgaactccagaaagacaagatggccgaagcctacagcgagatcggcatgaagggcgagcggagaagaggcaagggccacgatggcctgtaccagggcctgagcaccgccaccaaggacacctatgacgccctgcacatgcaggccctgcctccaagaagggccaagcgatctggatctggagcaacaaacttctcactactcaaacaagcaggtgacgtggaggagaatcccgggcctactagtatggactggatttggcgcatccttttccttgtcggcgctgctaccggcgcgcattccttcgaagaagtgcaactggtgcagtccggcggagggctggtgcagagcggaggatctctgagactgagctgcagagccagcggctacaccttcacccggtactggatgctgtgggtgcgccagaggccaggcaagggactggaatgggtggccgagatcaacccccggaacgaccggaccaactacaacgagaagttcaagacccggttcaccatcagcgtggacagaagcaagaacaccctgtacctgcagatggacagcctgcgggccgaggataccgccgtgtacttttgtgctctgggaggcggctacgctatggactactggggccagggaacccttgtgaccgtgtcctctacgcgtatccagaaccctgatcctgccgtgtaccagctgcgggatagcaagagcagcgacaagagcgtgtgtctgttcaccgacttcgacagccagaccaacgtgtcccagagcaaggactccgacgtgtacatcaccgataagaccgtgctggacatgcggagcatggacttcaagagcaactccgccgtggcctggtccaacaagtccgatttcgcctgcgccaacgccttcaacaacagcattatccccgaggacacattcttcccaagccccgagagcagctgcggtacccagagttttgggttgttggaccctaaattgtgctatctgttggacggaatcctgttcatttacggagtgatcctgaccgcattgttcctgcgggttaagttttccagatccgcagacgcacccgcttaccaacaagggcagaaccaactctacaatgaacttaatttggggcggagggaagagtacgacgttctggacaaaaggaggggacgagatcccgagatgggcggaaagcctcagcgaaggaagaatccgcaagaggggctttataacgaactccagaaagataaaatggcagaagcctatagtgagattgggatgaagggagaaaggaggaggggtaaaggtcacgatgggttgtaccaaggattgagcacagccactaaagatacctatgatgcgctccacatgcaggccctgccgccaaga

SEQ ID NO: 2255 - DNA, 2850 bp, Artificial Sequence
  Synthetic Polynucloetide
atggccttaccagtgaccgccttgctcctgccgctggccttgctgctccacgccgccaggccggaagtgcagctggttgaatctggcggaggactggttcagcctggcggatctctgagactgtcttgtgccgccagcggcttcagcttcagcgacttttggatgagctgggtccgacaggcccctggcaaaggacttgaatgggtcgccacaatcagccaggccggcagcgagaaggactacgtggactctgtgaagggcagattcaccatcagccgggacaacgccaagaagtccctgtacctccagatgaacagcctgagagccgaggacaccgccgtgtactattgtgcctctggcgtgtacagcttcgactacagaggccagggcaccctggtcacagtctcttctggtaccggcggaggcggatctggcggcggaggtagcggtggcggaggatctgaattcgacatccagatgacacagtctccggcgtcactgtccgcctccgtgggggagactgtgactattatttgtagggcatcagttaacatctactcttatttggcctggtaccagcagaagcaaggcaagagtcctcagctgctggtgtataatgcgaagatcctggcagagggcgtgccgagccggttctccggcagcggctcaggtacccaattttccctcaagatcaattcactgcagccagaggactttggcagttactattgtcaacaccactacggcacattcactttcgggtccggtacaaaattggagattaagcgactcgaggacctgaagaacgtgttcccacctgaggtggccgtgttcgagcctagcgaggccgagatcagccacacccagaaagccaccctcgtgtgcctggctaccggcttctaccccgaccatgtggaactgtcttggtgggtcaacggcaaagaggtgcacagcggcgtgtctaccgacccccagccactgaaagaacagcccgccctgaacgacagccggtactgcctgagcagcagactgagagtgtccgccaccttctggcagaacccccggaaccacttcagatgccaggtgcagttctacggcctgagcgagaacgacgagtggacccaggacagagccaagcccgtgacccagatcgtgtctgccgaagcctggggcagagccgattgcggatcccagagcttcggcctgctggaccccaagctgtgctacctgctggatggcatcctgttcatctacggcgtgatcctgaccgccctgttcctgagagtgaagttcagcagaagcgccgacgcccctgcctaccagcagggacagaaccaactgtacaacgagctgaacctgggcagacgggaagagtacgacgtgctggacaagcggagaggcagggaccctgagatgggcggaaagccccagcggagaaagaacccccaggaaggactgtataacgaactccagaaagacaagatggccgaagcctacagcgagatcggcatgaagggcgagcggagaagaggcaagggccacgatggcctgtaccagggcctgagcaccgccaccaaggacacctatgacgccctgcacatgcaggccctgcctccaagaagggccaagcgatctggatctggagcaacaaacttctcactactcaaacaagcaggtgacgtggaggagaatcccgggcctactagtatggactggatttggcgcatccttttccttgtcggcgctgctaccggcgcgcattccttcgaacaggtacagttgaaagaaagcgggcctggactggtagcgccttcccaatctctctccatcacgtgcaccatctctggcttctccctgacttcctatggagttcactgggtgaggcagccccccggcaagggactggaatggctggtcgtcatctggtccgacgggtccacaacctacaactccgctctgaaaagtcggctctctatttctaaagataatagcaagagccaggtgtttctgaaaatgaactctctgcagaccgatgatacggccatttactactgcgcttcacactatggctcaaccttggcattcgcttcctggggccacggaacactggtgaccgtttccgcagccacgcgtatccagaaccctgatcctgccgtgtaccagctgcgggatagcaagagcagcgacaagagcgtgtgtctgttcaccgacttcgacagccagaccaacgtgtcccagagcaaggactccgacgtgtacatcaccgataagaccgtgctggacatgcggagcatggacttcaagagcaactccgccgtggcctggtccaacaagtccgatttcgcctgcgccaacgccttcaacaacagcattatccccgaggacacattcttcccaagccccgagagcagctgcggtacccagagttttgggttgttggaccctaaattgtgctatctgttggacggaatcctgttcatttacggagtgatcctgaccgcattgttcctgcgggttaagttttccagatccgcagacgcacccgcttaccaacaagggcagaaccaactctacaatgaacttaatttggggcggagggaagagtacgacgttctggacaaaaggaggggacgagatcccgagatgggcggaaagcctcagcgaaggaagaatccgcaagaggggctttataacgaactccagaaagataaaatggcagaagcctatagtgagattgggatgaagggagaaaggaggaggggtaaaggtcacgatgggttgtaccaaggattgagcacagccactaaagatacctatgatgcgctccacatgcaggccctgccgccaaga

SEQ ID NO: 2256 - DNA, 2874 bp, Artificial Sequence
  Synthetic Polynucloetide
atggccttaccagtgaccgccttgctcctgccgctggccttgctgctccacgccgccaggccggaagtgcagctggttgaatctggcggaggactggttcagcctggcggatctctgagactgtcttgtgccgccagcggcttcagcttcagcgacttttggatgagctgggtccgacaggcccctggcaaaggacttgaatgggtcgccacaatcagccaggccggcagcgagaaggactacgtggactctgtgaagggcagattcaccatcagccgggacaacgccaagaagtccctgtacctccagatgaacagcctgagagccgaggacaccgccgtgtactattgtgcctctggcgtgtacagcttcgactacagaggccagggcaccctggtcacagtctcttctggtaccggcggaggcggatctggcggcggaggtagcggtggcggaggatctgaattcgacattgtgatgacccagtctcacaaattcatgtccacatcagtaggagacagggtcagcgtcacctgcaaggccagtcagaatgtgggtaataatgtagcctggtatcaacagaaaccagggcaatctcctaaagtactgatttactcggcatcctaccggtacagtggagtccctgatcgcttcacaggcagtggatctgggacagatttcactctcaccatcagtaatgtgcagtctgaagacttggcagagtatttctgtcagcaatataacacctatccattcacgttcggctcggggacaaagttggaaataaaactcgaggacctgaagaacgtgttcccacctgaggtggccgtgttcgagcctagcgaggccgagatcagccacacccagaaagccaccctcgtgtgcctggctaccggcttctaccccgaccatgtggaactgtcttggtgggtcaacggcaaagaggtgcacagcggcgtgtctaccgacccccagccactgaaagaacagcccgccctgaacgacagccggtactgcctgagcagcagactgagagtgtccgccaccttctggcagaacccccggaaccacttcagatgccaggtgcagttctacggcctgagcgagaacgacgagtggacccaggacagagccaagcccgtgacccagatcgtgtctgccgaagcctggggcagagccgattgcggatcccagagcttcggcctgctggaccccaagctgtgctacctgctggatggcatcctgttcatctacggcgtgatcctgaccgccctgttcctgagagtgaagttcagcagaagcgccgacgcccctgcctaccagcagggacagaaccaactgtacaacgagctgaacctgggcagacgggaagagtacgacgtgctggacaagcggagaggcagggaccctgagatgggcggaaagccccagcggagaaagaacccccaggaaggactgtataacgaactccagaaagacaagatggccgaagcctacagcgagatcggcatgaagggcgagcggagaagaggcaagggccacgatggcctgtaccagggcctgagcaccgccaccaaggacacctatgacgccctgcacatgcaggccctgcctccaagaagggccaagcgatctggatctggagcaacaaacttctcactactcaaacaagcaggtgacgtggaggagaatcccgggcctactagtatggactggatttggcgcatccttttccttgtcggcgctgctaccggcgcgcattccttcgaagaggtacagctggaggaaagcggtggaggactggtgcaacctggagggtctatgaagctctcttgcgtagcttctgggttcacgttctccaattactggatgaactgggtgcggcagtcccccgagaaaggcctggaatgggtagcagaaattcggttcaagtcccataactatgctacacactttgccgagtctgtcaaaggccggttcactattagtcgagacgacagcaagtcttcagtctacctgcagatgaataacttgcgggcagaggacacaggtatctactactgcaccaggagaatcggcaactccgactatgactggtggtactttgacgtctggggagcaggcaccagcgtgacggtgagttcagcctcaacgcgtatccagaaccctgatcctgccgtgtaccagctgcgggatagcaagagcagcgacaagagcgtgtgtctgttcaccgacttcgacagccagaccaacgtgtcccagagcaaggactccgacgtgtacatcaccgataagaccgtgctggacatgcggagcatggacttcaagagcaactccgccgtggcctggtccaacaagtccgatttcgcctgcgccaacgccttcaacaacagcattatccccgaggacacattcttcccaagccccgagagcagctgcggtacccagagttttgggttgttggaccctaaattgtgctatctgttggacggaatcctgttcatttacggagtgatcctgaccgcattgttcctgcgggttaagttttccagatccgcagacgcacccgcttaccaacaagggcagaaccaactctacaatgaacttaatttggggcggagggaagagtacgacgttctggacaaaaggaggggacgagatcccgagatgggcggaaagcctcagcgaaggaagaatccgcaagaggggctttataacgaactccagaaagataaaatggcagaagcctatagtgagattgggatgaagggagaaaggaggaggggtaaaggtcacgatgggttgtaccaaggattgagcacagccactaaagatacctatgatgcgctccacatgcaggccctgccgccaaga

SEQ ID NO: 2257 - DNA, 2853 bp, Artificial Sequence
  Synthetic Polynucloetide
atggccttaccagtgaccgccttgctcctgccgctggccttgctgctccacgccgccaggccggaagtgcagctggttgaatctggcggaggactggttcagcctggcggatctctgagactgtcttgtgccgccagcggcttcagcttcagcgacttttggatgagctgggtccgacaggcccctggcaaaggacttgaatgggtcgccacaatcagccaggccggcagcgagaaggactacgtggactctgtgaagggcagattcaccatcagccgggacaacgccaagaagtccctgtacctccagatgaacagcctgagagccgaggacaccgccgtgtactattgtgcctctggcgtgtacagcttcgactacagaggccagggcaccctggtcacagtctcttctggtaccggcggaggcggatctggcggcggaggtagcggtggcggaggatctgaattcgaccagatcgtgctgacccagtcccccgctattatgtccgcatcaccgggcgaaaaagtgacgatctcctgtagcgcttcatctagcgtctcctacatgtattggtatcaacagaaacctgggtctagcccaaagccgtggatctacagaaccagtaaccttgccagtggggtgccagcccgcttcagcggtagtggcagtggaacttcctatagcctcacaataagcaacatggaggctgaagatgccgctgcctattactgccagcagtaccacagttacccaaccacgttcggcgggggaactaagctcgaagtaaaactcgaggacctgaagaacgtgttcccacctgaggtggccgtgttcgagcctagcgaggccgagatcagccacacccagaaagccaccctcgtgtgcctggctaccggcttctaccccgaccatgtggaactgtcttggtgggtcaacggcaaagaggtgcacagcggcgtgtctaccgacccccagccactgaaagaacagcccgccctgaacgacagccggtactgcctgagcagcagactgagagtgtccgccaccttctggcagaacccccggaaccacttcagatgccaggtgcagttctacggcctgagcgagaacgacgagtggacccaggacagagccaagcccgtgacccagatcgtgtctgccgaagcctggggcagagccgattgcggatcccagagcttcggcctgctggaccccaagctgtgctacctgctggatggcatcctgttcatctacggcgtgatcctgaccgccctgttcctgagagtgaagttcagcagaagcgccgacgcccctgcctaccagcagggacagaaccaactgtacaacgagctgaacctgggcagacgggaagagtacgacgtgctggacaagcggagaggcagggaccctgagatgggcggaaagccccagcggagaaagaacccccaggaaggactgtataacgaactccagaaagacaagatggccgaagcctacagcgagatcggcatgaagggcgagcggagaagaggcaagggccacgatggcctgtaccagggcctgagcaccgccaccaaggacacctatgacgccctgcacatgcaggccctgcctccaagaagggccaagcgatctggatctggagcaacaaacttctcactactcaaacaagcaggtgacgtggaggagaatcccgggcctactagtatggactggatttggcgcatccttttccttgtcggcgctgctaccggcgcgcattccttcgaagaggtgcagctggtggaatctgggggcggcctggtccaacctaagggatcactcaagctctcttgtgcggccagcggattctctttcaatacctatgctatgaattgggtgagacaggcgcccggaaagggcctcgaatggatagcccatatccggtcaaaatcaaacaatttcgcaacctactatgcggactccgtgaaggaccgattttccatctcccgagatgcctccgagaatattctgttcctgcagatgaataacctcaagacagaggacaccgccatgtactactgtgtgcgccagggcggtgactttcccatggattactgggggcaggggaccagcgtgaccgtgagctctacgcgtatccagaaccctgatcctgccgtgtaccagctgcgggatagcaagagcagcgacaagagcgtgtgtctgttcaccgacttcgacagccagaccaacgtgtcccagagcaaggactccgacgtgtacatcaccgataagaccgtgctggacatgcggagcatggacttcaagagcaactccgccgtggcctggtccaacaagtccgatttcgcctgcgccaacgccttcaacaacagcattatccccgaggacacattcttcccaagccccgagagcagctgcggtacccagagttttgggttgttggaccctaaattgtgctatctgttggacggaatcctgttcatttacggagtgatcctgaccgcattgttcctgcgggttaagttttccagatccgcagacgcacccgcttaccaacaagggcagaaccaactctacaatgaacttaatttggggcggagggaagagtacgacgttctggacaaaaggaggggacgagatcccgagatgggcggaaagcctcagcgaaggaagaatccgcaagaggggctttataacgaactccagaaagataaaatggcagaagcctatagtgagattgggatgaagggagaaaggaggaggggtaaaggtcacgatgggttgtaccaaggattgagcacagccactaaagatacctatgatgcgctccacatgcaggccctgccgccaaga

SEQ ID NO: 2258 - DNA, 2850 bp, Artificial Sequence
  Synthetic Polynucloetide
atggccttaccagtgaccgccttgctcctgccgctggccttgctgctccacgccgccaggccggaagtgcagctggttgaatctggcggaggactggttcagcctggcggatctctgagactgtcttgtgccgccagcggcttcagcttcagcgacttttggatgagctgggtccgacaggcccctggcaaaggacttgaatgggtcgccacaatcagccaggccggcagcgagaaggactacgtggactctgtgaagggcagattcaccatcagccgggacaacgccaagaagtccctgtacctccagatgaacagcctgagagccgaggacaccgccgtgtactattgtgcctctggcgtgtacagcttcgactacagaggccagggcaccctggtcacagtctcttctggtaccggcggaggcggatctggcggcggaggtagcggtggcggaggatctgaattcgacgacatccagatgacccagagcagcagcagcttcagcgtgagcctgggcgacagagtgaccatcacctgcatggccagcgaggacatctacatcagactggcctggtaccagcagaagcccggcaacgcccccagactgctgatcagcgccgccaccagcctggagaccggcgtgcccagcagattcagcggcagcggcagcggcaaggactacaccctgagcatcaccagcctgcagaccgaggacgtgggcacctactactgccagcagtactggagcagcccctggaccttcggcggcggcaccaagctggagatcaacctcgaggacctgaagaacgtgttcccacctgaggtggccgtgttcgagcctagcgaggccgagatcagccacacccagaaagccaccctcgtgtgcctggctaccggcttctaccccgaccatgtggaactgtcttggtgggtcaacggcaaagaggtgcacagcggcgtgtctaccgacccccagccactgaaagaacagcccgccctgaacgacagccggtactgcctgagcagcagactgagagtgtccgccaccttctggcagaacccccggaaccacttcagatgccaggtgcagttctacggcctgagcgagaacgacgagtggacccaggacagagccaagcccgtgacccagatcgtgtctgccgaagcctggggcagagccgattgcggatcccagagcttcggcctgctggaccccaagctgtgctacctgctggatggcatcctgttcatctacggcgtgatcctgaccgccctgttcctgagagtgaagttcagcagaagcgccgacgcccctgcctaccagcagggacagaaccaactgtacaacgagctgaacctgggcagacgggaagagtacgacgtgctggacaagcggagaggcagggaccctgagatgggcggaaagccccagcggagaaagaacccccaggaaggactgtataacgaactccagaaagacaagatggccgaagcctacagcgagatcggcatgaagggcgagcggagaagaggcaagggccacgatggcctgtaccagggcctgagcaccgccaccaaggacacctatgacgccctgcacatgcaggccctgcctccaagaagggccaagcgatctggatctggagcaacaaacttctcactactcaaacaagcaggtgacgtggaggagaatcccgggcctactagtatggactggatttggcgcatccttttccttgtcggcgctgctaccggcgcgcattccttcgaagacgtgcagctgcaggagagcggccccggcctggtgaagcccagccagagcctgagcctgacctgcaccgtgaccggctacagcatcaccagcgactacacctggaactggatcagacagttccccggcaacaagctggagtggatgggctacatcacctacagcggcagcaccagctacaaccccagcctgaagagcagaaacagcatcaccagagacaccagcaagaaccagttcttcctgcagctgaacagcgtgaccaccgaggacaccgccacctactactgcgccagactgggcagaagatacacaatggactactggggccagggcaccagcgtgaccgtgagcagcacgcgtatccagaaccctgatcctgccgtgtaccagctgcgggatagcaagagcagcgacaagagcgtgtgtctgttcaccgacttcgacagccagaccaacgtgtcccagagcaaggactccgacgtgtacatcaccgataagaccgtgctggacatgcggagcatggacttcaagagcaactccgccgtggcctggtccaacaagtccgatttcgcctgcgccaacgccttcaacaacagcattatccccgaggacacattcttcccaagccccgagagcagctgcggtacccagagttttgggttgttggaccctaaattgtgctatctgttggacggaatcctgttcatttacggagtgatcctgaccgcattgttcctgcgggttaagttttccagatccgcagacgcacccgcttaccaacaagggcagaaccaactctacaatgaacttaatttggggcggagggaagagtacgacgttctggacaaaaggaggggacgagatcccgagatgggcggaaagcctcagcgaaggaagaatccgcaagaggggctttataacgaactccagaaagataaaatggcagaagcctatagtgagattgggatgaagggagaaaggaggaggggtaaaggtcacgatgggttgtaccaaggattgagcacagccactaaagatacctatgatgcgctccacatgcaggccctgccgccaaga

SEQ ID NO: 2259 - DNA, 2859 bp, Artificial Sequence
  Synthetic Polynucloetide
atggccttaccagtgaccgccttgctcctgccgctggccttgctgctccacgccgccaggccggaagtgcagctggttgaatctggcggaggactggttcagcctggcggatctctgagactgtcttgtgccgccagcggcttcagcttcagcgacttttggatgagctgggtccgacaggcccctggcaaaggacttgaatgggtcgccacaatcagccaggccggcagcgagaaggactacgtggactctgtgaagggcagattcaccatcagccgggacaacgccaagaagtccctgtacctccagatgaacagcctgagagccgaggacaccgccgtgtactattgtgcctctggcgtgtacagcttcgactacagaggccagggcaccctggtcacagtctcttctggtaccggcggaggcggatctggcggcggaggtagcggtggcggaggatctgaattcgacgacatccagatgacccagagccccagcagcctgtctgccagcgtgggcgacagagtgaccatcacctgtagagccagccagagcatcagcagctacctgaactggtatcagcagaagcccggcaaggcccccaaactgctgatctacgacgccagcaacctggaaaccggcgtgcccagcagattttccggcagcggctctggcaccgacttcaccttcaccatcagctccctccagcccgaggacattgccacctactactgccagcagtacgacaacctgcccctgacctttggcggaggcaccaaggtggacatcaagagactcgaggacctgaagaacgtgttcccacctgaggtggccgtgttcgagcctagcgaggccgagatcagccacacccagaaagccaccctcgtgtgcctggctaccggcttctaccccgaccatgtggaactgtcttggtgggtcaacggcaaagaggtgcacagcggcgtgtctaccgacccccagccactgaaagaacagcccgccctgaacgacagccggtactgcctgagcagcagactgagagtgtccgccaccttctggcagaacccccggaaccacttcagatgccaggtgcagttctacggcctgagcgagaacgacgagtggacccaggacagagccaagcccgtgacccagatcgtgtctgccgaagcctggggcagagccgattgcggatcccagagcttcggcctgctggaccccaagctgtgctacctgctggatggcatcctgttcatctacggcgtgatcctgaccgccctgttcctgagagtgaagttcagcagaagcgccgacgcccctgcctaccagcagggacagaaccaactgtacaacgagctgaacctgggcagacgggaagagtacgacgtgctggacaagcggagaggcagggaccctgagatgggcggaaagccccagcggagaaagaacccccaggaaggactgtataacgaactccagaaagacaagatggccgaagcctacagcgagatcggcatgaagggcgagcggagaagaggcaagggccacgatggcctgtaccagggcctgagcaccgccaccaaggacacctatgacgccctgcacatgcaggccctgcctccaagaagggccaagcgatctggatctggagcaacaaacttctcactactcaaacaagcaggtgacgtggaggagaatcccgggcctactagtatggactggatttggcgcatccttttccttgtcggcgctgctaccggcgcgcattccttcgaacaggtgcaactggtggaatctggcggcggagtggtgcagcctggcagaagcctgagactgagctgtgccgccagcggcttcacctttagcagctacgccatgcactgggtgcgccaggcccctggaaaaggcctggaatgggtggccgtgatctcctacgacggctccaacaagtattacgccgacagcgtgaagggccggttcaccatctccagagacaacagcaagaacaccctgtacctccagatgaacagcctgcgggccgaggacaccgccgtgtactattgtgccagggctcacaacagcagctcttggagcttcgactactggggccagggcaccctcgtgaccgtgtcatctacgcgtatccagaaccctgatcctgccgtgtaccagctgcgggatagcaagagcagcgacaagagcgtgtgtctgttcaccgacttcgacagccagaccaacgtgtcccagagcaaggactccgacgtgtacatcaccgataagaccgtgctggacatgcggagcatggacttcaagagcaactccgccgtggcctggtccaacaagtccgatttcgcctgcgccaacgccttcaacaacagcattatccccgaggacacattcttcccaagccccgagagcagctgcggtacccagagttttgggttgttggaccctaaattgtgctatctgttggacggaatcctgttcatttacggagtgatcctgaccgcattgttcctgcgggttaagttttccagatccgcagacgcacccgcttaccaacaagggcagaaccaactctacaatgaacttaatttggggcggagggaagagtacgacgttctggacaaaaggaggggacgagatcccgagatgggcggaaagcctcagcgaaggaagaatccgcaagaggggctttataacgaactccagaaagataaaatggcagaagcctatagtgagattgggatgaagggagaaaggaggaggggtaaaggtcacgatgggttgtaccaaggattgagcacagccactaaagatacctatgatgcgctccacatgcaggccctgccgccaaga

SEQ ID NO: 2260 - DNA, 2886 bp, Artificial Sequence
  Synthetic Polynucloetide
atggccttaccagtgaccgccttgctcctgccgctggccttgctgctccacgccgccaggccggaagtgcagctggttgaatctggcggaggactggttcagcctggcggatctctgagactgtcttgtgccgccagcggcttcagcttcagcgacttttggatgagctgggtccgacaggcccctggcaaaggacttgaatgggtcgccacaatcagccaggccggcagcgagaaggactacgtggactctgtgaagggcagattcaccatcagccgggacaacgccaagaagtccctgtacctccagatgaacagcctgagagccgaggacaccgccgtgtactattgtgcctctggcgtgtacagcttcgactacagaggccagggcaccctggtcacagtctcttctggtaccggcggaggcggatctggcggcggaggtagcggtggcggaggatctgaattcgacgacgtcgtgatgacccagagccctctgagcctgcctgtgtccctgggcgatcaggccagcatctcctgcagatccagccagagactggtgcacagcaacggcaacacctacctgcactggtatctgcagaagcccggccagagccccaagctgctgatctaccgggtgtccaacagattccccggcgtgcccgatagattcagcggctctggcagcggcaccgacttcaccctgaagatcagccgggtggaagccgaggacctgggcatctatttctgcagccagagcacccacgtgccctacacctttggcggaggcaccaagctggaaatcaagcggctcgaggacctgaagaacgtgttcccacctgaggtggccgtgttcgagcctagcgaggccgagatcagccacacccagaaagccaccctcgtgtgcctggctaccggcttctaccccgaccatgtggaactgtcttggtgggtcaacggcaaagaggtgcacagcggcgtgtctaccgacccccagccactgaaagaacagcccgccctgaacgacagccggtactgcctgagcagcagactgagagtgtccgccaccttctggcagaacccccggaaccacttcagatgccaggtgcagttctacggcctgagcgagaacgacgagtggacccaggacagagccaagcccgtgacccagatcgtgtctgccgaagcctggggcagagccgattgcggatcccagagcttcggcctgctggaccccaagctgtgctacctgctggatggcatcctgttcatctacggcgtgatcctgaccgccctgttcctgagagtgaagttcagcagaagcgccgacgcccctgcctaccagcagggacagaaccaactgtacaacgagctgaacctgggcagacgggaagagtacgacgtgctggacaagcggagaggcagggaccctgagatgggcggaaagccccagcggagaaagaacccccaggaaggactgtataacgaactccagaaagacaagatggccgaagcctacagcgagatcggcatgaagggcgagcggagaagaggcaagggccacgatggcctgtaccagggcctgagcaccgccaccaaggacacctatgacgccctgcacatgcaggccctgcctccaagaagggccaagcgatctggatctggagcaacaaacttctcactactcaaacaagcaggtgacgtggaggagaatcccgggcctactagtatggactggatttggcgcatccttttccttgtcggcgctgctaccggcgcgcattccttcgaagaagtgcggctgcagcagtctggccccgacctgattaagcctggggccagcgtgaagatgagctgcaaggccagcggctacaccttcaccggctacgtgatgcactgggtcaagcagaggccaggccagggcctggaatggatcggcttcatcaacccctacaacgacgacatccagagcaacgagcggttccggggcaaggccaccctgaccagcgataagagcagcaccaccgcctacatggaactgagcagcctgacctccgaggacagcgccgtgtactactgtgctaggggagccggctacaacttcgacggggcctacagattcttcgacttttggggccagggcaccacactgaccgtgtcctctacgcgtatccagaaccctgatcctgccgtgtaccagctgcgggatagcaagagcagcgacaagagcgtgtgtctgttcaccgacttcgacagccagaccaacgtgtcccagagcaaggactccgacgtgtacatcaccgataagaccgtgctggacatgcggagcatggacttcaagagcaactccgccgtggcctggtccaacaagtccgatttcgcctgcgccaacgccttcaacaacagcattatccccgaggacacattcttcccaagccccgagagcagctgcggtacccagagttttgggttgttggaccctaaattgtgctatctgttggacggaatcctgttcatttacggagtgatcctgaccgcattgttcctgcgggttaagttttccagatccgcagacgcacccgcttaccaacaagggcagaaccaactctacaatgaacttaatttggggcggagggaagagtacgacgttctggacaaaaggaggggacgagatcccgagatgggcggaaagcctcagcgaaggaagaatccgcaagaggggctttataacgaactccagaaagataaaatggcagaagcctatagtgagattgggatgaagggagaaaggaggaggggtaaaggtcacgatgggttgtaccaaggattgagcacagccactaaagatacctatgatgcgctccacatgcaggccctgccgccaaga

SEQ ID NO: 2261 - DNA, 2859 bp, Artificial Sequence
  Synthetic Polynucloetide
atggccttaccagtgaccgccttgctcctgccgctggccttgctgctccacgccgccaggccggaagtgcagctggttgaatctggcggaggactggttcagcctggcggatctctgagactgtcttgtgccgccagcggcttcagcttcagcgacttttggatgagctgggtccgacaggcccctggcaaaggacttgaatgggtcgccacaatcagccaggccggcagcgagaaggactacgtggactctgtgaagggcagattcaccatcagccgggacaacgccaagaagtccctgtacctccagatgaacagcctgagagccgaggacaccgccgtgtactattgtgcctctggcgtgtacagcttcgactacagaggccagggcaccctggtcacagtctcttctggtaccggcggaggcggatctggcggcggaggtagcggtggcggaggatctgaattcgacagctacgagctgacccagcctcctagcgtgtccgtgtctcctggacagaccgccaccatctcttgcagcggcgatcaactgggcgggaagtacggccactggtatcagaagaagcccggccagagccccgtgctggtgctgtaccaggacagaaaacggcctgccggcatccccgagagattcagcggaagcagcagcggcaacaccatcaccctgaccatcagcggcacccaggccgtggatgaggccgactactactgccaggcttgggacaccaatctgggcggcgtgttcggcggaggcaccaaagtgacagtgctgggacagctcgaggacctgaagaacgtgttcccacctgaggtggccgtgttcgagcctagcgaggccgagatcagccacacccagaaagccaccctcgtgtgcctggctaccggcttctaccccgaccatgtggaactgtcttggtgggtcaacggcaaagaggtgcacagcggcgtgtctaccgacccccagccactgaaagaacagcccgccctgaacgacagccggtactgcctgagcagcagactgagagtgtccgccaccttctggcagaacccccggaaccacttcagatgccaggtgcagttctacggcctgagcgagaacgacgagtggacccaggacagagccaagcccgtgacccagatcgtgtctgccgaagcctggggcagagccgattgcggatcccagagcttcggcctgctggaccccaagctgtgctacctgctggatggcatcctgttcatctacggcgtgatcctgaccgccctgttcctgagagtgaagttcagcagaagcgccgacgcccctgcctaccagcagggacagaaccaactgtacaacgagctgaacctgggcagacgggaagagtacgacgtgctggacaagcggagaggcagggaccctgagatgggcggaaagccccagcggagaaagaacccccaggaaggactgtataacgaactccagaaagacaagatggccgaagcctacagcgagatcggcatgaagggcgagcggagaagaggcaagggccacgatggcctgtaccagggcctgagcaccgccaccaaggacacctatgacgccctgcacatgcaggccctgcctccaagaagggccaagcgatctggatctggagcaacaaacttctcactactcaaacaagcaggtgacgtggaggagaatcccgggcctactagtatggactggatttggcgcatccttttccttgtcggcgctgctaccggcgcgcattccttcgaacaggtgcaactggtggaaagcggagccgaagtgaagaaacctggggccagcgtgaaggtgtcctgcaaggccagcggctacacctttaccggctactacatgcactgggtgcgccaggctccaggccagggactggaatggatgggccggatcaaccccaatagcggcggcaccaactacgcccagaaattccagggcagagtgaccatgaccagagacaccagcatcagcaccgcctacatggaactgagccggctgagaagcgacgacaccgccgtgtactactgcgccagccctagaggcagaggcagcgccttcgatatttggggccagggcacactcgtgaccgtgtcctctacgcgtatccagaaccctgatcctgccgtgtaccagctgcgggatagcaagagcagcgacaagagcgtgtgtctgttcaccgacttcgacagccagaccaacgtgtcccagagcaaggactccgacgtgtacatcaccgataagaccgtgctggacatgcggagcatggacttcaagagcaactccgccgtggcctggtccaacaagtccgatttcgcctgcgccaacgccttcaacaacagcattatccccgaggacacattcttcccaagccccgagagcagctgcggtacccagagttttgggttgttggaccctaaattgtgctatctgttggacggaatcctgttcatttacggagtgatcctgaccgcattgttcctgcgggttaagttttccagatccgcagacgcacccgcttaccaacaagggcagaaccaactctacaatgaacttaatttggggcggagggaagagtacgacgttctggacaaaaggaggggacgagatcccgagatgggcggaaagcctcagcgaaggaagaatccgcaagaggggctttataacgaactccagaaagataaaatggcagaagcctatagtgagattgggatgaagggagaaaggaggaggggtaaaggtcacgatgggttgtaccaaggattgagcacagccactaaagatacctatgatgcgctccacatgcaggccctgccgccaaga

SEQ ID NO: 2262 - DNA, 2868 bp, Artificial Sequence
  Synthetic Polynucloetide
atggccttaccagtgaccgccttgctcctgccgctggccttgctgctccacgccgccaggccggaagtgcagctggttgaatctggcggaggactggttcagcctggcggatctctgagactgtcttgtgccgccagcggcttcagcttcagcgacttttggatgagctgggtccgacaggcccctggcaaaggacttgaatgggtcgccacaatcagccaggccggcagcgagaaggactacgtggactctgtgaagggcagattcaccatcagccgggacaacgccaagaagtccctgtacctccagatgaacagcctgagagccgaggacaccgccgtgtactattgtgcctctggcgtgtacagcttcgactacagaggccagggcaccctggtcacagtctcttctggtaccggcggaggcggatctggcggcggaggtagcggtggcggaggatctgaattcgacaacttcatgctgacccagccccacagcgtgtccgagagccctggcaagaccgtgaccatctcctgcaccagaagcagcggctctatcgccagcaaatacgtgcagtggtatcagcagaggcccggcagcagccctaccaccgtgatctacgaggacaaccagaggcctagcggcgtgcccgatagattcagcggcagcatcgacaccagcagcaacagcgccagcctgaccatcagcggcctgagaacagaggacgaggccgactactactgccacagctacgacagcaacaaccactccgtgttcggcggaggcaccaaagtgacagtgctgggacagctcgaggacctgaagaacgtgttcccacctgaggtggccgtgttcgagcctagcgaggccgagatcagccacacccagaaagccaccctcgtgtgcctggctaccggcttctaccccgaccatgtggaactgtcttggtgggtcaacggcaaagaggtgcacagcggcgtgtctaccgacccccagccactgaaagaacagcccgccctgaacgacagccggtactgcctgagcagcagactgagagtgtccgccaccttctggcagaacccccggaaccacttcagatgccaggtgcagttctacggcctgagcgagaacgacgagtggacccaggacagagccaagcccgtgacccagatcgtgtctgccgaagcctggggcagagccgattgcggatcccagagcttcggcctgctggaccccaagctgtgctacctgctggatggcatcctgttcatctacggcgtgatcctgaccgccctgttcctgagagtgaagttcagcagaagcgccgacgcccctgcctaccagcagggacagaaccaactgtacaacgagctgaacctgggcagacgggaagagtacgacgtgctggacaagcggagaggcagggaccctgagatgggcggaaagccccagcggagaaagaacccccaggaaggactgtataacgaactccagaaagacaagatggccgaagcctacagcgagatcggcatgaagggcgagcggagaagaggcaagggccacgatggcctgtaccagggcctgagcaccgccaccaaggacacctatgacgccctgcacatgcaggccctgcctccaagaagggccaagcgatctggatctggagcaacaaacttctcactactcaaacaagcaggtgacgtggaggagaatcccgggcctactagtatggactggatttggcgcatccttttccttgtcggcgctgctaccggcgcgcattccttcgaagaagtgcaactggtggaaagcgggggaggcgtggtgcagccaggcggatctctgagactgagctgtgccgccagcggcttcaccttcagcagctacgccatgagctgggtgcgccaggcccctggaaaaggcctggaatgggtgtccgccatctctggctctggcggcagcacctactacgccgatagcgtgaagggccggttcagcatcagccgggacaacagcaagaacaccctgtacctccagatgaacagcctgcgggccgaggacaccgccgtgtactactgtgccagaaccagaagctccggggccttcgacatctggggccagggaacactcgtgaccgtgtcctctacgcgtatccagaaccctgatcctgccgtgtaccagctgcgggatagcaagagcagcgacaagagcgtgtgtctgttcaccgacttcgacagccagaccaacgtgtcccagagcaaggactccgacgtgtacatcaccgataagaccgtgctggacatgcggagcatggacttcaagagcaactccgccgtggcctggtccaacaagtccgatttcgcctgcgccaacgccttcaacaacagcattatccccgaggacacattcttcccaagccccgagagcagctgcggtacccagagttttgggttgttggaccctaaattgtgctatctgttggacggaatcctgttcatttacggagtgatcctgaccgcattgttcctgcgggttaagttttccagatccgcagacgcacccgcttaccaacaagggcagaaccaactctacaatgaacttaatttggggcggagggaagagtacgacgttctggacaaaaggaggggacgagatcccgagatgggcggaaagcctcagcgaaggaagaatccgcaagaggggctttataacgaactccagaaagataaaatggcagaagcctatagtgagattgggatgaagggagaaaggaggaggggtaaaggtcacgatgggttgtaccaaggattgagcacagccactaaagatacctatgatgcgctccacatgcaggccctgccgccaaga

SEQ ID NO: 2263 - DNA, 2853 bp, Artificial Sequence
  Synthetic Polynucloetide
atggccttaccagtgaccgccttgctcctgccgctggccttgctgctccacgccgccaggccggaagtgcagctggttgaatctggcggaggactggttcagcctggcggatctctgagactgtcttgtgccgccagcggcttcagcttcagcgacttttggatgagctgggtccgacaggcccctggcaaaggacttgaatgggtcgccacaatcagccaggccggcagcgagaaggactacgtggactctgtgaagggcagattcaccatcagccgggacaacgccaagaagtccctgtacctccagatgaacagcctgagagccgaggacaccgccgtgtactattgtgcctctggcgtgtacagcttcgactacagaggccagggcaccctggtcacagtctcttctggtaccggcggaggcggatctggcggcggaggtagcggtggcggaggatctgaattcgacatccagatgaaccagagccccagcagcctgagcgccagcctgggcgataccatcaccatcacctgtcacgccagccagaacatcaacgtgtggctgagctggtatcagcagaagcccggcaacatccccaagctgctgatctacaaggccagcaacctgcacaccggcgtgcccagcagattttctggcagcggctctggcaccggcttcaccattaccatcagctccctccagcccgaggacattgccacctactactgccagcagggccagagctacccctggacatttggcggaggcaccaagctggaaatcaagagactcgaggacctgaagaacgtgttcccacctgaggtggccgtgttcgagcctagcgaggccgagatcagccacacccagaaagccaccctcgtgtgcctggctaccggcttctaccccgaccatgtggaactgtcttggtgggtcaacggcaaagaggtgcacagcggcgtgtctaccgacccccagccactgaaagaacagcccgccctgaacgacagccggtactgcctgagcagcagactgagagtgtccgccaccttctggcagaacccccggaaccacttcagatgccaggtgcagttctacggcctgagcgagaacgacgagtggacccaggacagagccaagcccgtgacccagatcgtgtctgccgaagcctggggcagagccgattgcggatcccagagcttcggcctgctggaccccaagctgtgctacctgctggatggcatcctgttcatctacggcgtgatcctgaccgccctgttcctgagagtgaagttcagcagaagcgccgacgcccctgcctaccagcagggacagaaccaactgtacaacgagctgaacctgggcagacgggaagagtacgacgtgctggacaagcggagaggcagggaccctgagatgggcggaaagccccagcggagaaagaacccccaggaaggactgtataacgaactccagaaagacaagatggccgaagcctacagcgagatcggcatgaagggcgagcggagaagaggcaagggccacgatggcctgtaccagggcctgagcaccgccaccaaggacacctatgacgccctgcacatgcaggccctgcctccaagaagggccaagcgatctggatctggagcaacaaacttctcactactcaaacaagcaggtgacgtggaggagaatcccgggcctactagtatggactggatttggcgcatccttttccttgtcggcgctgctaccggcgcgcattccttcgaagaagtgcaactccagcagagcggcccagagcttgtgaagcctggcgcttccgtgaagattagctgcaaagccagcggctacagcttcaccggctacttcatgaactgggtcaagcagagccacggcaagagcctggagtacatcggcagattcaacccctacaacggcgagacactgtacaaccagaagttcaagggcaaggccaccctgaccgtggacaagagcagcagcaccgtgcacatggaactgctgagcgtgaccagcgaggacagcgccgtgtactactgtggcagaagcggcaacgacgacgctatggactattggggccagggcaccagcgtgaccgtgtctagtgctacgcgtatccagaaccctgatcctgccgtgtaccagctgcgggatagcaagagcagcgacaagagcgtgtgtctgttcaccgacttcgacagccagaccaacgtgtcccagagcaaggactccgacgtgtacatcaccgataagaccgtgctggacatgcggagcatggacttcaagagcaactccgccgtggcctggtccaacaagtccgatttcgcctgcgccaacgccttcaacaacagcattatccccgaggacacattcttcccaagccccgagagcagctgcggtacccagagttttgggttgttggaccctaaattgtgctatctgttggacggaatcctgttcatttacggagtgatcctgaccgcattgttcctgcgggttaagttttccagatccgcagacgcacccgcttaccaacaagggcagaaccaactctacaatgaacttaatttggggcggagggaagagtacgacgttctggacaaaaggaggggacgagatcccgagatgggcggaaagcctcagcgaaggaagaatccgcaagaggggctttataacgaactccagaaagataaaatggcagaagcctatagtgagattgggatgaagggagaaaggaggaggggtaaaggtcacgatgggttgtaccaaggattgagcacagccactaaagatacctatgatgcgctccacatgcaggccctgccgccaaga

SEQ ID NO: 2264 - DNA, 2856 bp, Artificial Sequence
  Synthetic Polynucloetide
atggccttaccagtgaccgccttgctcctgccgctggccttgctgctccacgccgccaggccggaagtgcagctggttgaatctggcggaggactggttcagcctggcggatctctgagactgtcttgtgccgccagcggcttcagcttcagcgacttttggatgagctgggtccgacaggcccctggcaaaggacttgaatgggtcgccacaatcagccaggccggcagcgagaaggactacgtggactctgtgaagggcagattcaccatcagccgggacaacgccaagaagtccctgtacctccagatgaacagcctgagagccgaggacaccgccgtgtactattgtgcctctggcgtgtacagcttcgactacagaggccagggcaccctggtcacagtctcttctggtaccggcggaggcggatctggcggcggaggtagcggtggcggaggatctgaattcgagatcgtgctgacacagagccctgccaccctgtctctgagccctggcgaaagagccaccctgagctgtagagccagccagagcgtgcggagctacctggcctggtatcagcagaagcctggacaggcccccagactgctgatctacgacgccagcaatcgggccacaggcatccccgccagattttctggctctggcagcggcaccgacttcaccctgacaatcagcagcctggaacccgaggacttcgccgtgtactactgccagcagcggagcaactggccccctacctttggacagggcaccaaggtggaaatcaagctcgaggacctgaagaacgtgttcccacctgaggtggccgtgttcgagcctagcgaggccgagatcagccacacccagaaagccaccctcgtgtgcctggctaccggcttctaccccgaccatgtggaactgtcttggtgggtcaacggcaaagaggtgcacagcggcgtgtctaccgacccccagccactgaaagaacagcccgccctgaacgacagccggtactgcctgagcagcagactgagagtgtccgccaccttctggcagaacccccggaaccacttcagatgccaggtgcagttctacggcctgagcgagaacgacgagtggacccaggacagagccaagcccgtgacccagatcgtgtctgccgaagcctggggcagagccgattgcggatcccagagcttcggcctgctggaccccaagctgtgctacctgctggatggcatcctgttcatctacggcgtgatcctgaccgccctgttcctgagagtgaagttcagcagaagcgccgacgcccctgcctaccagcagggacagaaccaactgtacaacgagctgaacctgggcagacgggaagagtacgacgtgctggacaagcggagaggcagggaccctgagatgggcggaaagccccagcggagaaagaacccccaggaaggactgtataacgaactccagaaagacaagatggccgaagcctacagcgagatcggcatgaagggcgagcggagaagaggcaagggccacgatggcctgtaccagggcctgagcaccgccaccaaggacacctatgacgccctgcacatgcaggccctgcctccaagaagggccaagcgatctggatctggagcaacaaacttctcactactcaaacaagcaggtgacgtggaggagaatcccgggcctactagtatggactggatttggcgcatccttttccttgtcggcgctgctaccggcgcgcattccttcgaacaactccaggtgcaggaatctggccccggactcgtgaagcccagcgagacactgagcctgacctgtaccgtgtccggcggcagcatcagcaacagctacttctcctggggctggatcagacagccccctggcaagggcctggaatggatcggcagcttctactacggcgagaaaacctactacaaccccagcctgaagtccagagccaccatcagcatcgacaccagcaagagccagttctccctgaagctgagcagcgtgacagccgccgacaccgccgtgtattattgccccagaggccccaccatgatccggggcgtgatcgactcttggggccagggaacactcgtgaccgtgtcctctacgcgtatccagaaccctgatcctgccgtgtaccagctgcgggatagcaagagcagcgacaagagcgtgtgtctgttcaccgacttcgacagccagaccaacgtgtcccagagcaaggactccgacgtgtacatcaccgataagaccgtgctggacatgcggagcatggacttcaagagcaactccgccgtggcctggtccaacaagtccgatttcgcctgcgccaacgccttcaacaacagcattatccccgaggacacattcttcccaagccccgagagcagctgcggtacccagagttttgggttgttggaccctaaattgtgctatctgttggacggaatcctgttcatttacggagtgatcctgaccgcattgttcctgcgggttaagttttccagatccgcagacgcacccgcttaccaacaagggcagaaccaactctacaatgaacttaatttggggcggagggaagagtacgacgttctggacaaaaggaggggacgagatcccgagatgggcggaaagcctcagcgaaggaagaatccgcaagaggggctttataacgaactccagaaagataaaatggcagaagcctatagtgagattgggatgaagggagaaaggaggaggggtaaaggtcacgatgggttgtaccaaggattgagcacagccactaaagatacctatgatgcgctccacatgcaggccctgccgccaaga

SEQ ID NO: 2265 - DNA, 2883 bp, Artificial Sequence
  Synthetic Polynucloetide
atggccttaccagtgaccgccttgctcctgccgctggccttgctgctccacgccgccaggccggaagtgcagctggttgaatctggcggaggactggttcagcctggcggatctctgagactgtcttgtgccgccagcggcttcagcttcagcgacttttggatgagctgggtccgacaggcccctggcaaaggacttgaatgggtcgccacaatcagccaggccggcagcgagaaggactacgtggactctgtgaagggcagattcaccatcagccgggacaacgccaagaagtccctgtacctccagatgaacagcctgagagccgaggacaccgccgtgtactattgtgcctctggcgtgtacagcttcgactacagaggccagggcaccctggtcacagtctcttctggtaccggcggaggcggatctggcggcggaggtagcggtggcggaggatctgaattcgacatcgtgatgacccagacccccctgagcctgcctgtgacacctggcgagcctgccagcatctcctgcagaagcagcagaagcctgctggacagcgacgacggcaacacctacctggactggtatctgcagaaacccggccagagcccccaactgctgatctacaccctgagctacagagccagcggcgtgcccgatagattttccggctctggcagcggcaccgacttcaccctgaagatcagccgggtggaagccgaggacgtgggcgtgtactactgtatgcagcgggtggaatttcccatcaccttcggccagggcaccagactggaaatcaagagactcgaggacctgaagaacgtgttcccacctgaggtggccgtgttcgagcctagcgaggccgagatcagccacacccagaaagccaccctcgtgtgcctggctaccggcttctaccccgaccatgtggaactgtcttggtgggtcaacggcaaagaggtgcacagcggcgtgtctaccgacccccagccactgaaagaacagcccgccctgaacgacagccggtactgcctgagcagcagactgagagtgtccgccaccttctggcagaacccccggaaccacttcagatgccaggtgcagttctacggcctgagcgagaacgacgagtggacccaggacagagccaagcccgtgacccagatcgtgtctgccgaagcctggggcagagccgattgcggatcccagagcttcggcctgctggaccccaagctgtgctacctgctggatggcatcctgttcatctacggcgtgatcctgaccgccctgttcctgagagtgaagttcagcagaagcgccgacgcccctgcctaccagcagggacagaaccaactgtacaacgagctgaacctgggcagacgggaagagtacgacgtgctggacaagcggagaggcagggaccctgagatgggcggaaagccccagcggagaaagaacccccaggaaggactgtataacgaactccagaaagacaagatggccgaagcctacagcgagatcggcatgaagggcgagcggagaagaggcaagggccacgatggcctgtaccagggcctgagcaccgccaccaaggacacctatgacgccctgcacatgcaggccctgcctccaagaagggccaagcgatctggatctggagcaacaaacttctcactactcaaacaagcaggtgacgtggaggagaatcccgggcctactagtatggactggatttggcgcatccttttccttgtcggcgctgctaccggcgcgcattccttcgaacaggtgcaactggtggaatctggcgggggagtggtgcagcctggcagatccctgagactgagctgtgccgccagcggcttcatcttcagcagatacggaatgcactgggtgcgccaggcccctggcaagggactgaaatgggtggccgtgatttggtacgacggcagcaacaagctgtacgccgacagcgtgaagggccggttcaccatcagcagagacaacagcaagaacaccctgtacctgcagatgaacagcctgcgggccgaggacaccgccgtgtactattgcgccagagactactacgacaacagccggcaccactggggcttcgactattggggccagggaacccttgtgaccgtgtcctctacgcgtatccagaaccctgatcctgccgtgtaccagctgcgggatagcaagagcagcgacaagagcgtgtgtctgttcaccgacttcgacagccagaccaacgtgtcccagagcaaggactccgacgtgtacatcaccgataagaccgtgctggacatgcggagcatggacttcaagagcaactccgccgtggcctggtccaacaagtccgatttcgcctgcgccaacgccttcaacaacagcattatccccgaggacacattcttcccaagccccgagagcagctgcggtacccagagttttgggttgttggaccctaaattgtgctatctgttggacggaatcctgttcatttacggagtgatcctgaccgcattgttcctgcgggttaagttttccagatccgcagacgcacccgcttaccaacaagggcagaaccaactctacaatgaacttaatttggggcggagggaagagtacgacgttctggacaaaaggaggggacgagatcccgagatgggcggaaagcctcagcgaaggaagaatccgcaagaggggctttataacgaactccagaaagataaaatggcagaagcctatagtgagattgggatgaagggagaaaggaggaggggtaaaggtcacgatgggttgtaccaaggattgagcacagccactaaagatacctatgatgcgctccacatgcaggccctgccgccaaga

SEQ ID NO: 2266 - DNA, 2853 bp, Artificial Sequence
  Synthetic Polynucloetide
atggccttaccagtgaccgccttgctcctgccgctggccttgctgctccacgccgccaggccggaagtgcagctggttgaatctggcggaggactggttcagcctggcggatctctgagactgtcttgtgccgccagcggcttcagcttcagcgacttttggatgagctgggtccgacaggcccctggcaaaggacttgaatgggtcgccacaatcagccaggccggcagcgagaaggactacgtggactctgtgaagggcagattcaccatcagccgggacaacgccaagaagtccctgtacctccagatgaacagcctgagagccgaggacaccgccgtgtactattgtgcctctggcgtgtacagcttcgactacagaggccagggcaccctggtcacagtctcttctggtaccggcggaggcggatctggcggcggaggtagcggtggcggaggatctgaattcgagatccagatgacccagagccccagcagcatgtctgccagcctgggcgacaccatcaccatcacatgccaggccacccaggacatcttcaagaacctgaactggtatcagcagaagcccggcaagccccccagcctgctgatctactatgccaccgaactggccgagggcgtgcccagcagattttctggcagcggcagcggctccgactacagcctgaccatcagcaacctggaaagcgaggacttcgccgcctactactgcctccagttcttcgagttcccattcaccttcggctccggcaccaagctggaaatgaagctcgaggacctgaagaacgtgttcccacctgaggtggccgtgttcgagcctagcgaggccgagatcagccacacccagaaagccaccctcgtgtgcctggctaccggcttctaccccgaccatgtggaactgtcttggtgggtcaacggcaaagaggtgcacagcggcgtgtctaccgacccccagccactgaaagaacagcccgccctgaacgacagccggtactgcctgagcagcagactgagagtgtccgccaccttctggcagaacccccggaaccacttcagatgccaggtgcagttctacggcctgagcgagaacgacgagtggacccaggacagagccaagcccgtgacccagatcgtgtctgccgaagcctggggcagagccgattgcggatcccagagcttcggcctgctggaccccaagctgtgctacctgctggatggcatcctgttcatctacggcgtgatcctgaccgccctgttcctgagagtgaagttcagcagaagcgccgacgcccctgcctaccagcagggacagaaccaactgtacaacgagctgaacctgggcagacgggaagagtacgacgtgctggacaagcggagaggcagggaccctgagatgggcggaaagccccagcggagaaagaacccccaggaaggactgtataacgaactccagaaagacaagatggccgaagcctacagcgagatcggcatgaagggcgagcggagaagaggcaagggccacgatggcctgtaccagggcctgagcaccgccaccaaggacacctatgacgccctgcacatgcaggccctgcctccaagaagggccaagcgatctggatctggagcaacaaacttctcactactcaaacaagcaggtgacgtggaggagaatcccgggcctactagtatggactggatttggcgcatccttttccttgtcggcgctgctaccggcgcgcattccttcgaacaggtgcaactccagcagtctggcgctgagcttgtgcggcctggcacctctgtgaaggtgtcctgtaaagccagcggctacgtgttcaccaactactggatcgagtggatcaagcagcggccaggccagggcctggaatggatcggcgtgatgaatccaggcagcggcgagacaacctacaacgagaagttcaagggcaaggccaccctgaccgccgacaagagcagcagcacagcctacatgcaactgtcctccctgaccagcgtggacagcgccgtgtacttctgcgccagggaccacgaccgggactactacgctatggactactggggccagggcaccagcgtgaccgtgtcatctacgcgtatccagaaccctgatcctgccgtgtaccagctgcgggatagcaagagcagcgacaagagcgtgtgtctgttcaccgacttcgacagccagaccaacgtgtcccagagcaaggactccgacgtgtacatcaccgataagaccgtgctggacatgcggagcatggacttcaagagcaactccgccgtggcctggtccaacaagtccgatttcgcctgcgccaacgccttcaacaacagcattatccccgaggacacattcttcccaagccccgagagcagctgcggtacccagagttttgggttgttggaccctaaattgtgctatctgttggacggaatcctgttcatttacggagtgatcctgaccgcattgttcctgcgggttaagttttccagatccgcagacgcacccgcttaccaacaagggcagaaccaactctacaatgaacttaatttggggcggagggaagagtacgacgttctggacaaaaggaggggacgagatcccgagatgggcggaaagcctcagcgaaggaagaatccgcaagaggggctttataacgaactccagaaagataaaatggcagaagcctatagtgagattgggatgaagggagaaaggaggaggggtaaaggtcacgatgggttgtaccaaggattgagcacagccactaaagatacctatgatgcgctccacatgcaggccctgccgccaaga

SEQ ID NO: 2267 - DNA, 2844 bp, Artificial Sequence
  Synthetic Polynucloetide
atggccttaccagtgaccgccttgctcctgccgctggccttgctgctccacgccgccaggccggaagtgcagctggttgaatctggcggaggactggttcagcctggcggatctctgagactgtcttgtgccgccagcggcttcagcttcagcgacttttggatgagctgggtccgacaggcccctggcaaaggacttgaatgggtcgccacaatcagccaggccggcagcgagaaggactacgtggactctgtgaagggcagattcaccatcagccgggacaacgccaagaagtccctgtacctccagatgaacagcctgagagccgaggacaccgccgtgtactattgtgcctctggcgtgtacagcttcgactacagaggccagggcaccctggtcacagtctcttctggtaccggcggaggcggatctggcggcggaggtagcggtggcggaggatctgaattcgacatcctgctgacacagagccccgccatcctgtccgtgtctccaggcgagagagtgtcctttagctgccgggccagccagaacatcggcaccagcatccactggtatcagcagcggaccaacggcagccccagactgctgattaagtacgccagcgagtccgtgtccggcatccccagcagattttctggcagcggctccggcaccgacttcaccctgagcatcaacagcgtggaaagcgaggacattgccgactactactgccagcacaccaatagctggcccaccacctttggcggaggcaccaagctggaaatcaagagactcgaggacctgaagaacgtgttcccacctgaggtggccgtgttcgagcctagcgaggccgagatcagccacacccagaaagccaccctcgtgtgcctggctaccggcttctaccccgaccatgtggaactgtcttggtgggtcaacggcaaagaggtgcacagcggcgtgtctaccgacccccagccactgaaagaacagcccgccctgaacgacagccggtactgcctgagcagcagactgagagtgtccgccaccttctggcagaacccccggaaccacttcagatgccaggtgcagttctacggcctgagcgagaacgacgagtggacccaggacagagccaagcccgtgacccagatcgtgtctgccgaagcctggggcagagccgattgcggatcccagagcttcggcctgctggaccccaagctgtgctacctgctggatggcatcctgttcatctacggcgtgatcctgaccgccctgttcctgagagtgaagttcagcagaagcgccgacgcccctgcctaccagcagggacagaaccaactgtacaacgagctgaacctgggcagacgggaagagtacgacgtgctggacaagcggagaggcagggaccctgagatgggcggaaagccccagcggagaaagaacccccaggaaggactgtataacgaactccagaaagacaagatggccgaagcctacagcgagatcggcatgaagggcgagcggagaagaggcaagggccacgatggcctgtaccagggcctgagcaccgccaccaaggacacctatgacgccctgcacatgcaggccctgcctccaagaagggccaagcgatctggatctggagcaacaaacttctcactactcaaacaagcaggtgacgtggaggagaatcccgggcctactagtatggactggatttggcgcatccttttccttgtcggcgctgctaccggcgcgcattccttcgaacaggtgcaactccagcagtccgacgccgagcttgtgaagcctggcgcttccgtgaagattagctgcaaggccagcggctacaccttcaccgaccacgccattcactgggtcaagcagaagcccgagcagggcctggaatggatcggctacttcagccccggcaacggcgacatcaagtacaacgagaagttcaagggcaaggccaccctgaccgccgacaagagcagcagcacagcctacatgcaactgaacagcctgaccagcgaggactccgccgtgtacttctgcaagcggagctacggcaactacgactactggggccagggcaccacactgaccgtgtctagtacgcgtatccagaaccctgatcctgccgtgtaccagctgcgggatagcaagagcagcgacaagagcgtgtgtctgttcaccgacttcgacagccagaccaacgtgtcccagagcaaggactccgacgtgtacatcaccgataagaccgtgctggacatgcggagcatggacttcaagagcaactccgccgtggcctggtccaacaagtccgatttcgcctgcgccaacgccttcaacaacagcattatccccgaggacacattcttcccaagccccgagagcagctgcggtacccagagttttgggttgttggaccctaaattgtgctatctgttggacggaatcctgttcatttacggagtgatcctgaccgcattgttcctgcgggttaagttttccagatccgcagacgcacccgcttaccaacaagggcagaaccaactctacaatgaacttaatttggggcggagggaagagtacgacgttctggacaaaaggaggggacgagatcccgagatgggcggaaagcctcagcgaaggaagaatccgcaagaggggctttataacgaactccagaaagataaaatggcagaagcctatagtgagattgggatgaagggagaaaggaggaggggtaaaggtcacgatgggttgtaccaaggattgagcacagccactaaagatacctatgatgcgctccacatgcaggccctgccgccaaga

SEQ ID NO: 2268 - DNA, 2859 bp, Artificial Sequence
  Synthetic Polynucloetide
atggccttaccagtgaccgccttgctcctgccgctggccttgctgctccacgccgccaggccggaagtgcagctggttgaatctggcggaggactggttcagcctggcggatctctgagactgtcttgtgccgccagcggcttcagcttcagcgacttttggatgagctgggtccgacaggcccctggcaaaggacttgaatgggtcgccacaatcagccaggccggcagcgagaaggactacgtggactctgtgaagggcagattcaccatcagccgggacaacgccaagaagtccctgtacctccagatgaacagcctgagagccgaggacaccgccgtgtactattgtgcctctggcgtgtacagcttcgactacagaggccagggcaccctggtcacagtctcttctggtaccggcggaggcggatctggcggcggaggtagcggtggcggaggatctgaattcgacatcgtgatgacccagagccccgatagcctggccgtgtctctgggagagagagccaccatcaactgcaagagcagccagagcctgctgaacagcggcgaccagaagaactacctgacctggtatcagcagaagcccggccagccccccaagctgctgatctactgggccagcaccagagaaagcggcgtgcccgatagattcagcggcagcggaagtggcaccgacttcaccctgaccatcagttctcttcaggccgaggacgtggccgtgtactactgccagaacgactacagctaccccctgaccttcggccagggcaccaaggtggaaatcaagctcgaggacctgaagaacgtgttcccacctgaggtggccgtgttcgagcctagcgaggccgagatcagccacacccagaaagccaccctcgtgtgcctggctaccggcttctaccccgaccatgtggaactgtcttggtgggtcaacggcaaagaggtgcacagcggcgtgtctaccgacccccagccactgaaagaacagcccgccctgaacgacagccggtactgcctgagcagcagactgagagtgtccgccaccttctggcagaacccccggaaccacttcagatgccaggtgcagttctacggcctgagcgagaacgacgagtggacccaggacagagccaagcccgtgacccagatcgtgtctgccgaagcctggggcagagccgattgcggatcccagagcttcggcctgctggaccccaagctgtgctacctgctggatggcatcctgttcatctacggcgtgatcctgaccgccctgttcctgagagtgaagttcagcagaagcgccgacgcccctgcctaccagcagggacagaaccaactgtacaacgagctgaacctgggcagacgggaagagtacgacgtgctggacaagcggagaggcagggaccctgagatgggcggaaagccccagcggagaaagaacccccaggaaggactgtataacgaactccagaaagacaagatggccgaagcctacagcgagatcggcatgaagggcgagcggagaagaggcaagggccacgatggcctgtaccagggcctgagcaccgccaccaaggacacctatgacgccctgcacatgcaggccctgcctccaagaagggccaagcgatctggatctggagcaacaaacttctcactactcaaacaagcaggtgacgtggaggagaatcccgggcctactagtatggactggatttggcgcatccttttccttgtcggcgctgctaccggcgcgcattccttcgaacaggtgcagctggtgcagtctggggccgaagtgaagaaaaccggcagcagcgtgaaggtgtcctgcaaggccagcggctacacctttaccgaccacgccattcacgtgtggcggcaggctccaggacaggccctggaatggatgggccacttcagccccggcaacaccgacatcaagtacaacgacaagttcaagggcagagtgaccctgaccgtggaccgcagcatgagcaccgcctacatggaactgagcagcctgcggagcgaggacaccgccatgtactattgcaagaccagcaccttctttttcgactactggggccagggaacaatggtcaccgtgtccagcacgcgtatccagaaccctgatcctgccgtgtaccagctgcgggatagcaagagcagcgacaagagcgtgtgtctgttcaccgacttcgacagccagaccaacgtgtcccagagcaaggactccgacgtgtacatcaccgataagaccgtgctggacatgcggagcatggacttcaagagcaactccgccgtggcctggtccaacaagtccgatttcgcctgcgccaacgccttcaacaacagcattatccccgaggacacattcttcccaagccccgagagcagctgcggtacccagagttttgggttgttggaccctaaattgtgctatctgttggacggaatcctgttcatttacggagtgatcctgaccgcattgttcctgcgggttaagttttccagatccgcagacgcacccgcttaccaacaagggcagaaccaactctacaatgaacttaatttggggcggagggaagagtacgacgttctggacaaaaggaggggacgagatcccgagatgggcggaaagcctcagcgaaggaagaatccgcaagaggggctttataacgaactccagaaagataaaatggcagaagcctatagtgagattgggatgaagggagaaaggaggaggggtaaaggtcacgatgggttgtaccaaggattgagcacagccactaaagatacctatgatgcgctccacatgcaggccctgccgccaaga

SEQ ID NO: 2269 - DNA, 2856 bp, Artificial Sequence
  Synthetic Polynucloetide
atggccttaccagtgaccgccttgctcctgccgctggccttgctgctccacgccgccaggccggaagtgcagctggttgaatctggcggaggactggttcagcctggcggatctctgagactgtcttgtgccgccagcggcttcagcttcagcgacttttggatgagctgggtccgacaggcccctggcaaaggacttgaatgggtcgccacaatcagccaggccggcagcgagaaggactacgtggactctgtgaagggcagattcaccatcagccgggacaacgccaagaagtccctgtacctccagatgaacagcctgagagccgaggacaccgccgtgtactattgtgcctctggcgtgtacagcttcgactacagaggccagggcaccctggtcacagtctcttctggtaccggcggaggcggatctggcggcggaggtagcggtggcggaggatctgaattcgacatccagatgacccagagccccagcagcctgtctgccagcgtgggcgacagagtgaccatcacatgcaaggccagccaggacgtgtccattgccgtggcctggtatcagcagaagcccggcaaggcccccaaggtgctgatctacagcgccagctacagatacaccggcgtgcccgacagattcagcggctctggcagcggcaccgacttcaccttcaccatcagctccctccagcccgaggatattgccgtgtactactgccagcagcactacatcacccccctgacctttggcggaggcaccaaggtggaaatcaagctcgaggacctgaagaacgtgttcccacctgaggtggccgtgttcgagcctagcgaggccgagatcagccacacccagaaagccaccctcgtgtgcctggctaccggcttctaccccgaccatgtggaactgtcttggtgggtcaacggcaaagaggtgcacagcggcgtgtctaccgacccccagccactgaaagaacagcccgccctgaacgacagccggtactgcctgagcagcagactgagagtgtccgccaccttctggcagaacccccggaaccacttcagatgccaggtgcagttctacggcctgagcgagaacgacgagtggacccaggacagagccaagcccgtgacccagatcgtgtctgccgaagcctggggcagagccgattgcggatcccagagcttcggcctgctggaccccaagctgtgctacctgctggatggcatcctgttcatctacggcgtgatcctgaccgccctgttcctgagagtgaagttcagcagaagcgccgacgcccctgcctaccagcagggacagaaccaactgtacaacgagctgaacctgggcagacgggaagagtacgacgtgctggacaagcggagaggcagggaccctgagatgggcggaaagccccagcggagaaagaacccccaggaaggactgtataacgaactccagaaagacaagatggccgaagcctacagcgagatcggcatgaagggcgagcggagaagaggcaagggccacgatggcctgtaccagggcctgagcaccgccaccaaggacacctatgacgccctgcacatgcaggccctgcctccaagaagggccaagcgatctggatctggagcaacaaacttctcactactcaaacaagcaggtgacgtggaggagaatcccgggcctactagtatggactggatttggcgcatccttttccttgtcggcgctgctaccggcgcgcattccttcgaacagatccaactggtgcagagcggccacgaagtgaagaaacctggggccagcgtgaaggtgtcctgcaaagccagcggctacacctttaccaactacggcatgaactgggtgcgccaggcccctggacagggcctggaatggatgggctggatcaacaccaagaccggcgagcccacctacgccgaagagttcaagggcagattcgtgttcagcctggaaaccagcgcctccaccgcctacctccagatcagctctctgaaggccgaggacaccgccatgtacttttgcggcagaggcggctacggcagcagctactggtacttcgatgtgtggggccagggcaccaccgtgaccgtgtcatctacgcgtatccagaaccctgatcctgccgtgtaccagctgcgggatagcaagagcagcgacaagagcgtgtgtctgttcaccgacttcgacagccagaccaacgtgtcccagagcaaggactccgacgtgtacatcaccgataagaccgtgctggacatgcggagcatggacttcaagagcaactccgccgtggcctggtccaacaagtccgatttcgcctgcgccaacgccttcaacaacagcattatccccgaggacacattcttcccaagccccgagagcagctgcggtacccagagttttgggttgttggaccctaaattgtgctatctgttggacggaatcctgttcatttacggagtgatcctgaccgcattgttcctgcgggttaagttttccagatccgcagacgcacccgcttaccaacaagggcagaaccaactctacaatgaacttaatttggggcggagggaagagtacgacgttctggacaaaaggaggggacgagatcccgagatgggcggaaagcctcagcgaaggaagaatccgcaagaggggctttataacgaactccagaaagataaaatggcagaagcctatagtgagattgggatgaagggagaaaggaggaggggtaaaggtcacgatgggttgtaccaaggattgagcacagccactaaagatacctatgatgcgctccacatgcaggccctgccgccaaga

SEQ ID NO: 2270 - DNA, 2862 bp, Artificial Sequence
  Synthetic Polynucloetide
atggccttaccagtgaccgccttgctcctgccgctggccttgctgctccacgccgccaggccggaagtgcagctggttgaatctggcggaggactggttcagcctggcggatctctgagactgtcttgtgccgccagcggcttcagcttcagcgacttttggatgagctgggtccgacaggcccctggcaaaggacttgaatgggtcgccacaatcagccaggccggcagcgagaaggactacgtggactctgtgaagggcagattcaccatcagccgggacaacgccaagaagtccctgtacctccagatgaacagcctgagagccgaggacaccgccgtgtactattgtgcctctggcgtgtacagcttcgactacagaggccagggcaccctggtcacagtctcttctggtaccggcggaggcggatctggcggcggaggtagcggtggcggaggatctgaattcgacatcgtgatgacccagagccccgatagcctggccgtgtctctgggagagagagccaccatcaactgccgggccagcaagagcgtgtccaccagcggctacagctacatgcactggtatcagcagaagcccggccagccccccaagctgctgatctacctggcctccaacctggaaagcggcgtgcccgatagattcagcggcagcggctctggcaccgacttcaccctgaccatcagttctcttcaggccgaggacgtggccgtgtactactgccagcacagcagagagctgccctacaccttcggccagggcaccaagctggaaatcaagctcgaggacctgaagaacgtgttcccacctgaggtggccgtgttcgagcctagcgaggccgagatcagccacacccagaaagccaccctcgtgtgcctggctaccggcttctaccccgaccatgtggaactgtcttggtgggtcaacggcaaagaggtgcacagcggcgtgtctaccgacccccagccactgaaagaacagcccgccctgaacgacagccggtactgcctgagcagcagactgagagtgtccgccaccttctggcagaacccccggaaccacttcagatgccaggtgcagttctacggcctgagcgagaacgacgagtggacccaggacagagccaagcccgtgacccagatcgtgtctgccgaagcctggggcagagccgattgcggatcccagagcttcggcctgctggaccccaagctgtgctacctgctggatggcatcctgttcatctacggcgtgatcctgaccgccctgttcctgagagtgaagttcagcagaagcgccgacgcccctgcctaccagcagggacagaaccaactgtacaacgagctgaacctgggcagacgggaagagtacgacgtgctggacaagcggagaggcagggaccctgagatgggcggaaagccccagcggagaaagaacccccaggaaggactgtataacgaactccagaaagacaagatggccgaagcctacagcgagatcggcatgaagggcgagcggagaagaggcaagggccacgatggcctgtaccagggcctgagcaccgccaccaaggacacctatgacgccctgcacatgcaggccctgcctccaagaagggccaagcgatctggatctggagcaacaaacttctcactactcaaacaagcaggtgacgtggaggagaatcccgggcctactagtatggactggatttggcgcatccttttccttgtcggcgctgctaccggcgcgcattccttcgaacaggtgcaactccaggaatctggccctggccttgtgaagcccagcgagacactgagcctgacctgtaccgtgtccggcggcagcatcagctcttacggcgtgcactggattcggcagcctccaggcaagggcctggaatggatcggcgtgatctggacctccggcgtgaccgactacaacagcgccctgatgggcagagtgaccatctccgtggacaccagcaagaaccagttcagcctgaagctgagcagcgtgacagccgccgataccgccgtgtattattgcgccagagatggcgactacgaccgctacacaatggactactggggccagggaacccttgtgaccgtgtcctctacgcgtatccagaaccctgatcctgccgtgtaccagctgcgggatagcaagagcagcgacaagagcgtgtgtctgttcaccgacttcgacagccagaccaacgtgtcccagagcaaggactccgacgtgtacatcaccgataagaccgtgctggacatgcggagcatggacttcaagagcaactccgccgtggcctggtccaacaagtccgatttcgcctgcgccaacgccttcaacaacagcattatccccgaggacacattcttcccaagccccgagagcagctgcggtacccagagttttgggttgttggaccctaaattgtgctatctgttggacggaatcctgttcatttacggagtgatcctgaccgcattgttcctgcgggttaagttttccagatccgcagacgcacccgcttaccaacaagggcagaaccaactctacaatgaacttaatttggggcggagggaagagtacgacgttctggacaaaaggaggggacgagatcccgagatgggcggaaagcctcagcgaaggaagaatccgcaagaggggctttataacgaactccagaaagataaaatggcagaagcctatagtgagattgggatgaagggagaaaggaggaggggtaaaggtcacgatgggttgtaccaaggattgagcacagccactaaagatacctatgatgcgctccacatgcaggccctgccgccaaga

SEQ ID NO: 2271 - DNA, 2862 bp, Artificial Sequence
  Synthetic Polynucloetide
atggccttaccagtgaccgccttgctcctgccgctggccttgctgctccacgccgccaggccggaagtgcagctggttgaatctggcggaggactggttcagcctggcggatctctgagactgtcttgtgccgccagcggcttcagcttcagcgacttttggatgagctgggtccgacaggcccctggcaaaggacttgaatgggtcgccacaatcagccaggccggcagcgagaaggactacgtggactctgtgaagggcagattcaccatcagccgggacaacgccaagaagtccctgtacctccagatgaacagcctgagagccgaggacaccgccgtgtactattgtgcctctggcgtgtacagcttcgactacagaggccagggcaccctggtcacagtctcttctggtaccggcggaggcggatctggcggcggaggtagcggtggcggaggatctgaattcgacatccagatgacccagagccccagcagcctgtctgccagcgtgggcgacagagtgaccatcacctgtagagccagccagagcatcggcaccagcctgcactggtatcagcagaagcctggcaaggcccccaagctgctgattaagttcgccagcagactgcagagcggcgtgcccagcagattttctggcagcggctccggcaccgacttcaccctgacaatcagctccctgcagcccgaggacttcgccacctactactgccagcagagccccggcttccctccaacctttggacagggcaccaagctggaaatcaagcggctcgaggacctgaagaacgtgttcccacctgaggtggccgtgttcgagcctagcgaggccgagatcagccacacccagaaagccaccctcgtgtgcctggctaccggcttctaccccgaccatgtggaactgtcttggtgggtcaacggcaaagaggtgcacagcggcgtgtctaccgacccccagccactgaaagaacagcccgccctgaacgacagccggtactgcctgagcagcagactgagagtgtccgccaccttctggcagaacccccggaaccacttcagatgccaggtgcagttctacggcctgagcgagaacgacgagtggacccaggacagagccaagcccgtgacccagatcgtgtctgccgaagcctggggcagagccgattgcggatcccagagcttcggcctgctggaccccaagctgtgctacctgctggatggcatcctgttcatctacggcgtgatcctgaccgccctgttcctgagagtgaagttcagcagaagcgccgacgcccctgcctaccagcagggacagaaccaactgtacaacgagctgaacctgggcagacgggaagagtacgacgtgctggacaagcggagaggcagggaccctgagatgggcggaaagccccagcggagaaagaacccccaggaaggactgtataacgaactccagaaagacaagatggccgaagcctacagcgagatcggcatgaagggcgagcggagaagaggcaagggccacgatggcctgtaccagggcctgagcaccgccaccaaggacacctatgacgccctgcacatgcaggccctgcctccaagaagggccaagcgatctggatctggagcaacaaacttctcactactcaaacaagcaggtgacgtggaggagaatcccgggcctactagtatggactggatttggcgcatccttttccttgtcggcgctgctaccggcgcgcattccttcgaacaggtgcaactggtggaatctggcggcggacttgtgaagccaggcggcagcctgagactgagctgtgccgccagcggcttcagcatcaccaccagcggctactactggacctggatcagacagttccccggcaagggcctggaatggatgggctacatcggctacaacagcaagacctactacaaccccgccctgaagtcccggatcaccatcagcagagacaacgccaagaacagcctgtacctgcagatgaactccctgagagccgaggataccgccgtgtactactgcgccagatccctgtacggcggctacaaggacgccttcgatagctggggccagggaacccttgtgaccgtgtctagcacgcgtatccagaaccctgatcctgccgtgtaccagctgcgggatagcaagagcagcgacaagagcgtgtgtctgttcaccgacttcgacagccagaccaacgtgtcccagagcaaggactccgacgtgtacatcaccgataagaccgtgctggacatgcggagcatggacttcaagagcaactccgccgtggcctggtccaacaagtccgatttcgcctgcgccaacgccttcaacaacagcattatccccgaggacacattcttcccaagccccgagagcagctgcggtacccagagttttgggttgttggaccctaaattgtgctatctgttggacggaatcctgttcatttacggagtgatcctgaccgcattgttcctgcgggttaagttttccagatccgcagacgcacccgcttaccaacaagggcagaaccaactctacaatgaacttaatttggggcggagggaagagtacgacgttctggacaaaaggaggggacgagatcccgagatgggcggaaagcctcagcgaaggaagaatccgcaagaggggctttataacgaactccagaaagataaaatggcagaagcctatagtgagattgggatgaagggagaaaggaggaggggtaaaggtcacgatgggttgtaccaaggattgagcacagccactaaagatacctatgatgcgctccacatgcaggccctgccgccaaga

SEQ ID NO: 2272 - DNA, 2877 bp, Artificial Sequence
  Synthetic Polynucloetide
atggccttaccagtgaccgccttgctcctgccgctggccttgctgctccacgccgccaggccggaagtgcagctggttgaatctggcggaggactggttcagcctggcggatctctgagactgtcttgtgccgccagcggcttcagcttcagcgacttttggatgagctgggtccgacaggcccctggcaaaggacttgaatgggtcgccacaatcagccaggccggcagcgagaaggactacgtggactctgtgaagggcagattcaccatcagccgggacaacgccaagaagtccctgtacctccagatgaacagcctgagagccgaggacaccgccgtgtactattgtgcctctggcgtgtacagcttcgactacagaggccagggcaccctggtcacagtctcttctggtaccggcggaggcggatctggcggcggaggtagcggtggcggaggatctgaattcgacgagatcgtgctgacccagagccctctgagcctgcctgtgacacctggcgagcctgccagcatctcctgtagaagcagccagagcctgctgcacagcatcggctacaactacctggactggtatctccagaagcccggccagagcccccaactgctgatctacctgggcagcaacagagccagcggcgtgcccgatagattttccggcagcggctccggcaccgacttcaccctgaagatcagccgggtggaagccgaggacgtgggcgtgtactactgtatgcaggccctccagacccccctgacctttggcggaggcaccaaggtggaaatcaagcggctcgaggacctgaagaacgtgttcccacctgaggtggccgtgttcgagcctagcgaggccgagatcagccacacccagaaagccaccctcgtgtgcctggctaccggcttctaccccgaccatgtggaactgtcttggtgggtcaacggcaaagaggtgcacagcggcgtgtctaccgacccccagccactgaaagaacagcccgccctgaacgacagccggtactgcctgagcagcagactgagagtgtccgccaccttctggcagaacccccggaaccacttcagatgccaggtgcagttctacggcctgagcgagaacgacgagtggacccaggacagagccaagcccgtgacccagatcgtgtctgccgaagcctggggcagagccgattgcggatcccagagcttcggcctgctggaccccaagctgtgctacctgctggatggcatcctgttcatctacggcgtgatcctgaccgccctgttcctgagagtgaagttcagcagaagcgccgacgcccctgcctaccagcagggacagaaccaactgtacaacgagctgaacctgggcagacgggaagagtacgacgtgctggacaagcggagaggcagggaccctgagatgggcggaaagccccagcggagaaagaacccccaggaaggactgtataacgaactccagaaagacaagatggccgaagcctacagcgagatcggcatgaagggcgagcggagaagaggcaagggccacgatggcctgtaccagggcctgagcaccgccaccaaggacacctatgacgccctgcacatgcaggccctgcctccaagaagggccaagcgatctggatctggagcaacaaacttctcactactcaaacaagcaggtgacgtggaggagaatcccgggcctactagtatggactggatttggcgcatccttttccttgtcggcgctgctaccggcgcgcattccttcgaagaagtgcaactggtggaaagcggaggcggcgtggtgcagcctggaagaagcctgagactgagctgtgccgccagcggcttcaccttccggtcctacggaatgcactgggtgcgccaggcccctggcaaaggactggaatgggtggccgtgatctcctacgacggctccaacaagtactacaccgacagcgtgaacggcagattcaccatcagcagagacaacagcaagaacaccctgtacctccagatgaacagcctgcgggccgaggacaccgccgtgtactattgtgctagaggcggaggctactacgagacaagcggccctgattactggggccagggcacactcgtgaccgtgtctagtacgcgtatccagaaccctgatcctgccgtgtaccagctgcgggatagcaagagcagcgacaagagcgtgtgtctgttcaccgacttcgacagccagaccaacgtgtcccagagcaaggactccgacgtgtacatcaccgataagaccgtgctggacatgcggagcatggacttcaagagcaactccgccgtggcctggtccaacaagtccgatttcgcctgcgccaacgccttcaacaacagcattatccccgaggacacattcttcccaagccccgagagcagctgcggtacccagagttttgggttgttggaccctaaattgtgctatctgttggacggaatcctgttcatttacggagtgatcctgaccgcattgttcctgcgggttaagttttccagatccgcagacgcacccgcttaccaacaagggcagaaccaactctacaatgaacttaatttggggcggagggaagagtacgacgttctggacaaaaggaggggacgagatcccgagatgggcggaaagcctcagcgaaggaagaatccgcaagaggggctttataacgaactccagaaagataaaatggcagaagcctatagtgagattgggatgaagggagaaaggaggaggggtaaaggtcacgatgggttgtaccaaggattgagcacagccactaaagatacctatgatgcgctccacatgcaggccctgccgccaaga

SEQ ID NO: 2273 - DNA, 2871 bp, Artificial Sequence
  Synthetic Polynucloetide
atggccttaccagtgaccgccttgctcctgccgctggccttgctgctccacgccgccaggccggaagtgcagctggttgaatctggcggaggactggttcagcctggcggatctctgagactgtcttgtgccgccagcggcttcagcttcagcgacttttggatgagctgggtccgacaggcccctggcaaaggacttgaatgggtcgccacaatcagccaggccggcagcgagaaggactacgtggactctgtgaagggcagattcaccatcagccgggacaacgccaagaagtccctgtacctccagatgaacagcctgagagccgaggacaccgccgtgtactattgtgcctctggcgtgtacagcttcgactacagaggccagggcaccctggtcacagtctcttctggtaccggcggaggcggatctggcggcggaggtagcggtggcggaggatctgaattcgacgacgtcgtgatgacccagagccctctgagcctgcctgtgacacctggcgagcctgccagcatctcctgtagaagcagccagagcctgctgcacagcatcggctacaactacctgcactggtttctccagaagcccggccagagcccccaactgctgatctacctgggcagcaacagagccagcggcgtgcccgatagattttccggcagcggctccggcaccgacttcaccctgaagatcagccgggtggaagccgaggacgtgggcgtgtactactgtatgcaggccctccagacccctcccacctttggacagggcaccagactggaaatcaagcggctcgaggacctgaagaacgtgttcccacctgaggtggccgtgttcgagcctagcgaggccgagatcagccacacccagaaagccaccctcgtgtgcctggctaccggcttctaccccgaccatgtggaactgtcttggtgggtcaacggcaaagaggtgcacagcggcgtgtctaccgacccccagccactgaaagaacagcccgccctgaacgacagccggtactgcctgagcagcagactgagagtgtccgccaccttctggcagaacccccggaaccacttcagatgccaggtgcagttctacggcctgagcgagaacgacgagtggacccaggacagagccaagcccgtgacccagatcgtgtctgccgaagcctggggcagagccgattgcggatcccagagcttcggcctgctggaccccaagctgtgctacctgctggatggcatcctgttcatctacggcgtgatcctgaccgccctgttcctgagagtgaagttcagcagaagcgccgacgcccctgcctaccagcagggacagaaccaactgtacaacgagctgaacctgggcagacgggaagagtacgacgtgctggacaagcggagaggcagggaccctgagatgggcggaaagccccagcggagaaagaacccccaggaaggactgtataacgaactccagaaagacaagatggccgaagcctacagcgagatcggcatgaagggcgagcggagaagaggcaagggccacgatggcctgtaccagggcctgagcaccgccaccaaggacacctatgacgccctgcacatgcaggccctgcctccaagaagggccaagcgatctggatctggagcaacaaacttctcactactcaaacaagcaggtgacgtggaggagaatcccgggcctactagtatggactggatttggcgcatccttttccttgtcggcgctgctaccggcgcgcattccttcgaacaactccaactccaggaaagcggccctggcctcgtgaagcctagcggcacactgagcctgacatgtgccgtgtctggcggcagcatcagcagcagcaactggtggtcttgggtgcgccagcctcctggcaagggcctggaatggatcggcgaaatctaccacagcggcagcaccaactacaaccccagcctgaagtccagagtgaccatcagcgtggacaagagcaagaaccagttctccctgaagctgagcagcgtgacagccgccgataccgccgtgtactattgcgtgggcagcccctacggcgactacgtgctggattattggggccagggcaccctcgtgaccgtgtctagtacgcgtatccagaaccctgatcctgccgtgtaccagctgcgggatagcaagagcagcgacaagagcgtgtgtctgttcaccgacttcgacagccagaccaacgtgtcccagagcaaggactccgacgtgtacatcaccgataagaccgtgctggacatgcggagcatggacttcaagagcaactccgccgtggcctggtccaacaagtccgatttcgcctgcgccaacgccttcaacaacagcattatccccgaggacacattcttcccaagccccgagagcagctgcggtacccagagttttgggttgttggaccctaaattgtgctatctgttggacggaatcctgttcatttacggagtgatcctgaccgcattgttcctgcgggttaagttttccagatccgcagacgcacccgcttaccaacaagggcagaaccaactctacaatgaacttaatttggggcggagggaagagtacgacgttctggacaaaaggaggggacgagatcccgagatgggcggaaagcctcagcgaaggaagaatccgcaagaggggctttataacgaactccagaaagataaaatggcagaagcctatagtgagattgggatgaagggagaaaggaggaggggtaaaggtcacgatgggttgtaccaaggattgagcacagccactaaagatacctatgatgcgctccacatgcaggccctgccgccaaga

SEQ ID NO: 2274 - DNA, 2865 bp, Artificial Sequence
  Synthetic Polynucloetide
atggccttaccagtgaccgccttgctcctgccgctggccttgctgctccacgccgccaggccggaagtgcagctggttgaatctggcggaggactggttcagcctggcggatctctgagactgtcttgtgccgccagcggcttcagcttcagcgacttttggatgagctgggtccgacaggcccctggcaaaggacttgaatgggtcgccacaatcagccaggccggcagcgagaaggactacgtggactctgtgaagggcagattcaccatcagccgggacaacgccaagaagtccctgtacctccagatgaacagcctgagagccgaggacaccgccgtgtactattgtgcctctggcgtgtacagcttcgactacagaggccagggcaccctggtcacagtctcttctggtaccggcggaggcggatctggcggcggaggtagcggtggcggaggatctgaattcgacgagatcgtgctgacacagagccctggcaccctgagcctgtctctgggagagagagccacactgagctgtcgggccagccagtctatcagcagcagcttcctggcctggtatcagcagaagcccggccaggcccctaagctgctgatctacgccgccagcacaagagccaccggcatccccgatagattcagcggctctggcagcggcaccgacttcaccctgaccatcagcagactggaacccgaggacttcgccgtgtactactgccagcagtacggcagaagcctgagcttcggcggaggcaccaaggtggaagtgaagctcgaggacctgaagaacgtgttcccacctgaggtggccgtgttcgagcctagcgaggccgagatcagccacacccagaaagccaccctcgtgtgcctggctaccggcttctaccccgaccatgtggaactgtcttggtgggtcaacggcaaagaggtgcacagcggcgtgtctaccgacccccagccactgaaagaacagcccgccctgaacgacagccggtactgcctgagcagcagactgagagtgtccgccaccttctggcagaacccccggaaccacttcagatgccaggtgcagttctacggcctgagcgagaacgacgagtggacccaggacagagccaagcccgtgacccagatcgtgtctgccgaagcctggggcagagccgattgcggatcccagagcttcggcctgctggaccccaagctgtgctacctgctggatggcatcctgttcatctacggcgtgatcctgaccgccctgttcctgagagtgaagttcagcagaagcgccgacgcccctgcctaccagcagggacagaaccaactgtacaacgagctgaacctgggcagacgggaagagtacgacgtgctggacaagcggagaggcagggaccctgagatgggcggaaagccccagcggagaaagaacccccaggaaggactgtataacgaactccagaaagacaagatggccgaagcctacagcgagatcggcatgaagggcgagcggagaagaggcaagggccacgatggcctgtaccagggcctgagcaccgccaccaaggacacctatgacgccctgcacatgcaggccctgcctccaagaagggccaagcgatctggatctggagcaacaaacttctcactactcaaacaagcaggtgacgtggaggagaatcccgggcctactagtatggactggatttggcgcatccttttccttgtcggcgctgctaccggcgcgcattccttcgaacaggtgcaactccagcagtctggccccggactcgtgaagcctagccagacactgagcctgacctgcgccatcagcggcgatagcgtgtccggcaatagcgccacctggaactggatcagacagagcccatctcggggcctggaatggctgggccggacctactaccgcagcaagtggaaccacgactacgccgagagcgtgaagtcccggatcaccatcaaccccgacaccagcaagaaccagttctccttgcaactgaacagcgtgacccccgaggacacagccgtgtattattgcgccagaggcgacagcagctcttggtacgccttcgactattggggccagggcaccctcgtgaccgtgtctagtacgcgtatccagaaccctgatcctgccgtgtaccagctgcgggatagcaagagcagcgacaagagcgtgtgtctgttcaccgacttcgacagccagaccaacgtgtcccagagcaaggactccgacgtgtacatcaccgataagaccgtgctggacatgcggagcatggacttcaagagcaactccgccgtggcctggtccaacaagtccgatttcgcctgcgccaacgccttcaacaacagcattatccccgaggacacattcttcccaagccccgagagcagctgcggtacccagagttttgggttgttggaccctaaattgtgctatctgttggacggaatcctgttcatttacggagtgatcctgaccgcattgttcctgcgggttaagttttccagatccgcagacgcacccgcttaccaacaagggcagaaccaactctacaatgaacttaatttggggcggagggaagagtacgacgttctggacaaaaggaggggacgagatcccgagatgggcggaaagcctcagcgaaggaagaatccgcaagaggggctttataacgaactccagaaagataaaatggcagaagcctatagtgagattgggatgaagggagaaaggaggaggggtaaaggtcacgatgggttgtaccaaggattgagcacagccactaaagatacctatgatgcgctccacatgcaggccctgccgccaaga

SEQ ID NO: 2275 - DNA, 2862 bp, Artificial Sequence
  Synthetic Polynucloetide
atggccttaccagtgaccgccttgctcctgccgctggccttgctgctccacgccgccaggccggaagtgcagctggttgaatctggcggaggactggttcagcctggcggatctctgagactgtcttgtgccgccagcggcttcagcttcagcgacttttggatgagctgggtccgacaggcccctggcaaaggacttgaatgggtcgccacaatcagccaggccggcagcgagaaggactacgtggactctgtgaagggcagattcaccatcagccgggacaacgccaagaagtccctgtacctccagatgaacagcctgagagccgaggacaccgccgtgtactattgtgcctctggcgtgtacagcttcgactacagaggccagggcaccctggtcacagtctcttctggtaccggcggaggcggatctggcggcggaggtagcggtggcggaggatctgaattcgaccagagcgtcgtgacacagcctcctagcgtgtcagtggcccctggcaagaccgccagaatcacctgtggccggaacaacatcggcagcaagagcgtgcactggtatcagcagaagcccggccaggctcctgtgctggtggtgtacgacgacagcgacagacccagcggcatccccgagagattcagcggcagcaactccggcaataccgccaccctgaccatcagcagagtggaagccggcgacgaggccgactactactgccaagtgtgggacagcagcagcgatcacgtggtgtttggcggaggcaccaagctgacagtgctgggtctcgaggacctgaagaacgtgttcccacctgaggtggccgtgttcgagcctagcgaggccgagatcagccacacccagaaagccaccctcgtgtgcctggctaccggcttctaccccgaccatgtggaactgtcttggtgggtcaacggcaaagaggtgcacagcggcgtgtctaccgacccccagccactgaaagaacagcccgccctgaacgacagccggtactgcctgagcagcagactgagagtgtccgccaccttctggcagaacccccggaaccacttcagatgccaggtgcagttctacggcctgagcgagaacgacgagtggacccaggacagagccaagcccgtgacccagatcgtgtctgccgaagcctggggcagagccgattgcggatcccagagcttcggcctgctggaccccaagctgtgctacctgctggatggcatcctgttcatctacggcgtgatcctgaccgccctgttcctgagagtgaagttcagcagaagcgccgacgcccctgcctaccagcagggacagaaccaactgtacaacgagctgaacctgggcagacgggaagagtacgacgtgctggacaagcggagaggcagggaccctgagatgggcggaaagccccagcggagaaagaacccccaggaaggactgtataacgaactccagaaagacaagatggccgaagcctacagcgagatcggcatgaagggcgagcggagaagaggcaagggccacgatggcctgtaccagggcctgagcaccgccaccaaggacacctatgacgccctgcacatgcaggccctgcctccaagaagggccaagcgatctggatctggagcaacaaacttctcactactcaaacaagcaggtgacgtggaggagaatcccgggcctactagtatggactggatttggcgcatccttttccttgtcggcgctgctaccggcgcgcattccttcgaagtgcaactggtgcagtctggcggaggggtcatgcggcctggcggatctctgagactgtcttgtgccgccagcggcttcaccttcgacgactacggcatgagctgggtgcgccaggcccctggaaaaggcctggaatgggtgtccggcatcaactggaatggcggcagcaccggctacgccgattctgtgcggggcagattcaccatcagccgggacaacgccaagaacagcctgtacctgcagatgaactccctgcgggccgaggacaccgccctgtactattgcgccagagagcggggctacggctaccacgaccctcacgattattggggccagggcacccttgttaccgtgtcctctacgcgtatccagaaccctgatcctgccgtgtaccagctgcgggatagcaagagcagcgacaagagcgtgtgtctgttcaccgacttcgacagccagaccaacgtgtcccagagcaaggactccgacgtgtacatcaccgataagaccgtgctggacatgcggagcatggacttcaagagcaactccgccgtggcctggtccaacaagtccgatttcgcctgcgccaacgccttcaacaacagcattatccccgaggacacattcttcccaagccccgagagcagctgcggtacccagagttttgggttgttggaccctaaattgtgctatctgttggacggaatcctgttcatttacggagtgatcctgaccgcattgttcctgcgggttaagttttccagatccgcagacgcacccgcttaccaacaagggcagaaccaactctacaatgaacttaatttggggcggagggaagagtacgacgttctggacaaaaggaggggacgagatcccgagatgggcggaaagcctcagcgaaggaagaatccgcaagaggggctttataacgaactccagaaagataaaatggcagaagcctatagtgagattgggatgaagggagaaaggaggaggggtaaaggtcacgatgggttgtaccaaggattgagcacagccactaaagatacctatgatgcgctccacatgcaggccctgccgccaaga

SEQ ID NO: 2276 - DNA, 2901 bp, Artificial Sequence
  Synthetic Polynucloetide
atggccttaccagtgaccgccttgctcctgccgctggccttgctgctccacgccgccaggccggaagtgcagctggttgaatctggcggaggactggttcagcctggcggatctctgagactgtcttgtgccgccagcggcttcagcttcagcgacttttggatgagctgggtccgacaggcccctggcaaaggacttgaatgggtcgccacaatcagccaggccggcagcgagaaggactacgtggactctgtgaagggcagattcaccatcagccgggacaacgccaagaagtccctgtacctccagatgaacagcctgagagccgaggacaccgccgtgtactattgtgcctctggcgtgtacagcttcgactacagaggccagggcaccctggtcacagtctcttctggtaccggcggaggcggatctggcggcggaggtagcggtggcggaggatctgaattcgaacagaaactcatcagtgaagaagacctggaattccaggctgtcgtgacacagcctcctagcgcctctggcacaccaggccagagagtgaccatctcctgtagcggcagcagcagcaacatcggcagcaacaccgtgaactggtatcagcaggtgcccggcaccgctcccaagctgctgatctacagcaacaaccagcggcccagcggcgtgcccgatagattttctggcagcaagagcggcaccagcgccagcctggctatctctggactccagtccgaggacgaggccgactactattgcgccgcctgggacgatagcctgaacggctgggtgttcggcggaggcaccaagctgacagtgctgctcgaggacctgaagaacgtgttcccacctgaggtggccgtgttcgagcctagcgaggccgagatcagccacacccagaaagccaccctcgtgtgcctggctaccggcttctaccccgaccatgtggaactgtcttggtgggtcaacggcaaagaggtgcacagcggcgtgtctaccgacccccagccactgaaagaacagcccgccctgaacgacagccggtactgcctgagcagcagactgagagtgtccgccaccttctggcagaacccccggaaccacttcagatgccaggtgcagttctacggcctgagcgagaacgacgagtggacccaggacagagccaagcccgtgacccagatcgtgtctgccgaagcctggggcagagccgattgcggatcccagagcttcggcctgctggaccccaagctgtgctacctgctggatggcatcctgttcatctacggcgtgatcctgaccgccctgttcctgagagtgaagttcagcagaagcgccgacgcccctgcctaccagcagggacagaaccaactgtacaacgagctgaacctgggcagacgggaagagtacgacgtgctggacaagcggagaggcagggaccctgagatgggcggaaagccccagcggagaaagaacccccaggaaggactgtataacgaactccagaaagacaagatggccgaagcctacagcgagatcggcatgaagggcgagcggagaagaggcaagggccacgatggcctgtaccagggcctgagcaccgccaccaaggacacctatgacgccctgcacatgcaggccctgcctccaagaagggccaagcgatctggatctggagcaacaaacttctcactactcaaacaagcaggtgacgtggaggagaatcccgggcctactagtatggactggatttggcgcatccttttccttgtcggcgctgctaccggcgcgcattccttcgaacagatgcaactggtgcagagcggagccgaagtgaaagagcctggcgagagcctgcggatctcctgcaagggcagcggctacagcttcaccaatttctggatctcttgggtgcgccagatgcccggcaagggcctggaatggatgggcagagtggaccccggctactcctacagcacctacagccctagcttccagggccacgtgaccatcagcgccgacaagagcaccagcaccgcctacctccagtggaacagcctgaaggccagcgacaccgccatgtactactgcgccagagtgcagtacagcggctattacgattggttcgacccctggggccagggcacactcgtgacagtgtcaagcacgcgtatccagaaccctgatcctgccgtgtaccagctgcgggatagcaagagcagcgacaagagcgtgtgtctgttcaccgacttcgacagccagaccaacgtgtcccagagcaaggactccgacgtgtacatcaccgataagaccgtgctggacatgcggagcatggacttcaagagcaactccgccgtggcctggtccaacaagtccgatttcgcctgcgccaacgccttcaacaacagcattatccccgaggacacattcttcccaagccccgagagcagctgcggtacccagagttttgggttgttggaccctaaattgtgctatctgttggacggaatcctgttcatttacggagtgatcctgaccgcattgttcctgcgggttaagttttccagatccgcagacgcacccgcttaccaacaagggcagaaccaactctacaatgaacttaatttggggcggagggaagagtacgacgttctggacaaaaggaggggacgagatcccgagatgggcggaaagcctcagcgaaggaagaatccgcaagaggggctttataacgaactccagaaagataaaatggcagaagcctatagtgagattgggatgaagggagaaaggaggaggggtaaaggtcacgatgggttgtaccaaggattgagcacagccactaaagatacctatgatgcgctccacatgcaggccctgccgccaaga

SEQ ID NO: 2277 - DNA, 2883 bp, Artificial Sequence
  Synthetic Polynucloetide
atggccttaccagtgaccgccttgctcctgccgctggccttgctgctccacgccgccaggccggaagtgcagctggttgaatctggcggaggactggttcagcctggcggatctctgagactgtcttgtgccgccagcggcttcagcttcagcgacttttggatgagctgggtccgacaggcccctggcaaaggacttgaatgggtcgccacaatcagccaggccggcagcgagaaggactacgtggactctgtgaagggcagattcaccatcagccgggacaacgccaagaagtccctgtacctccagatgaacagcctgagagccgaggacaccgccgtgtactattgtgcctctggcgtgtacagcttcgactacagaggccagggcaccctggtcacagtctcttctggtaccggcggaggcggatctggcggcggaggtagcggtggcggaggatctgaattcgaacagaaactcatcagtgaagaagacctggaattcgacatccagatgacccagagccccagcacactgagcgccagcgtgggcgacagagtgaccatcacctgtcgggccagccagaacatcaacaagtggctggcctggtatcagcagaggcccggaaaagccccccagctgctgatctacaaggccagcagcctggaaagcggcgtgcccagcagattttctggcagcggctctggcaccgagtacaccctgaccatcagctccctccagcccgacgacttcgccacctactactgccagcagtacaacagctacgccaccttcggccagggcaccaaggtggaaatcaagagactcgaggacctgaagaacgtgttcccacctgaggtggccgtgttcgagcctagcgaggccgagatcagccacacccagaaagccaccctcgtgtgcctggctaccggcttctaccccgaccatgtggaactgtcttggtgggtcaacggcaaagaggtgcacagcggcgtgtctaccgacccccagccactgaaagaacagcccgccctgaacgacagccggtactgcctgagcagcagactgagagtgtccgccaccttctggcagaacccccggaaccacttcagatgccaggtgcagttctacggcctgagcgagaacgacgagtggacccaggacagagccaagcccgtgacccagatcgtgtctgccgaagcctggggcagagccgattgcggatcccagagcttcggcctgctggaccccaagctgtgctacctgctggatggcatcctgttcatctacggcgtgatcctgaccgccctgttcctgagagtgaagttcagcagaagcgccgacgcccctgcctaccagcagggacagaaccaactgtacaacgagctgaacctgggcagacgggaagagtacgacgtgctggacaagcggagaggcagggaccctgagatgggcggaaagccccagcggagaaagaacccccaggaaggactgtataacgaactccagaaagacaagatggccgaagcctacagcgagatcggcatgaagggcgagcggagaagaggcaagggccacgatggcctgtaccagggcctgagcaccgccaccaaggacacctatgacgccctgcacatgcaggccctgcctccaagaagggccaagcgatctggatctggagcaacaaacttctcactactcaaacaagcaggtgacgtggaggagaatcccgggcctactagtatggactggatttggcgcatccttttccttgtcggcgctgctaccggcgcgcattccttcgaacaggtgcagctggtgcagtctggggccgaagtgaagaagcctggcgagagcctgaagatcagctgcaagggctccggctacaacttctctaacaagtggatcggctgggtgcgccagctgcctggcagaggactggaatggatcgccatcatctaccccggctacagcgacatcacctacagccccagcttccagggccgcgtgacaatcagcgccgacaccagcatcaacaccgcctacctgcactggcacagcctgaaggccagcgacaccgccatgtactactgcgtgcggcatacagccctggctggcttcgattattggggcctgggcaccctcgtgaccgtgtctagtacgcgtatccagaaccctgatcctgccgtgtaccagctgcgggatagcaagagcagcgacaagagcgtgtgtctgttcaccgacttcgacagccagaccaacgtgtcccagagcaaggactccgacgtgtacatcaccgataagaccgtgctggacatgcggagcatggacttcaagagcaactccgccgtggcctggtccaacaagtccgatttcgcctgcgccaacgccttcaacaacagcattatccccgaggacacattcttcccaagccccgagagcagctgcggtacccagagttttgggttgttggaccctaaattgtgctatctgttggacggaatcctgttcatttacggagtgatcctgaccgcattgttcctgcgggttaagttttccagatccgcagacgcacccgcttaccaacaagggcagaaccaactctacaatgaacttaatttggggcggagggaagagtacgacgttctggacaaaaggaggggacgagatcccgagatgggcggaaagcctcagcgaaggaagaatccgcaagaggggctttataacgaactccagaaagataaaatggcagaagcctatagtgagattgggatgaagggagaaaggaggaggggtaaaggtcacgatgggttgtaccaaggattgagcacagccactaaagatacctatgatgcgctccacatgcaggccctgccgccaaga

SEQ ID NO: 2278 - DNA, 2859 bp, Artificial Sequence
  Synthetic Polynucloetide
atggccttaccagtgaccgccttgctcctgccgctggccttgctgctccacgccgccaggccggaagtgcagctggttgaatctggcggaggactggttcagcctggcggatctctgagactgtcttgtgccgccagcggcttcagcttcagcgacttttggatgagctgggtccgacaggcccctggcaaaggacttgaatgggtcgccacaatcagccaggccggcagcgagaaggactacgtggactctgtgaagggcagattcaccatcagccgggacaacgccaagaagtccctgtacctccagatgaacagcctgagagccgaggacaccgccgtgtactattgtgcctctggcgtgtacagcttcgactacagaggccagggcaccctggtcacagtctcttctggtaccggcggaggcggatctggcggcggaggtagcggtggcggaggatctgaattcgacatcgtgctgacacagagccctgcttctctggccgtgtctctgggacagagagccaccatcagctgtagagccagcgagagcgtggacaactacggcaacaccttcatgcactggtatcagcagaagcccggccagcctcctaagctgctgatctacagagccagcaacctggaaagcggcatccccgccagattttctggcagcggcagcagaaccgacttcaccctgaccatcaatcccgtggaagccgacgacgtggcaacctactactgccagcagagcaacgaggaccctcctacatttggagccggcaccaagctggaactgaaactcgaggacctgaagaacgtgttcccacctgaggtggccgtgttcgagcctagcgaggccgagatcagccacacccagaaagccaccctcgtgtgcctggctaccggcttctaccccgaccatgtggaactgtcttggtgggtcaacggcaaagaggtgcacagcggcgtgtctaccgacccccagccactgaaagaacagcccgccctgaacgacagccggtactgcctgagcagcagactgagagtgtccgccaccttctggcagaacccccggaaccacttcagatgccaggtgcagttctacggcctgagcgagaacgacgagtggacccaggacagagccaagcccgtgacccagatcgtgtctgccgaagcctggggcagagccgattgcggatcccagagcttcggcctgctggaccccaagctgtgctacctgctggatggcatcctgttcatctacggcgtgatcctgaccgccctgttcctgagagtgaagttcagcagaagcgccgacgcccctgcctaccagcagggacagaaccaactgtacaacgagctgaacctgggcagacgggaagagtacgacgtgctggacaagcggagaggcagggaccctgagatgggcggaaagccccagcggagaaagaacccccaggaaggactgtataacgaactccagaaagacaagatggccgaagcctacagcgagatcggcatgaagggcgagcggagaagaggcaagggccacgatggcctgtaccagggcctgagcaccgccaccaaggacacctatgacgccctgcacatgcaggccctgcctccaagaagggccaagcgatctggatctggagcaacaaacttctcactactcaaacaagcaggtgacgtggaggagaatcccgggcctactagtatggactggatttggcgcatccttttccttgtcggcgctgctaccggcgcgcattccttcgaacagattcagctggtgcagtctggccccgagctgaagaaacctggcgagacagtgaagatcagctgcaaggccagcggctacatcttcaccaattacggcatgaactgggtcaagcaggcccctggcaagagcttcaagtggatgggctggatcaacacctacaccggcgagagcacatacagcgccgacttcaagggcagattcgccttcagcctggaaaccagcgccagcacagcctacctgcacatcaacgacctgaagaacgaggacaccgccacctacttttgcgccagaagcggcggctacgaccctatggattattggggccagggcaccagcgtgaccgtttcttctacgcgtatccagaaccctgatcctgccgtgtaccagctgcgggatagcaagagcagcgacaagagcgtgtgtctgttcaccgacttcgacagccagaccaacgtgtcccagagcaaggactccgacgtgtacatcaccgataagaccgtgctggacatgcggagcatggacttcaagagcaactccgccgtggcctggtccaacaagtccgatttcgcctgcgccaacgccttcaacaacagcattatccccgaggacacattcttcccaagccccgagagcagctgcggtacccagagttttgggttgttggaccctaaattgtgctatctgttggacggaatcctgttcatttacggagtgatcctgaccgcattgttcctgcgggttaagttttccagatccgcagacgcacccgcttaccaacaagggcagaaccaactctacaatgaacttaatttggggcggagggaagagtacgacgttctggacaaaaggaggggacgagatcccgagatgggcggaaagcctcagcgaaggaagaatccgcaagaggggctttataacgaactccagaaagataaaatggcagaagcctatagtgagattgggatgaagggagaaaggaggaggggtaaaggtcacgatgggttgtaccaaggattgagcacagccactaaagatacctatgatgcgctccacatgcaggccctgccgccaaga

SEQ ID NO: 2279 - DNA, 2856 bp, Artificial Sequence
  Synthetic Polynucloetide
atggccttaccagtgaccgccttgctcctgccgctggccttgctgctccacgccgccaggccggaagtgcagctggttgaatctggcggaggactggttcagcctggcggatctctgagactgtcttgtgccgccagcggcttcagcttcagcgacttttggatgagctgggtccgacaggcccctggcaaaggacttgaatgggtcgccacaatcagccaggccggcagcgagaaggactacgtggactctgtgaagggcagattcaccatcagccgggacaacgccaagaagtccctgtacctccagatgaacagcctgagagccgaggacaccgccgtgtactattgtgcctctggcgtgtacagcttcgactacagaggccagggcaccctggtcacagtctcttctggtaccggcggaggcggatctggcggcggaggtagcggtggcggaggatctgaattcgacgagatcgtgctgacacagagccctggcaccctgagcctgtctccaggcgaaagagccacactgagctgtcgggccagccagagcgtgtccaatacctacctggcctggtatcaccagaggcccggacaggctccccggctgctgatctatggcgcttctagcagagccaccggcatccccgatagattcagcggctctggcagcggcaccgacttcgccctgacaatcagctccctggaacccgaggacttcgccgtgtactactgccagcagtacagcaactcctggaccttcggccagggcaccaaggtggaaatcaagagactcgaggacctgaagaacgtgttcccacctgaggtggccgtgttcgagcctagcgaggccgagatcagccacacccagaaagccaccctcgtgtgcctggctaccggcttctaccccgaccatgtggaactgtcttggtgggtcaacggcaaagaggtgcacagcggcgtgtctaccgacccccagccactgaaagaacagcccgccctgaacgacagccggtactgcctgagcagcagactgagagtgtccgccaccttctggcagaacccccggaaccacttcagatgccaggtgcagttctacggcctgagcgagaacgacgagtggacccaggacagagccaagcccgtgacccagatcgtgtctgccgaagcctggggcagagccgattgcggatcccagagcttcggcctgctggaccccaagctgtgctacctgctggatggcatcctgttcatctacggcgtgatcctgaccgccctgttcctgagagtgaagttcagcagaagcgccgacgcccctgcctaccagcagggacagaaccaactgtacaacgagctgaacctgggcagacgggaagagtacgacgtgctggacaagcggagaggcagggaccctgagatgggcggaaagccccagcggagaaagaacccccaggaaggactgtataacgaactccagaaagacaagatggccgaagcctacagcgagatcggcatgaagggcgagcggagaagaggcaagggccacgatggcctgtaccagggcctgagcaccgccaccaaggacacctatgacgccctgcacatgcaggccctgcctccaagaagggccaagcgatctggatctggagcaacaaacttctcactactcaaacaagcaggtgacgtggaggagaatcccgggcctactagtatggactggatttggcgcatccttttccttgtcggcgctgctaccggcgcgcattccttcgaacaggtgcaactggtggaatctggcgggggagtggtgcagcctggcagaagcctgagactgtcttgtgccgccagcggcttcaccttcagcagctacgacatgcactgggtgcgccaggcccctggcaaaggactggaatgggtggccgtgatctcctacgacggcaccaacgagtattacgccgacagcgtgaagggccggttcaccatctccagagacaccagcaagaacaccctgtacctccagatgaacagcctgcgggccgaggacacagccgtgtattattgcgccagagagcggtacttcgactggtccttcgactactggggccagggaaccctggtgtccgtgtctagtacgcgtatccagaaccctgatcctgccgtgtaccagctgcgggatagcaagagcagcgacaagagcgtgtgtctgttcaccgacttcgacagccagaccaacgtgtcccagagcaaggactccgacgtgtacatcaccgataagaccgtgctggacatgcggagcatggacttcaagagcaactccgccgtggcctggtccaacaagtccgatttcgcctgcgccaacgccttcaacaacagcattatccccgaggacacattcttcccaagccccgagagcagctgcggtacccagagttttgggttgttggaccctaaattgtgctatctgttggacggaatcctgttcatttacggagtgatcctgaccgcattgttcctgcgggttaagttttccagatccgcagacgcacccgcttaccaacaagggcagaaccaactctacaatgaacttaatttggggcggagggaagagtacgacgttctggacaaaaggaggggacgagatcccgagatgggcggaaagcctcagcgaaggaagaatccgcaagaggggctttataacgaactccagaaagataaaatggcagaagcctatagtgagattgggatgaagggagaaaggaggaggggtaaaggtcacgatgggttgtaccaaggattgagcacagccactaaagatacctatgatgcgctccacatgcaggccctgccgccaaga

SEQ ID NO: 2280 - DNA, 2853 bp, Artificial Sequence
  Synthetic Polynucloetide
atggccttaccagtgaccgccttgctcctgccgctggccttgctgctccacgccgccaggccggaagtgcagctggttgaatctggcggaggactggttcagcctggcggatctctgagactgtcttgtgccgccagcggcttcagcttcagcgacttttggatgagctgggtccgacaggcccctggcaaaggacttgaatgggtcgccacaatcagccaggccggcagcgagaaggactacgtggactctgtgaagggcagattcaccatcagccgggacaacgccaagaagtccctgtacctccagatgaacagcctgagagccgaggacaccgccgtgtactattgtgcctctggcgtgtacagcttcgactacagaggccagggcaccctggtcacagtctcttctggtaccggcggaggcggatctggcggcggaggtagcggtggcggaggatctgaattcgacgagctgacacaggaccctgctgtgtctgttgccctgggccagacagtgcggattacctgtcaaggcgacagcctgagaagcaactacgccaactggtatcagcagaagcccggacaggctcccgtgctggttatctacggccagaacaacagacccagcggcatccccgatagattcagcggctctagctctggcaataccgccagcctgacaatcactggcgctcaggctgccgatgaggccgactactactgcgatagcagagtgtccaccggcaatcacgtggtgtttggcggcggaacaaagctgacagtgctcggacaactcgaggacctgaagaacgtgttcccacctgaggtggccgtgttcgagcctagcgaggccgagatcagccacacccagaaagccaccctcgtgtgcctggctaccggcttctaccccgaccatgtggaactgtcttggtgggtcaacggcaaagaggtgcacagcggcgtgtctaccgacccccagccactgaaagaacagcccgccctgaacgacagccggtactgcctgagcagcagactgagagtgtccgccaccttctggcagaacccccggaaccacttcagatgccaggtgcagttctacggcctgagcgagaacgacgagtggacccaggacagagccaagcccgtgacccagatcgtgtctgccgaagcctggggcagagccgattgcggatcccagagcttcggcctgctggaccccaagctgtgctacctgctggatggcatcctgttcatctacggcgtgatcctgaccgccctgttcctgagagtgaagttcagcagaagcgccgacgcccctgcctaccagcagggacagaaccaactgtacaacgagctgaacctgggcagacgggaagagtacgacgtgctggacaagcggagaggcagggaccctgagatgggcggaaagccccagcggagaaagaacccccaggaaggactgtataacgaactccagaaagacaagatggccgaagcctacagcgagatcggcatgaagggcgagcggagaagaggcaagggccacgatggcctgtaccagggcctgagcaccgccaccaaggacacctatgacgccctgcacatgcaggccctgcctccaagaagggccaagcgatctggatctggagcaacaaacttctcactactcaaacaagcaggtgacgtggaggagaatcccgggcctactagtatggactggatttggcgcatccttttccttgtcggcgctgctaccggcgcgcattccttcgaagaagttcagctggtgcagagcggagccgaagtgaagaaacctggggcctctgtgaaggtgtcctgcaaggcttccggctacacctttaccagctacgccatgcactgggtccgacaggcacctggacaacggcttgaatggatgggctggatcaacgccggcaacggcaacaccaagtacagccagaaattccagggccgcgtgaccatcaccagagatacaagcgccagcaccgcctacatggaactgtctagcctgagatccgaggacaccgccgtgtactactgtgccagagacatcagctacggcagcttcgactattggggccagggcacactggtcaccgttagctctacgcgtatccagaaccctgatcctgccgtgtaccagctgcgggatagcaagagcagcgacaagagcgtgtgtctgttcaccgacttcgacagccagaccaacgtgtcccagagcaaggactccgacgtgtacatcaccgataagaccgtgctggacatgcggagcatggacttcaagagcaactccgccgtggcctggtccaacaagtccgatttcgcctgcgccaacgccttcaacaacagcattatccccgaggacacattcttcccaagccccgagagcagctgcggtacccagagttttgggttgttggaccctaaattgtgctatctgttggacggaatcctgttcatttacggagtgatcctgaccgcattgttcctgcgggttaagttttccagatccgcagacgcacccgcttaccaacaagggcagaaccaactctacaatgaacttaatttggggcggagggaagagtacgacgttctggacaaaaggaggggacgagatcccgagatgggcggaaagcctcagcgaaggaagaatccgcaagaggggctttataacgaactccagaaagataaaatggcagaagcctatagtgagattgggatgaagggagaaaggaggaggggtaaaggtcacgatgggttgtaccaaggattgagcacagccactaaagatacctatgatgcgctccacatgcaggccctgccgccaaga

SEQ ID NO: 2281 - DNA, 2859 bp, Artificial Sequence
  Synthetic Polynucloetide
atggccttaccagtgaccgccttgctcctgccgctggccttgctgctccacgccgccaggccggaagtgcagctggttgaatctggcggaggactggttcagcctggcggatctctgagactgtcttgtgccgccagcggcttcagcttcagcgacttttggatgagctgggtccgacaggcccctggcaaaggacttgaatgggtcgccacaatcagccaggccggcagcgagaaggactacgtggactctgtgaagggcagattcaccatcagccgggacaacgccaagaagtccctgtacctccagatgaacagcctgagagccgaggacaccgccgtgtactattgtgcctctggcgtgtacagcttcgactacagaggccagggcaccctggtcacagtctcttctggtaccggcggaggcggatctggcggcggaggtagcggtggcggaggatctgaattcgacgacatcgtgctgacacagacaccagccacactgagcgtgacacctggcgattctgtgtccctgagctgtagagccagccagagcatcagcaacaacctgcactggtatcagcagaagtcccacgagagccccagactgctgattaagaacgccagccagtctatcagcggcatccccagcaagtttagcggctctggcagcggcaccgacttcaccctgagaatcaacagcgtggaaaccgaggacttcgggatgtacttctgccagcagagcaatagctggccctacacatttggctccggcaccaagctggaaatcaaactcgaggacctgaagaacgtgttcccacctgaggtggccgtgttcgagcctagcgaggccgagatcagccacacccagaaagccaccctcgtgtgcctggctaccggcttctaccccgaccatgtggaactgtcttggtgggtcaacggcaaagaggtgcacagcggcgtgtctaccgacccccagccactgaaagaacagcccgccctgaacgacagccggtactgcctgagcagcagactgagagtgtccgccaccttctggcagaacccccggaaccacttcagatgccaggtgcagttctacggcctgagcgagaacgacgagtggacccaggacagagccaagcccgtgacccagatcgtgtctgccgaagcctggggcagagccgattgcggatcccagagcttcggcctgctggaccccaagctgtgctacctgctggatggcatcctgttcatctacggcgtgatcctgaccgccctgttcctgagagtgaagttcagcagaagcgccgacgcccctgcctaccagcagggacagaaccaactgtacaacgagctgaacctgggcagacgggaagagtacgacgtgctggacaagcggagaggcagggaccctgagatgggcggaaagccccagcggagaaagaacccccaggaaggactgtataacgaactccagaaagacaagatggccgaagcctacagcgagatcggcatgaagggcgagcggagaagaggcaagggccacgatggcctgtaccagggcctgagcaccgccaccaaggacacctatgacgccctgcacatgcaggccctgcctccaagaagggccaagcgatctggatctggagcaacaaacttctcactactcaaacaagcaggtgacgtggaggagaatcccgggcctactagtatggactggatttggcgcatccttttccttgtcggcgctgctaccggcgcgcattccttcgaacaagtgaagctgcaacagagcggacccgagctggttaagccaggcgcttccgtgaagattagctgcaaggccagcggctacagcttcaccggctactacatgcactgggtcaagcagagccacggcaacatcctggactggatcggctacatctacccctacaacggcgtgtccagctacaaccagaagttcaagggcaaagccactctgaccgtggacaagagcagcagcaccgcctacatggaactgagaagcctgaccagcgaggacagcgccgtgtactattgtgccagagagcggggcctgtaccagctcagagcaatggattattggggccagggcaccagcgtgaccgtttcttctacgcgtatccagaaccctgatcctgccgtgtaccagctgcgggatagcaagagcagcgacaagagcgtgtgtctgttcaccgacttcgacagccagaccaacgtgtcccagagcaaggactccgacgtgtacatcaccgataagaccgtgctggacatgcggagcatggacttcaagagcaactccgccgtggcctggtccaacaagtccgatttcgcctgcgccaacgccttcaacaacagcattatccccgaggacacattcttcccaagccccgagagcagctgcggtacccagagttttgggttgttggaccctaaattgtgctatctgttggacggaatcctgttcatttacggagtgatcctgaccgcattgttcctgcgggttaagttttccagatccgcagacgcacccgcttaccaacaagggcagaaccaactctacaatgaacttaatttggggcggagggaagagtacgacgttctggacaaaaggaggggacgagatcccgagatgggcggaaagcctcagcgaaggaagaatccgcaagaggggctttataacgaactccagaaagataaaatggcagaagcctatagtgagattgggatgaagggagaaaggaggaggggtaaaggtcacgatgggttgtaccaaggattgagcacagccactaaagatacctatgatgcgctccacatgcaggccctgccgccaaga

SEQ ID NO: 2282 - DNA, 2832 bp, Artificial Sequence
  Synthetic Polynucloetide
atggccttaccagtgaccgccttgctcctgccgctggccttgctgctccacgccgccaggccggaagtgcagctggttgaatctggcggaggactggttcagcctggcggatctctgagactgtcttgtgccgccagcggcttcagcttcagcgacttttggatgagctgggtccgacaggcccctggcaaaggacttgaatgggtcgccacaatcagccaggccggcagcgagaaggactacgtggactctgtgaagggcagattcaccatcagccgggacaacgccaagaagtccctgtacctccagatgaacagcctgagagccgaggacaccgccgtgtactattgtgcctctggcgtgtacagcttcgactacagaggccagggcaccctggtcacagtctcttctggtaccggcggaggcggatctggcggcggaggtagcggtggcggaggatctgaattcgacgacatcgtgatgacacagacccctgccatcatgagcgcctctccaggccagaaagtgaccatcacatgtagcgccagcagcagcgtgaactacatgcactggtatcagcagaagctgggcagcagccccaagctgtggatctacgataccagcaaactggcccctggcgtgccagccagattttctggttctggcagcggcaccagctacagcctgacaatcagcagcatggaagccgaggatgccgccagctacttctgccatcagtggtctagctacccctacacctttggctccggcaccaagctggaaatcaaactcgaggacctgaagaacgtgttcccacctgaggtggccgtgttcgagcctagcgaggccgagatcagccacacccagaaagccaccctcgtgtgcctggctaccggcttctaccccgaccatgtggaactgtcttggtgggtcaacggcaaagaggtgcacagcggcgtgtctaccgacccccagccactgaaagaacagcccgccctgaacgacagccggtactgcctgagcagcagactgagagtgtccgccaccttctggcagaacccccggaaccacttcagatgccaggtgcagttctacggcctgagcgagaacgacgagtggacccaggacagagccaagcccgtgacccagatcgtgtctgccgaagcctggggcagagccgattgcggatcccagagcttcggcctgctggaccccaagctgtgctacctgctggatggcatcctgttcatctacggcgtgatcctgaccgccctgttcctgagagtgaagttcagcagaagcgccgacgcccctgcctaccagcagggacagaaccaactgtacaacgagctgaacctgggcagacgggaagagtacgacgtgctggacaagcggagaggcagggaccctgagatgggcggaaagccccagcggagaaagaacccccaggaaggactgtataacgaactccagaaagacaagatggccgaagcctacagcgagatcggcatgaagggcgagcggagaagaggcaagggccacgatggcctgtaccagggcctgagcaccgccaccaaggacacctatgacgccctgcacatgcaggccctgcctccaagaagggccaagcgatctggatctggagcaacaaacttctcactactcaaacaagcaggtgacgtggaggagaatcccgggcctactagtatggactggatttggcgcatccttttccttgtcggcgctgctaccggcgcgcattccttcgaagaagttcagctccaagagtctggccccgacctggtcaagcctagccaaagcctgagcctgacctgtaccgtgaccggctacagcatcacaagcggctatggatggcactggatcagacagttccccggcaacaaactggaatggatgggctacatccactacagcggcagcaccacctacaatcccagcctgaagtcccggatcagcatcagcagagacaccagcaagaaccagttcttcctgcaactgaacagcgtgaccaccgaggacaccgccacctactattgtgctcggagcctgagatattggggccagggcacaaccctgaccgtgtcatctacgcgtatccagaaccctgatcctgccgtgtaccagctgcgggatagcaagagcagcgacaagagcgtgtgtctgttcaccgacttcgacagccagaccaacgtgtcccagagcaaggactccgacgtgtacatcaccgataagaccgtgctggacatgcggagcatggacttcaagagcaactccgccgtggcctggtccaacaagtccgatttcgcctgcgccaacgccttcaacaacagcattatccccgaggacacattcttcccaagccccgagagcagctgcggtacccagagttttgggttgttggaccctaaattgtgctatctgttggacggaatcctgttcatttacggagtgatcctgaccgcattgttcctgcgggttaagttttccagatccgcagacgcacccgcttaccaacaagggcagaaccaactctacaatgaacttaatttggggcggagggaagagtacgacgttctggacaaaaggaggggacgagatcccgagatgggcggaaagcctcagcgaaggaagaatccgcaagaggggctttataacgaactccagaaagataaaatggcagaagcctatagtgagattgggatgaagggagaaaggaggaggggtaaaggtcacgatgggttgtaccaaggattgagcacagccactaaagatacctatgatgcgctccacatgcaggccctgccgccaaga

SEQ ID NO: 2283 - DNA, 2841 bp, Artificial Sequence
  Synthetic Polynucloetide
atggccttaccagtgaccgccttgctcctgccgctggccttgctgctccacgccgccaggccggaagtgcagctggttgaatctggcggaggactggttcagcctggcggatctctgagactgtcttgtgccgccagcggcttcagcttcagcgacttttggatgagctgggtccgacaggcccctggcaaaggacttgaatgggtcgccacaatcagccaggccggcagcgagaaggactacgtggactctgtgaagggcagattcaccatcagccgggacaacgccaagaagtccctgtacctccagatgaacagcctgagagccgaggacaccgccgtgtactattgtgcctctggcgtgtacagcttcgactacagaggccagggcaccctggtcacagtctcttctggtaccggcggaggcggatctggcggcggaggtagcggtggcggaggatctgaattcgacgacatccagatgacacagagccctagcagcctgtctgccagcgtgggagacagagtgaccatcacctgtagcgccaccagcagcatcagctacatgcactggtatcagcagaagcccggcaaggcccctaaaggctggatctacgataccagcaaactggcccacggcgtgcccagcagattttctggttctggcagcggcaccgacttcaccctgacaatatctagcctccagcctgaggacttcgccacctactactgccaccagagaagaagctaccccttcaccttcggccagggcaccaaggtggaaatcaaactcgaggacctgaagaacgtgttcccacctgaggtggccgtgttcgagcctagcgaggccgagatcagccacacccagaaagccaccctcgtgtgcctggctaccggcttctaccccgaccatgtggaactgtcttggtgggtcaacggcaaagaggtgcacagcggcgtgtctaccgacccccagccactgaaagaacagcccgccctgaacgacagccggtactgcctgagcagcagactgagagtgtccgccaccttctggcagaacccccggaaccacttcagatgccaggtgcagttctacggcctgagcgagaacgacgagtggacccaggacagagccaagcccgtgacccagatcgtgtctgccgaagcctggggcagagccgattgcggatcccagagcttcggcctgctggaccccaagctgtgctacctgctggatggcatcctgttcatctacggcgtgatcctgaccgccctgttcctgagagtgaagttcagcagaagcgccgacgcccctgcctaccagcagggacagaaccaactgtacaacgagctgaacctgggcagacgggaagagtacgacgtgctggacaagcggagaggcagggaccctgagatgggcggaaagccccagcggagaaagaacccccaggaaggactgtataacgaactccagaaagacaagatggccgaagcctacagcgagatcggcatgaagggcgagcggagaagaggcaagggccacgatggcctgtaccagggcctgagcaccgccaccaaggacacctatgacgccctgcacatgcaggccctgcctccaagaagggccaagcgatctggatctggagcaacaaacttctcactactcaaacaagcaggtgacgtggaggagaatcccgggcctactagtatggactggatttggcgcatccttttccttgtcggcgctgctaccggcgcgcattccttcgaagaagtgcaactggttcagagcggagccgaagtgaagaaacctggggcctctgtgaaggtgtcctgcaaggcttccggctacacctttaccaatttctggattcactgggtccgacaggctccaggccaaggactggaatggatcggagagatcgaccccagcgacagctacaccaactacaaccagaaattcaaaggccgggtcaccatcaccagagacaccagcacaagcaccgcctacctggaactgagcagcctgagaagcgaggacaccgccgtgtactactgcgccagggaaatcaccaccgtggattattggggccagggaaccctggtcaccgtgtcatctacgcgtatccagaaccctgatcctgccgtgtaccagctgcgggatagcaagagcagcgacaagagcgtgtgtctgttcaccgacttcgacagccagaccaacgtgtcccagagcaaggactccgacgtgtacatcaccgataagaccgtgctggacatgcggagcatggacttcaagagcaactccgccgtggcctggtccaacaagtccgatttcgcctgcgccaacgccttcaacaacagcattatccccgaggacacattcttcccaagccccgagagcagctgcggtacccagagttttgggttgttggaccctaaattgtgctatctgttggacggaatcctgttcatttacggagtgatcctgaccgcattgttcctgcgggttaagttttccagatccgcagacgcacccgcttaccaacaagggcagaaccaactctacaatgaacttaatttggggcggagggaagagtacgacgttctggacaaaaggaggggacgagatcccgagatgggcggaaagcctcagcgaaggaagaatccgcaagaggggctttataacgaactccagaaagataaaatggcagaagcctatagtgagattgggatgaagggagaaaggaggaggggtaaaggtcacgatgggttgtaccaaggattgagcacagccactaaagatacctatgatgcgctccacatgcaggccctgccgccaaga

SEQ ID NO: 2284 - DNA, 2862 bp, Artificial Sequence
  Synthetic Polynucloetide
atggccttaccagtgaccgccttgctcctgccgctggccttgctgctccacgccgccaggccggaagtgcagctggttgaatctggcggaggactggttcagcctggcggatctctgagactgtcttgtgccgccagcggcttcagcttcagcgacttttggatgagctgggtccgacaggcccctggcaaaggacttgaatgggtcgccacaatcagccaggccggcagcgagaaggactacgtggactctgtgaagggcagattcaccatcagccgggacaacgccaagaagtccctgtacctccagatgaacagcctgagagccgaggacaccgccgtgtactattgtgcctctggcgtgtacagcttcgactacagaggccagggcaccctggtcacagtctcttctggtaccggcggaggcggatctggcggcggaggtagcggtggcggaggatctgaattcgacgacatccagatgacacagagccctagcagcctgtctgccagcgtgggagacagagtgaccatcacatgcaaggccagccagggcttcaacaaatacgtggcctggtatcagcagaagcccggcaaggctcctaagctgctgatctactacaccagcacactccagcctggcgtgcccagcagattttctggctctggcagcggcagagactacaccctgacaatatccagcctccagccagaggacttcgccacctactactgtctccagtacggcaacctgctgtacgcctttggacagggcaccaaggtggaaatcaagagactcgaggacctgaagaacgtgttcccacctgaggtggccgtgttcgagcctagcgaggccgagatcagccacacccagaaagccaccctcgtgtgcctggctaccggcttctaccccgaccatgtggaactgtcttggtgggtcaacggcaaagaggtgcacagcggcgtgtctaccgacccccagccactgaaagaacagcccgccctgaacgacagccggtactgcctgagcagcagactgagagtgtccgccaccttctggcagaacccccggaaccacttcagatgccaggtgcagttctacggcctgagcgagaacgacgagtggacccaggacagagccaagcccgtgacccagatcgtgtctgccgaagcctggggcagagccgattgcggatcccagagcttcggcctgctggaccccaagctgtgctacctgctggatggcatcctgttcatctacggcgtgatcctgaccgccctgttcctgagagtgaagttcagcagaagcgccgacgcccctgcctaccagcagggacagaaccaactgtacaacgagctgaacctgggcagacgggaagagtacgacgtgctggacaagcggagaggcagggaccctgagatgggcggaaagccccagcggagaaagaacccccaggaaggactgtataacgaactccagaaagacaagatggccgaagcctacagcgagatcggcatgaagggcgagcggagaagaggcaagggccacgatggcctgtaccagggcctgagcaccgccaccaaggacacctatgacgccctgcacatgcaggccctgcctccaagaagggccaagcgatctggatctggagcaacaaacttctcactactcaaacaagcaggtgacgtggaggagaatcccgggcctactagtatggactggatttggcgcatccttttccttgtcggcgctgctaccggcgcgcattccttcgaagaagttcagcttgtgcagagcggagccgaagtgaagaaacctggggcctctgtgaaggtgtcctgcaaagccagcggctacacctttaccagctactggatcggctgggtccgacaggctcctggacaaggactggaatggatcggcgacatctatcccggcggaggctacaccaactacaacgagaagttcaagggccgcgtgacaatcaccagagacacctctacaagcaccgcctacctggaactgagcagcctgagaagcgaggacaccgccgtgtactactgcgccagactggatggcagcagctacagaggcgctatggattcttggggccagggcacactggtcaccgtttcttctacgcgtatccagaaccctgatcctgccgtgtaccagctgcgggatagcaagagcagcgacaagagcgtgtgtctgttcaccgacttcgacagccagaccaacgtgtcccagagcaaggactccgacgtgtacatcaccgataagaccgtgctggacatgcggagcatggacttcaagagcaactccgccgtggcctggtccaacaagtccgatttcgcctgcgccaacgccttcaacaacagcattatccccgaggacacattcttcccaagccccgagagcagctgcggtacccagagttttgggttgttggaccctaaattgtgctatctgttggacggaatcctgttcatttacggagtgatcctgaccgcattgttcctgcgggttaagttttccagatccgcagacgcacccgcttaccaacaagggcagaaccaactctacaatgaacttaatttggggcggagggaagagtacgacgttctggacaaaaggaggggacgagatcccgagatgggcggaaagcctcagcgaaggaagaatccgcaagaggggctttataacgaactccagaaagataaaatggcagaagcctatagtgagattgggatgaagggagaaaggaggaggggtaaaggtcacgatgggttgtaccaaggattgagcacagccactaaagatacctatgatgcgctccacatgcaggccctgccgccaaga

SEQ ID NO: 2285 - DNA, 2850 bp, Artificial Sequence
  Synthetic Polynucloetide
atggccttaccagtgaccgccttgctcctgccgctggccttgctgctccacgccgccaggccggaagtgcagctggttgaatctggcggaggactggttcagcctggcggatctctgagactgtcttgtgccgccagcggcttcagcttcagcgacttttggatgagctgggtccgacaggcccctggcaaaggacttgaatgggtcgccacaatcagccaggccggcagcgagaaggactacgtggactctgtgaagggcagattcaccatcagccgggacaacgccaagaagtccctgtacctccagatgaacagcctgagagccgaggacaccgccgtgtactattgtgcctctggcgtgtacagcttcgactacagaggccagggcaccctggtcacagtctcttctggtaccggcggaggcggatctggcggcggaggtagcggtggcggaggatctgaattcgacgacatccagatgacacagagccctagcagcctgtctgccagcgtgggagacagagtgaccatcacctgtagagccagccaggacatccggtactacctgaactggtatcagcagaagcccggcaaggcccctaagctgctgatctatgtggcctccagcctccagagcggagtgccttctagattttctggcagcggctccggcaccgagtttaccctgacagtgtctagcttgcagcccgaggacttcgccacctactactgcctgcaagtgtacagcacccctcggacctttggacagggcaccaaggtggaaatcaaactcgaggacctgaagaacgtgttcccacctgaggtggccgtgttcgagcctagcgaggccgagatcagccacacccagaaagccaccctcgtgtgcctggctaccggcttctaccccgaccatgtggaactgtcttggtgggtcaacggcaaagaggtgcacagcggcgtgtctaccgacccccagccactgaaagaacagcccgccctgaacgacagccggtactgcctgagcagcagactgagagtgtccgccaccttctggcagaacccccggaaccacttcagatgccaggtgcagttctacggcctgagcgagaacgacgagtggacccaggacagagccaagcccgtgacccagatcgtgtctgccgaagcctggggcagagccgattgcggatcccagagcttcggcctgctggaccccaagctgtgctacctgctggatggcatcctgttcatctacggcgtgatcctgaccgccctgttcctgagagtgaagttcagcagaagcgccgacgcccctgcctaccagcagggacagaaccaactgtacaacgagctgaacctgggcagacgggaagagtacgacgtgctggacaagcggagaggcagggaccctgagatgggcggaaagccccagcggagaaagaacccccaggaaggactgtataacgaactccagaaagacaagatggccgaagcctacagcgagatcggcatgaagggcgagcggagaagaggcaagggccacgatggcctgtaccagggcctgagcaccgccaccaaggacacctatgacgccctgcacatgcaggccctgcctccaagaagggccaagcgatctggatctggagcaacaaacttctcactactcaaacaagcaggtgacgtggaggagaatcccgggcctactagtatggactggatttggcgcatccttttccttgtcggcgctgctaccggcgcgcattccttcgaagaagtgcagcttgttgaatctggcggcggactggctaagcctggcggatctctgagactgtcttgtgccgccagcggcttccggttcaccttcaacaactactacatggactgggtccgacaggcccctggacaaggacttgaatgggtgtccagaatcagcagcagcggcgaccctacttggtacgccgattctgtgaagggcagattcaccatcagcagagagaacgccaagaacaccctgttcctccagatgaactccctgagagccgaggacaccgccgtgtactattgtgcctctctgaccaccggcagcgattcttggggacagggcgtgctggttaccgtgtcatctacgcgtatccagaaccctgatcctgccgtgtaccagctgcgggatagcaagagcagcgacaagagcgtgtgtctgttcaccgacttcgacagccagaccaacgtgtcccagagcaaggactccgacgtgtacatcaccgataagaccgtgctggacatgcggagcatggacttcaagagcaactccgccgtggcctggtccaacaagtccgatttcgcctgcgccaacgccttcaacaacagcattatccccgaggacacattcttcccaagccccgagagcagctgcggtacccagagttttgggttgttggaccctaaattgtgctatctgttggacggaatcctgttcatttacggagtgatcctgaccgcattgttcctgcgggttaagttttccagatccgcagacgcacccgcttaccaacaagggcagaaccaactctacaatgaacttaatttggggcggagggaagagtacgacgttctggacaaaaggaggggacgagatcccgagatgggcggaaagcctcagcgaaggaagaatccgcaagaggggctttataacgaactccagaaagataaaatggcagaagcctatagtgagattgggatgaagggagaaaggaggaggggtaaaggtcacgatgggttgtaccaaggattgagcacagccactaaagatacctatgatgcgctccacatgcaggccctgccgccaaga

SEQ ID NO: 2286 - DNA, 2850 bp, Artificial Sequence
  Synthetic Polynucloetide
atggccttaccagtgaccgccttgctcctgccgctggccttgctgctccacgccgccaggccggaagtgcagctggttgaatctggcggaggactggttcagcctggcggatctctgagactgtcttgtgccgccagcggcttcagcttcagcgacttttggatgagctgggtccgacaggcccctggcaaaggacttgaatgggtcgccacaatcagccaggccggcagcgagaaggactacgtggactctgtgaagggcagattcaccatcagccgggacaacgccaagaagtccctgtacctccagatgaacagcctgagagccgaggacaccgccgtgtactattgtgcctctggcgtgtacagcttcgactacagaggccagggcaccctggtcacagtctcttctggtaccggcggaggcggatctggcggcggaggtagcggtggcggaggatctgaattcgagatcgtgatgacacagagccccgccacactgagtgtgtctccaggcgaaagagccacactgtcctgtagagccagccagagcgtgtccagaaacctggcctggtatcagcagaagcctggacaggctccccggctgttgatctacggcgcttctacaagagccaccggcattcccgccagattttctggctctggcagcggcaccgagttcaccctgacaatcggaagcctccagagcgaggacttcgccgtgtactactgccagcagtacaagacctggcctcggacctttggacagggcaccaacgtggaaatcaaactcgaggacctgaagaacgtgttcccacctgaggtggccgtgttcgagcctagcgaggccgagatcagccacacccagaaagccaccctcgtgtgcctggctaccggcttctaccccgaccatgtggaactgtcttggtgggtcaacggcaaagaggtgcacagcggcgtgtctaccgacccccagccactgaaagaacagcccgccctgaacgacagccggtactgcctgagcagcagactgagagtgtccgccaccttctggcagaacccccggaaccacttcagatgccaggtgcagttctacggcctgagcgagaacgacgagtggacccaggacagagccaagcccgtgacccagatcgtgtctgccgaagcctggggcagagccgattgcggatcccagagcttcggcctgctggaccccaagctgtgctacctgctggatggcatcctgttcatctacggcgtgatcctgaccgccctgttcctgagagtgaagttcagcagaagcgccgacgcccctgcctaccagcagggacagaaccaactgtacaacgagctgaacctgggcagacgggaagagtacgacgtgctggacaagcggagaggcagggaccctgagatgggcggaaagccccagcggagaaagaacccccaggaaggactgtataacgaactccagaaagacaagatggccgaagcctacagcgagatcggcatgaagggcgagcggagaagaggcaagggccacgatggcctgtaccagggcctgagcaccgccaccaaggacacctatgacgccctgcacatgcaggccctgcctccaagaagggccaagcgatctggatctggagcaacaaacttctcactactcaaacaagcaggtgacgtggaggagaatcccgggcctactagtatggactggatttggcgcatccttttccttgtcggcgctgctaccggcgcgcattccttcgaacaagttcagctgcaacaatggggagccggcctgctgaagcctagcgaaacactgtctctgacctgcgccgtgttcggcggctctttcagcggctactactggtcctggatcagacagcctcctggcaaaggactggaatggatcggcgagatcaaccaccggggcaacaccaacgacaaccccagcctgaaaagcagagtgaccatcagcgtggacaccagcaagaaccagttcgccctgaagctgagcagcgtgacagccgctgataccgccgtgtattattgcgccagagagcggggctacacctacggcaatttcgatcactggggccagggcaccctggtcacagtttcttctacgcgtatccagaaccctgatcctgccgtgtaccagctgcgggatagcaagagcagcgacaagagcgtgtgtctgttcaccgacttcgacagccagaccaacgtgtcccagagcaaggactccgacgtgtacatcaccgataagaccgtgctggacatgcggagcatggacttcaagagcaactccgccgtggcctggtccaacaagtccgatttcgcctgcgccaacgccttcaacaacagcattatccccgaggacacattcttcccaagccccgagagcagctgcggtacccagagttttgggttgttggaccctaaattgtgctatctgttggacggaatcctgttcatttacggagtgatcctgaccgcattgttcctgcgggttaagttttccagatccgcagacgcacccgcttaccaacaagggcagaaccaactctacaatgaacttaatttggggcggagggaagagtacgacgttctggacaaaaggaggggacgagatcccgagatgggcggaaagcctcagcgaaggaagaatccgcaagaggggctttataacgaactccagaaagataaaatggcagaagcctatagtgagattgggatgaagggagaaaggaggaggggtaaaggtcacgatgggttgtaccaaggattgagcacagccactaaagatacctatgatgcgctccacatgcaggccctgccgccaaga

SEQ ID NO: 2287 - DNA, 2853 bp, Artificial Sequence
  Synthetic Polynucloetide
atggccttaccagtgaccgccttgctcctgccgctggccttgctgctccacgccgccaggccggaagtgcagctggttgaatctggcggaggactggttcagcctggcggatctctgagactgtcttgtgccgccagcggcttcagcttcagcgacttttggatgagctgggtccgacaggcccctggcaaaggacttgaatgggtcgccacaatcagccaggccggcagcgagaaggactacgtggactctgtgaagggcagattcaccatcagccgggacaacgccaagaagtccctgtacctccagatgaacagcctgagagccgaggacaccgccgtgtactattgtgcctctggcgtgtacagcttcgactacagaggccagggcaccctggtcacagtctcttctggtaccggcggaggcggatctggcggcggaggtagcggtggcggaggatctgaattcgagatcgtgatgacccctagcagcgccacactgagtgtgtctccaggcgaaagagccacactgtcctgtagagccagccagagcgtgtccagaaacctggcctggtatcagcagaagcctggacaggctccccggctgttgatctacggcgcttctacaagagccaccggcattcccgccagattttctggctctggcagcggcaccgagttcaccctgacaatctctagcctccagagcgaggacttcgccgtgtactactgccaccagtacagcaactggatgtgcagcttcggccagggcaccaagctggaaatcaaactcgaggacctgaagaacgtgttcccacctgaggtggccgtgttcgagcctagcgaggccgagatcagccacacccagaaagccaccctcgtgtgcctggctaccggcttctaccccgaccatgtggaactgtcttggtgggtcaacggcaaagaggtgcacagcggcgtgtctaccgacccccagccactgaaagaacagcccgccctgaacgacagccggtactgcctgagcagcagactgagagtgtccgccaccttctggcagaacccccggaaccacttcagatgccaggtgcagttctacggcctgagcgagaacgacgagtggacccaggacagagccaagcccgtgacccagatcgtgtctgccgaagcctggggcagagccgattgcggatcccagagcttcggcctgctggaccccaagctgtgctacctgctggatggcatcctgttcatctacggcgtgatcctgaccgccctgttcctgagagtgaagttcagcagaagcgccgacgcccctgcctaccagcagggacagaaccaactgtacaacgagctgaacctgggcagacgggaagagtacgacgtgctggacaagcggagaggcagggaccctgagatgggcggaaagccccagcggagaaagaacccccaggaaggactgtataacgaactccagaaagacaagatggccgaagcctacagcgagatcggcatgaagggcgagcggagaagaggcaagggccacgatggcctgtaccagggcctgagcaccgccaccaaggacacctatgacgccctgcacatgcaggccctgcctccaagaagggccaagcgatctggatctggagcaacaaacttctcactactcaaacaagcaggtgacgtggaggagaatcccgggcctactagtatggactggatttggcgcatccttttccttgtcggcgctgctaccggcgcgcattccttcgaagaagttcagctccttgagtcaggtggcggcctggttcaacctggcggatctctgagactgagctgtgccgccagcggcttcacctttagcagatacgccatgaactgggtccgacaggcccctggcaaaggactggaatgggtgtccggcatctctggaagcggcggcagaacctactacgccgattctgtgaagggcagattcaccatcagccgggacaacagcaagaacaccctgtacctccagatgaacagcctgagagccgaggacacagccgtgtattattgcgccaaggaccgggacttttggagcggcccttttgactattggggccagggaaccctggtcaccgttagctctacgcgtatccagaaccctgatcctgccgtgtaccagctgcgggatagcaagagcagcgacaagagcgtgtgtctgttcaccgacttcgacagccagaccaacgtgtcccagagcaaggactccgacgtgtacatcaccgataagaccgtgctggacatgcggagcatggacttcaagagcaactccgccgtggcctggtccaacaagtccgatttcgcctgcgccaacgccttcaacaacagcattatccccgaggacacattcttcccaagccccgagagcagctgcggtacccagagttttgggttgttggaccctaaattgtgctatctgttggacggaatcctgttcatttacggagtgatcctgaccgcattgttcctgcgggttaagttttccagatccgcagacgcacccgcttaccaacaagggcagaaccaactctacaatgaacttaatttggggcggagggaagagtacgacgttctggacaaaaggaggggacgagatcccgagatgggcggaaagcctcagcgaaggaagaatccgcaagaggggctttataacgaactccagaaagataaaatggcagaagcctatagtgagattgggatgaagggagaaaggaggaggggtaaaggtcacgatgggttgtaccaaggattgagcacagccactaaagatacctatgatgcgctccacatgcaggccctgccgccaaga

SEQ ID NO: 2288 - DNA, 2868 bp, Artificial Sequence
  Synthetic Polynucloetide
atggccttaccagtgaccgccttgctcctgccgctggccttgctgctccacgccgccaggccggaagtgcagctggttgaatctggcggaggactggttcagcctggcggatctctgagactgtcttgtgccgccagcggcttcagcttcagcgacttttggatgagctgggtccgacaggcccctggcaaaggacttgaatgggtcgccacaatcagccaggccggcagcgagaaggactacgtggactctgtgaagggcagattcaccatcagccgggacaacgccaagaagtccctgtacctccagatgaacagcctgagagccgaggacaccgccgtgtactattgtgcctctggcgtgtacagcttcgactacagaggccagggcaccctggtcacagtctcttctggtaccggcggaggcggatctggcggcggaggtagcggtggcggaggatctgaattcgacatccagatgacccagagccccagcagcctgtctgccagcgtgggcgacagagtgaccatcacatgcaaggccagcaagaacatcagaagctacctggcctggtatcagcagaagcccggcaaggcccccaagctgctgatctacagcggcagcacactgcacagcggcgtgcccagcagattttccggctctggcagcggcaccgacttcaccctgaccatctctagcctccagcccgaggacttcgccacctactactgccagcagcaccacgagtaccccctgacattcggccagggcaccaaggtggaaatcaagagactcgaggacctgaagaacgtgttcccacctgaggtggccgtgttcgagcctagcgaggccgagatcagccacacccagaaagccaccctcgtgtgcctggctaccggcttctaccccgaccatgtggaactgtcttggtgggtcaacggcaaagaggtgcacagcggcgtgtctaccgacccccagccactgaaagaacagcccgccctgaacgacagccggtactgcctgagcagcagactgagagtgtccgccaccttctggcagaacccccggaaccacttcagatgccaggtgcagttctacggcctgagcgagaacgacgagtggacccaggacagagccaagcccgtgacccagatcgtgtctgccgaagcctggggcagagccgattgcggatcccagagcttcggcctgctggaccccaagctgtgctacctgctggatggcatcctgttcatctacggcgtgatcctgaccgccctgttcctgagagtgaagttcagcagaagcgccgacgcccctgcctaccagcagggacagaaccaactgtacaacgagctgaacctgggcagacgggaagagtacgacgtgctggacaagcggagaggcagggaccctgagatgggcggaaagccccagcggagaaagaacccccaggaaggactgtataacgaactccagaaagacaagatggccgaagcctacagcgagatcggcatgaagggcgagcggagaagaggcaagggccacgatggcctgtaccagggcctgagcaccgccaccaaggacacctatgacgccctgcacatgcaggccctgcctccaagaagggccaagcgatctggatctggagcaacaaacttctcactactcaaacaagcaggtgacgtggaggagaatcccgggcctactagtatggactggatttggcgcatccttttccttgtcggcgctgctaccggcgcgcattccttcgaacaggtgcaactccaggaatctggccccggactcgtgaagcccagcgagacactgagcctgacctgtaccgtgtccggctacaccatcaccagcggctacgactggtcctggatcagacagcctcctggcaagggcctggaatggatcggctacatcaactacggcggctccaccaactacaagcccagcctgggaagccgcgtgacaatcagcgtggacacctccaagaaccagttcagcctgaagctgagcagcgtgacagccgccgataccgccgtgtactactgcgcccggtacaacgagtacaagagctacatctacgattggtacttcgacttctggggccagggaaccctcgtgaccgtgtctagtacgcgtatccagaaccctgatcctgccgtgtaccagctgcgggatagcaagagcagcgacaagagcgtgtgtctgttcaccgacttcgacagccagaccaacgtgtcccagagcaaggactccgacgtgtacatcaccgataagaccgtgctggacatgcggagcatggacttcaagagcaactccgccgtggcctggtccaacaagtccgatttcgcctgcgccaacgccttcaacaacagcattatccccgaggacacattcttcccaagccccgagagcagctgcggtacccagagttttgggttgttggaccctaaattgtgctatctgttggacggaatcctgttcatttacggagtgatcctgaccgcattgttcctgcgggttaagttttccagatccgcagacgcacccgcttaccaacaagggcagaaccaactctacaatgaacttaatttggggcggagggaagagtacgacgttctggacaaaaggaggggacgagatcccgagatgggcggaaagcctcagcgaaggaagaatccgcaagaggggctttataacgaactccagaaagataaaatggcagaagcctatagtgagattgggatgaagggagaaaggaggaggggtaaaggtcacgatgggttgtaccaaggattgagcacagccactaaagatacctatgatgcgctccacatgcaggccctgccgccaaga

SEQ ID NO: 2289 - DNA, 2874 bp, Artificial Sequence
  Synthetic Polynucloetide
atggccttaccagtgaccgccttgctcctgccgctggccttgctgctccacgccgccaggccggaagtgcagctggttgaatctggcggaggactggttcagcctggcggatctctgagactgtcttgtgccgccagcggcttcagcttcagcgacttttggatgagctgggtccgacaggcccctggcaaaggacttgaatgggtcgccacaatcagccaggccggcagcgagaaggactacgtggactctgtgaagggcagattcaccatcagccgggacaacgccaagaagtccctgtacctccagatgaacagcctgagagccgaggacaccgccgtgtactattgtgcctctggcgtgtacagcttcgactacagaggccagggcaccctggtcacagtctcttctggtaccggcggaggcggatctggcggcggaggtagcggtggcggaggatctgaattccagtctgtggtcacacagcctccatccgtgtctgctgcccctggacagaaagtgaccatctcctgtagcggcagcagcagcaacatcggcaacaactacgtgtcctggtatcagcagctccccggcacagctcccaaactgctgatctacgacaacaacaagcggcccagcggcatccccgatagattttctggcagcaagagcggcaccagcgccacactgggaattaccggacttcagacaggcgacgaggccgactactactgtggcacatgggatggcagcctgtacaccatgcttttcggcggaggcaccaagctgacagtgcttctcgaggacctgaagaacgtgttcccacctgaggtggccgtgttcgagcctagcgaggccgagatcagccacacccagaaagccaccctcgtgtgcctggctaccggcttctaccccgaccatgtggaactgtcttggtgggtcaacggcaaagaggtgcacagcggcgtgtctaccgacccccagccactgaaagaacagcccgccctgaacgacagccggtactgcctgagcagcagactgagagtgtccgccaccttctggcagaacccccggaaccacttcagatgccaggtgcagttctacggcctgagcgagaacgacgagtggacccaggacagagccaagcccgtgacccagatcgtgtctgccgaagcctggggcagagccgattgcggatcccagagcttcggcctgctggaccccaagctgtgctacctgctggatggcatcctgttcatctacggcgtgatcctgaccgccctgttcctgagagtgaagttcagcagaagcgccgacgcccctgcctaccagcagggacagaaccaactgtacaacgagctgaacctgggcagacgggaagagtacgacgtgctggacaagcggagaggcagggaccctgagatgggcggaaagccccagcggagaaagaacccccaggaaggactgtataacgaactccagaaagacaagatggccgaagcctacagcgagatcggcatgaagggcgagcggagaagaggcaagggccacgatggcctgtaccagggcctgagcaccgccaccaaggacacctatgacgccctgcacatgcaggccctgcctccaagaagggccaagcgatctggatctggagcaacaaacttctcactactcaaacaagcaggtgacgtggaggagaatcccgggcctactagtatggactggatttggcgcatccttttccttgtcggcgctgctaccggcgcgcattccttcgaagaagtgcaactggtggaatctggcggcggactggttaagcctggcggatctctgagactgtcttgtgccgccagcggcttcaccttcagcaatgcctggatgagctgggttcgacaggcccctggaaaaggactggaatgggtcggattcatccggtccaaagcctacggcggcaccacagaatatgccgcctctgtgaagggcagattcaccatcagccgggacgacagcaagtctatcgcctacctccagatgaacaacctgaaaaccgaggacaccgccgtgtactactgcgccagagatggcctgtacagcagctcttggtacgacagcgattactggggccagggcacactggtcacagtgtcatctacgcgtatccagaaccctgatcctgccgtgtaccagctgcgggatagcaagagcagcgacaagagcgtgtgtctgttcaccgacttcgacagccagaccaacgtgtcccagagcaaggactccgacgtgtacatcaccgataagaccgtgctggacatgcggagcatggacttcaagagcaactccgccgtggcctggtccaacaagtccgatttcgcctgcgccaacgccttcaacaacagcattatccccgaggacacattcttcccaagccccgagagcagctgcggtacccagagttttgggttgttggaccctaaattgtgctatctgttggacggaatcctgttcatttacggagtgatcctgaccgcattgttcctgcgggttaagttttccagatccgcagacgcacccgcttaccaacaagggcagaaccaactctacaatgaacttaatttggggcggagggaagagtacgacgttctggacaaaaggaggggacgagatcccgagatgggcggaaagcctcagcgaaggaagaatccgcaagaggggctttataacgaactccagaaagataaaatggcagaagcctatagtgagattgggatgaagggagaaaggaggaggggtaaaggtcacgatgggttgtaccaaggattgagcacagccactaaagatacctatgatgcgctccacatgcaggccctgccgccaaga

SEQ ID NO: 2290 - DNA, 2889 bp, Artificial Sequence
  Synthetic Polynucloetide
atggccttaccagtgaccgccttgctcctgccgctggccttgctgctccacgccgccaggccggaagtgcagctggttgaatctggcggaggactggttcagcctggcggatctctgagactgtcttgtgccgccagcggcttcagcttcagcgacttttggatgagctgggtccgacaggcccctggcaaaggacttgaatgggtcgccacaatcagccaggccggcagcgagaaggactacgtggactctgtgaagggcagattcaccatcagccgggacaacgccaagaagtccctgtacctccagatgaacagcctgagagccgaggacaccgccgtgtactattgtgcctctggcgtgtacagcttcgactacagaggccagggcaccctggtcacagtctcttctggtaccggcggaggcggatctggcggcggaggtagcggtggcggaggatctgaattccagtctgtgctgacacagcctcctagtgtgtctggcgctcctggacagagagtgaccatctcttgtaccggcagcagcagcaatatcggagccggctatgacgtgcactggtatcagcagctccctggcacagcccctaaactgctgatcttcggcaacagcaacagacccagcggcgtgcccgatagattcagcggctttaagagcggcacaagcgccagcctggctatcactggactgcaagccgaggacgaggccgactacttctgccagagctacgatagcagcctgagcggcagcggagtgtttggcacaggcaccaaagtgacagtgcttggcctcgaggacctgaagaacgtgttcccacctgaggtggccgtgttcgagcctagcgaggccgagatcagccacacccagaaagccaccctcgtgtgcctggctaccggcttctaccccgaccatgtggaactgtcttggtgggtcaacggcaaagaggtgcacagcggcgtgtctaccgacccccagccactgaaagaacagcccgccctgaacgacagccggtactgcctgagcagcagactgagagtgtccgccaccttctggcagaacccccggaaccacttcagatgccaggtgcagttctacggcctgagcgagaacgacgagtggacccaggacagagccaagcccgtgacccagatcgtgtctgccgaagcctggggcagagccgattgcggatcccagagcttcggcctgctggaccccaagctgtgctacctgctggatggcatcctgttcatctacggcgtgatcctgaccgccctgttcctgagagtgaagttcagcagaagcgccgacgcccctgcctaccagcagggacagaaccaactgtacaacgagctgaacctgggcagacgggaagagtacgacgtgctggacaagcggagaggcagggaccctgagatgggcggaaagccccagcggagaaagaacccccaggaaggactgtataacgaactccagaaagacaagatggccgaagcctacagcgagatcggcatgaagggcgagcggagaagaggcaagggccacgatggcctgtaccagggcctgagcaccgccaccaaggacacctatgacgccctgcacatgcaggccctgcctccaagaagggccaagcgatctggatctggagcaacaaacttctcactactcaaacaagcaggtgacgtggaggagaatcccgggcctactagtatggactggatttggcgcatccttttccttgtcggcgctgctaccggcgcgcattccttcgaacaaatgcaactggttcaaagcggcggtggcctggtgcaacctggaagaagtctgagactgagctgtgccgccagcggcttcaccttcgatgattacgccatgcactgggtccgacaggcccctggaaaaggactggaatgggtgtccggcatctcctggaatagcggctctatcggctacgccgacagcgtgaagggcagattcaccatcagccgggacaacgccaagaacagcctgtacctccagatgaactccctgagagccgaggatacagccctgtactactgcgccaaggacatccacagcggcagctactacggcctgctgtactacgctatggacgtgtggggccagggcacaaccgtgacagtttcttctacgcgtatccagaaccctgatcctgccgtgtaccagctgcgggatagcaagagcagcgacaagagcgtgtgtctgttcaccgacttcgacagccagaccaacgtgtcccagagcaaggactccgacgtgtacatcaccgataagaccgtgctggacatgcggagcatggacttcaagagcaactccgccgtggcctggtccaacaagtccgatttcgcctgcgccaacgccttcaacaacagcattatccccgaggacacattcttcccaagccccgagagcagctgcggtacccagagttttgggttgttggaccctaaattgtgctatctgttggacggaatcctgttcatttacggagtgatcctgaccgcattgttcctgcgggttaagttttccagatccgcagacgcacccgcttaccaacaagggcagaaccaactctacaatgaacttaatttggggcggagggaagagtacgacgttctggacaaaaggaggggacgagatcccgagatgggcggaaagcctcagcgaaggaagaatccgcaagaggggctttataacgaactccagaaagataaaatggcagaagcctatagtgagattgggatgaagggagaaaggaggaggggtaaaggtcacgatgggttgtaccaaggattgagcacagccactaaagatacctatgatgcgctccacatgcaggccctgccgccaaga

SEQ ID NO: 2291 - DNA, 2889 bp, Artificial Sequence
  Synthetic Polynucloetide
atggccttaccagtgaccgccttgctcctgccgctggccttgctgctccacgccgccaggccggaagtgcagctggttgaatctggcggaggactggttcagcctggcggatctctgagactgtcttgtgccgccagcggcttcagcttcagcgacttttggatgagctgggtccgacaggcccctggcaaaggacttgaatgggtcgccacaatcagccaggccggcagcgagaaggactacgtggactctgtgaagggcagattcaccatcagccgggacaacgccaagaagtccctgtacctccagatgaacagcctgagagccgaggacaccgccgtgtactattgtgcctctggcgtgtacagcttcgactacagaggccagggcaccctggtcacagtctcttctggtaccggcggaggcggatctggcggcggaggtagcggtggcggaggatctgaattcctgcctgttctgacacagcctccatctgcctctggcacacctggacagagagtgaccatcagctgtagcggcagaagcagcaacatcggcagcaacagcgtgaactggtacagacagcttcctggcgctgcccctaagctgctgatctacagcaacaaccagcggcctcctggcgtgccagtcagattttctggcagcaagagcggcacaagcgccagcctggctatttctggactccagtctgaggacgaggccacctactactgtgccacctgggacgacaacctgaacgtgcactacgtgttcggcaccggcaccaaagtgacagtgcttggaagtagactcgaggacctgaagaacgtgttcccacctgaggtggccgtgttcgagcctagcgaggccgagatcagccacacccagaaagccaccctcgtgtgcctggctaccggcttctaccccgaccatgtggaactgtcttggtgggtcaacggcaaagaggtgcacagcggcgtgtctaccgacccccagccactgaaagaacagcccgccctgaacgacagccggtactgcctgagcagcagactgagagtgtccgccaccttctggcagaacccccggaaccacttcagatgccaggtgcagttctacggcctgagcgagaacgacgagtggacccaggacagagccaagcccgtgacccagatcgtgtctgccgaagcctggggcagagccgattgcggatcccagagcttcggcctgctggaccccaagctgtgctacctgctggatggcatcctgttcatctacggcgtgatcctgaccgccctgttcctgagagtgaagttcagcagaagcgccgacgcccctgcctaccagcagggacagaaccaactgtacaacgagctgaacctgggcagacgggaagagtacgacgtgctggacaagcggagaggcagggaccctgagatgggcggaaagccccagcggagaaagaacccccaggaaggactgtataacgaactccagaaagacaagatggccgaagcctacagcgagatcggcatgaagggcgagcggagaagaggcaagggccacgatggcctgtaccagggcctgagcaccgccaccaaggacacctatgacgccctgcacatgcaggccctgcctccaagaagggccaagcgatctggatctggagcaacaaacttctcactactcaaacaagcaggtgacgtggaggagaatcccgggcctactagtatggactggatttggcgcatccttttccttgtcggcgctgctaccggcgcgcattccttcgaacttgaaatggctcaggtgcagctggtgcagagcggagccgaagtgaagaaacctggcagcagcgtgaaggtgtcctgcaaagcttctggcggcaccttcagcagctacgccatctcttgggttcgacaggcccctggacaaggactggaatggatgggcagaatcatccccatcctgggaatcgccaactacgcccagaaattccagggcagagtgacaatcaccgccgacaagagcaccagcaccgcctacatggaactgagcagcctgagaagcgaggacaccgccgtgtactattgtgcaagaggcggctactacagccacgacatgtggagcgaagattggggccagggcacactggtcacagtgtcatctacgcgtatccagaaccctgatcctgccgtgtaccagctgcgggatagcaagagcagcgacaagagcgtgtgtctgttcaccgacttcgacagccagaccaacgtgtcccagagcaaggactccgacgtgtacatcaccgataagaccgtgctggacatgcggagcatggacttcaagagcaactccgccgtggcctggtccaacaagtccgatttcgcctgcgccaacgccttcaacaacagcattatccccgaggacacattcttcccaagccccgagagcagctgcggtacccagagttttgggttgttggaccctaaattgtgctatctgttggacggaatcctgttcatttacggagtgatcctgaccgcattgttcctgcgggttaagttttccagatccgcagacgcacccgcttaccaacaagggcagaaccaactctacaatgaacttaatttggggcggagggaagagtacgacgttctggacaaaaggaggggacgagatcccgagatgggcggaaagcctcagcgaaggaagaatccgcaagaggggctttataacgaactccagaaagataaaatggcagaagcctatagtgagattgggatgaagggagaaaggaggaggggtaaaggtcacgatgggttgtaccaaggattgagcacagccactaaagatacctatgatgcgctccacatgcaggccctgccgccaaga

SEQ ID NO: 2292 - DNA, 2871 bp, Artificial Sequence
  Synthetic Polynucloetide
atggccttaccagtgaccgccttgctcctgccgctggccttgctgctccacgccgccaggccggaagtgcagctggttgaatctggcggaggactggttcagcctggcggatctctgagactgtcttgtgccgccagcggcttcagcttcagcgacttttggatgagctgggtccgacaggcccctggcaaaggacttgaatgggtcgccacaatcagccaggccggcagcgagaaggactacgtggactctgtgaagggcagattcaccatcagccgggacaacgccaagaagtccctgtacctccagatgaacagcctgagagccgaggacaccgccgtgtactattgtgcctctggcgtgtacagcttcgactacagaggccagggcaccctggtcacagtctcttctggtaccggcggaggcggatctggcggcggaggtagcggtggcggaggatctgaattcgacttcgtgatgacacagagccctgatagcctggccgtgtctctcggcgagcgagtgaccatgagctgcaagtctagccagagcctgctgaacagcggcaaccagaagaactacctgacctggtatcagcagaagcccggccagcctcctaagctgctgatctactgggccagcaccagagaaagcggcgtgcccgatagattttctggctctggcagcggcaccgacttcaccctgacaatttctagcctgcaagccgaggacgtggccgtgtactactgccagaacgactacagctacccctacaccttcggccagggcaccaagctggaaatcaaactcgaggacctgaagaacgtgttcccacctgaggtggccgtgttcgagcctagcgaggccgagatcagccacacccagaaagccaccctcgtgtgcctggctaccggcttctaccccgaccatgtggaactgtcttggtgggtcaacggcaaagaggtgcacagcggcgtgtctaccgacccccagccactgaaagaacagcccgccctgaacgacagccggtactgcctgagcagcagactgagagtgtccgccaccttctggcagaacccccggaaccacttcagatgccaggtgcagttctacggcctgagcgagaacgacgagtggacccaggacagagccaagcccgtgacccagatcgtgtctgccgaagcctggggcagagccgattgcggatcccagagcttcggcctgctggaccccaagctgtgctacctgctggatggcatcctgttcatctacggcgtgatcctgaccgccctgttcctgagagtgaagttcagcagaagcgccgacgcccctgcctaccagcagggacagaaccaactgtacaacgagctgaacctgggcagacgggaagagtacgacgtgctggacaagcggagaggcagggaccctgagatgggcggaaagccccagcggagaaagaacccccaggaaggactgtataacgaactccagaaagacaagatggccgaagcctacagcgagatcggcatgaagggcgagcggagaagaggcaagggccacgatggcctgtaccagggcctgagcaccgccaccaaggacacctatgacgccctgcacatgcaggccctgcctccaagaagggccaagcgatctggatctggagcaacaaacttctcactactcaaacaagcaggtgacgtggaggagaatcccgggcctactagtatggactggatttggcgcatccttttccttgtcggcgctgctaccggcgcgcattccttcgaagaagtgcaactggttcagagcggagccgagctgaagaaacctggggccagcgtgaaggtgtcctgtaaagccagcggctacacctttaccgactactacatgaaatgggtccgacaggccccaggccagggactcgaatggatcggcgatattatccccagcaacggggccaccttctacaaccagaaattcaagggccgcgtgaccatcaccgtggacaagagcacaagcaccgcctacatggaactgagcagcctgagaagcgaggacaccgccgtgtattattgcgccagaagccatctgctgcgggccagttggttcgcctattggggacagggaaccctggtcaccgttagctctacgcgtatccagaaccctgatcctgccgtgtaccagctgcgggatagcaagagcagcgacaagagcgtgtgtctgttcaccgacttcgacagccagaccaacgtgtcccagagcaaggactccgacgtgtacatcaccgataagaccgtgctggacatgcggagcatggacttcaagagcaactccgccgtggcctggtccaacaagtccgatttcgcctgcgccaacgccttcaacaacagcattatccccgaggacacattcttcccaagccccgagagcagctgcggtacccagagttttgggttgttggaccctaaattgtgctatctgttggacggaatcctgttcatttacggagtgatcctgaccgcattgttcctgcgggttaagttttccagatccgcagacgcacccgcttaccaacaagggcagaaccaactctacaatgaacttaatttggggcggagggaagagtacgacgttctggacaaaaggaggggacgagatcccgagatgggcggaaagcctcagcgaaggaagaatccgcaagaggggctttataacgaactccagaaagataaaatggcagaagcctatagtgagattgggatgaagggagaaaggaggaggggtaaaggtcacgatgggttgtaccaaggattgagcacagccactaaagatacctatgatgcgctccacatgcaggccctgccgccaaga

SEQ ID NO: 2293 - DNA, 2871 bp, Artificial Sequence
  Synthetic Polynucloetide
atggccttaccagtgaccgccttgctcctgccgctggccttgctgctccacgccgccaggccggaagtgcagctggttgaatctggcggaggactggttcagcctggcggatctctgagactgtcttgtgccgccagcggcttcagcttcagcgacttttggatgagctgggtccgacaggcccctggcaaaggacttgaatgggtcgccacaatcagccaggccggcagcgagaaggactacgtggactctgtgaagggcagattcaccatcagccgggacaacgccaagaagtccctgtacctccagatgaacagcctgagagccgaggacaccgccgtgtactattgtgcctctggcgtgtacagcttcgactacagaggccagggcaccctggtcacagtctcttctggtaccggcggaggcggatctggcggcggaggtagcggtggcggaggatctgaattcgacttcgtgatgacacagagccctgatagcctggccgtgtctctcggcgagcgagtgaccatgagctgcaagtctagccagagcctgctgaacagcggcaaccagaagaactacctgacctggtatcagcagaagcccggccagcctcctaagctgctgatctactgggccagcaccagagaaagcggcgtgcccgatagattttctggctctggcagcggcaccgacttcaccctgacaatttctagcctgcaagccgaggacgtggccgtgtactactgccagaacgactacagctacccctacaccttcggccagggcaccaagctggaaatcaaactcgaggacctgaagaacgtgttcccacctgaggtggccgtgttcgagcctagcgaggccgagatcagccacacccagaaagccaccctcgtgtgcctggctaccggcttctaccccgaccatgtggaactgtcttggtgggtcaacggcaaagaggtgcacagcggcgtgtctaccgacccccagccactgaaagaacagcccgccctgaacgacagccggtactgcctgagcagcagactgagagtgtccgccaccttctggcagaacccccggaaccacttcagatgccaggtgcagttctacggcctgagcgagaacgacgagtggacccaggacagagccaagcccgtgacccagatcgtgtctgccgaagcctggggcagagccgattgcggatcccagagcttcggcctgctggaccccaagctgtgctacctgctggatggcatcctgttcatctacggcgtgatcctgaccgccctgttcctgagagtgaagttcagcagaagcgccgacgcccctgcctaccagcagggacagaaccaactgtacaacgagctgaacctgggcagacgggaagagtacgacgtgctggacaagcggagaggcagggaccctgagatgggcggaaagccccagcggagaaagaacccccaggaaggactgtataacgaactccagaaagacaagatggccgaagcctacagcgagatcggcatgaagggcgagcggagaagaggcaagggccacgatggcctgtaccagggcctgagcaccgccaccaaggacacctatgacgccctgcacatgcaggccctgcctccaagaagggccaagcgatctggatctggagcaacaaacttctcactactcaaacaagcaggtgacgtggaggagaatcccgggcctactagtatggactggatttggcgcatccttttccttgtcggcgctgctaccggcgcgcattccttcgaacaagtgcaactggttcagagcggagccgagctgaagaaacctggggccagcgtgaaggtgtcctgtaaagccagcggctacacctttaccgactactacatgaaatgggtccgacaggccccaggccagggactcgaatggatcggcgatattatccccagcaacggggccaccttctacaaccagaaattcaagggccgcgtgaccatcaccgtggacaagagcacaagcaccgcctacatggaactgagcagcctgagaagcgaggacaccgccgtgtattattgcgccagaagccatctgctgcgggccagttggttcgcctattggggacagggaaccctggtcaccgttagctctacgcgtatccagaaccctgatcctgccgtgtaccagctgcgggatagcaagagcagcgacaagagcgtgtgtctgttcaccgacttcgacagccagaccaacgtgtcccagagcaaggactccgacgtgtacatcaccgataagaccgtgctggacatgcggagcatggacttcaagagcaactccgccgtggcctggtccaacaagtccgatttcgcctgcgccaacgccttcaacaacagcattatccccgaggacacattcttcccaagccccgagagcagctgcggtacccagagttttgggttgttggaccctaaattgtgctatctgttggacggaatcctgttcatttacggagtgatcctgaccgcattgttcctgcgggttaagttttccagatccgcagacgcacccgcttaccaacaagggcagaaccaactctacaatgaacttaatttggggcggagggaagagtacgacgttctggacaaaaggaggggacgagatcccgagatgggcggaaagcctcagcgaaggaagaatccgcaagaggggctttataacgaactccagaaagataaaatggcagaagcctatagtgagattgggatgaagggagaaaggaggaggggtaaaggtcacgatgggttgtaccaaggattgagcacagccactaaagatacctatgatgcgctccacatgcaggccctgccgccaaga

SEQ ID NO: 2294 - DNA, 2841 bp, Artificial Sequence
  Synthetic Polynucloetide
atggccttaccagtgaccgccttgctcctgccgctggccttgctgctccacgccgccaggccggaagtgcagctggttgaatctggcggaggactggttcagcctggcggatctctgagactgtcttgtgccgccagcggcttcagcttcagcgacttttggatgagctgggtccgacaggcccctggcaaaggacttgaatgggtcgccacaatcagccaggccggcagcgagaaggactacgtggactctgtgaagggcagattcaccatcagccgggacaacgccaagaagtccctgtacctccagatgaacagcctgagagccgaggacaccgccgtgtactattgtgcctctggcgtgtacagcttcgactacagaggccagggcaccctggtcacagtctcttctggtaccggcggaggcggatctggcggcggaggtagcggtggcggaggatctgaattcgacgtgcagatcacacagagccctagctacctggctgcctctcctggcgagacaatcaccatcaactgtcgggccagcaagagcatcagcaaggacctggcctggtatcaagagaagcccggcaagaccaacaagctgctgatctacagcggcagcacactccagtctggcatccccagcagattttccggctctggcagcggcaccgatttcaccctgaccataagcagcctggaacctgaggacttcgccatgtactactgccagcagcacaacaagtacccctacacctttggcggaggcaccaagctggaaatcaagagactcgaggacctgaagaacgtgttcccacctgaggtggccgtgttcgagcctagcgaggccgagatcagccacacccagaaagccaccctcgtgtgcctggctaccggcttctaccccgaccatgtggaactgtcttggtgggtcaacggcaaagaggtgcacagcggcgtgtctaccgacccccagccactgaaagaacagcccgccctgaacgacagccggtactgcctgagcagcagactgagagtgtccgccaccttctggcagaacccccggaaccacttcagatgccaggtgcagttctacggcctgagcgagaacgacgagtggacccaggacagagccaagcccgtgacccagatcgtgtctgccgaagcctggggcagagccgattgcggatcccagagcttcggcctgctggaccccaagctgtgctacctgctggatggcatcctgttcatctacggcgtgatcctgaccgccctgttcctgagagtgaagttcagcagaagcgccgacgcccctgcctaccagcagggacagaaccaactgtacaacgagctgaacctgggcagacgggaagagtacgacgtgctggacaagcggagaggcagggaccctgagatgggcggaaagccccagcggagaaagaacccccaggaaggactgtataacgaactccagaaagacaagatggccgaagcctacagcgagatcggcatgaagggcgagcggagaagaggcaagggccacgatggcctgtaccagggcctgagcaccgccaccaaggacacctatgacgccctgcacatgcaggccctgcctccaagaagggccaagcgatctggatctggagcaacaaacttctcactactcaaacaagcaggtgacgtggaggagaatcccgggcctactagtatggactggatttggcgcatccttttccttgtcggcgctgctaccggcgcgcattccttcgaacaagttcaactgcaacagcctggggccgagcttgttagacctggcgcttctgtgaagctgagctgcaaggccagcggctacaccttcaccagctactggatgaactgggtcaagcagcggcctgaccagggcctcgaatggatcggcagaatcgacccctacgacagcgagacacactacaaccagaagttcaaggacaaggccatcctgaccgtggacaagagcagctccaccgcctacatgcaactgagcagcctgacctctgaggatagcgccgtgtactattgcgccagaggcaactgggacgactattggggccagggcacaaccctgacagtgtctagtacgcgtatccagaaccctgatcctgccgtgtaccagctgcgggatagcaagagcagcgacaagagcgtgtgtctgttcaccgacttcgacagccagaccaacgtgtcccagagcaaggactccgacgtgtacatcaccgataagaccgtgctggacatgcggagcatggacttcaagagcaactccgccgtggcctggtccaacaagtccgatttcgcctgcgccaacgccttcaacaacagcattatccccgaggacacattcttcccaagccccgagagcagctgcggtacccagagttttgggttgttggaccctaaattgtgctatctgttggacggaatcctgttcatttacggagtgatcctgaccgcattgttcctgcgggttaagttttccagatccgcagacgcacccgcttaccaacaagggcagaaccaactctacaatgaacttaatttggggcggagggaagagtacgacgttctggacaaaaggaggggacgagatcccgagatgggcggaaagcctcagcgaaggaagaatccgcaagaggggctttataacgaactccagaaagataaaatggcagaagcctatagtgagattgggatgaagggagaaaggaggaggggtaaaggtcacgatgggttgtaccaaggattgagcacagccactaaagatacctatgatgcgctccacatgcaggccctgccgccaaga

SEQ ID NO: 2295 - DNA, 2847 bp, Artificial Sequence
  Synthetic Polynucloetide
atggccttaccagtgaccgccttgctcctgccgctggccttgctgctccacgccgccaggccggaagtgcagctggttgaatctggcggaggactggttcagcctggcggatctctgagactgtcttgtgccgccagcggcttcagcttcagcgacttttggatgagctgggtccgacaggcccctggcaaaggacttgaatgggtcgccacaatcagccaggccggcagcgagaaggactacgtggactctgtgaagggcagattcaccatcagccgggacaacgccaagaagtccctgtacctccagatgaacagcctgagagccgaggacaccgccgtgtactattgtgcctctggcgtgtacagcttcgactacagaggccagggcaccctggtcacagtctcttctggtaccggcggaggcggatctggcggcggaggtagcggtggcggaggatctgaattcgagatcgtgctgacacagagccctaccagcatgacagcctctccaggcgagcaagtgaccatcacctgtagagccagcagcagcatcaactacatgcactggtatcagcagaagcctggcgcaagccccagaccttggatctacgagacaagcaagctggcctccggcgtgcccgatagattttctggatctgccagcggcaccagctacagcctgaccatcaacaacatggaagccgaggacgccgccacctactactgccagcagtggaattacccctcctggacctttggcggaggcaccaagctggaacttaaactcgaggacctgaagaacgtgttcccacctgaggtggccgtgttcgagcctagcgaggccgagatcagccacacccagaaagccaccctcgtgtgcctggctaccggcttctaccccgaccatgtggaactgtcttggtgggtcaacggcaaagaggtgcacagcggcgtgtctaccgacccccagccactgaaagaacagcccgccctgaacgacagccggtactgcctgagcagcagactgagagtgtccgccaccttctggcagaacccccggaaccacttcagatgccaggtgcagttctacggcctgagcgagaacgacgagtggacccaggacagagccaagcccgtgacccagatcgtgtctgccgaagcctggggcagagccgattgcggatcccagagcttcggcctgctggaccccaagctgtgctacctgctggatggcatcctgttcatctacggcgtgatcctgaccgccctgttcctgagagtgaagttcagcagaagcgccgacgcccctgcctaccagcagggacagaaccaactgtacaacgagctgaacctgggcagacgggaagagtacgacgtgctggacaagcggagaggcagggaccctgagatgggcggaaagccccagcggagaaagaacccccaggaaggactgtataacgaactccagaaagacaagatggccgaagcctacagcgagatcggcatgaagggcgagcggagaagaggcaagggccacgatggcctgtaccagggcctgagcaccgccaccaaggacacctatgacgccctgcacatgcaggccctgcctccaagaagggccaagcgatctggatctggagcaacaaacttctcactactcaaacaagcaggtgacgtggaggagaatcccgggcctactagtatggactggatttggcgcatccttttccttgtcggcgctgctaccggcgcgcattccttcgaagaagtgcagctcgttgagtctggtggcggactggttcagcctggaagaagcctgaagctgagctgtgccgccagcggcttcaccttcagcgactacaatatggcctgggtccgacaggcccctaagaaaggactggaatgggtcgccaccatcctgtacgatggcggcagaacctactaccggggcagcgtgaagggcagattcaccatcagcagagacaacgccaagagcaccctgtacctgcggatggactctctgagaagcgaggataccgccacatattactgtgccacacacagccggggcaccgactactttgattattggggccagggcgtgatggttaccgtgtctagtacgcgtatccagaaccctgatcctgccgtgtaccagctgcgggatagcaagagcagcgacaagagcgtgtgtctgttcaccgacttcgacagccagaccaacgtgtcccagagcaaggactccgacgtgtacatcaccgataagaccgtgctggacatgcggagcatggacttcaagagcaactccgccgtggcctggtccaacaagtccgatttcgcctgcgccaacgccttcaacaacagcattatccccgaggacacattcttcccaagccccgagagcagctgcggtacccagagttttgggttgttggaccctaaattgtgctatctgttggacggaatcctgttcatttacggagtgatcctgaccgcattgttcctgcgggttaagttttccagatccgcagacgcacccgcttaccaacaagggcagaaccaactctacaatgaacttaatttggggcggagggaagagtacgacgttctggacaaaaggaggggacgagatcccgagatgggcggaaagcctcagcgaaggaagaatccgcaagaggggctttataacgaactccagaaagataaaatggcagaagcctatagtgagattgggatgaagggagaaaggaggaggggtaaaggtcacgatgggttgtaccaaggattgagcacagccactaaagatacctatgatgcgctccacatgcaggccctgccgccaaga

SEQ ID NO: 2296 - DNA, 2874 bp, Artificial Sequence
  Synthetic Polynucloetide
atggccttaccagtgaccgccttgctcctgccgctggccttgctgctccacgccgccaggccggaagtgcagctggttgaatctggcggaggactggttcagcctggcggatctctgagactgtcttgtgccgccagcggcttcagcttcagcgacttttggatgagctgggtccgacaggcccctggcaaaggacttgaatgggtcgccacaatcagccaggccggcagcgagaaggactacgtggactctgtgaagggcagattcaccatcagccgggacaacgccaagaagtccctgtacctccagatgaacagcctgagagccgaggacaccgccgtgtactattgtgcctctggcgtgtacagcttcgactacagaggccagggcaccctggtcacagtctcttctggtaccggcggaggcggatctggcggcggaggtagcggtggcggaggatctgaattcgacatcgtgatgacacagagcccttctagcctggccgtgtctgagggcgagacagtgaccatcaactgcaagagcagccagagcttcctgtctagcggcgacggcaagaattacgtggcctggtatcagtacaagcccggacagagccccaagctgctgatctactgggccagcacaagacagagcggcgtgcccgatagattcatcggctctggcagcggcaccgacttcaccctgacaatctctacagtgcaggccgaggacctggctatctactactgccagcagtattacgacacccctctgacctttggctccggcaccaagctggaaatcaaactcgaggacctgaagaacgtgttcccacctgaggtggccgtgttcgagcctagcgaggccgagatcagccacacccagaaagccaccctcgtgtgcctggctaccggcttctaccccgaccatgtggaactgtcttggtgggtcaacggcaaagaggtgcacagcggcgtgtctaccgacccccagccactgaaagaacagcccgccctgaacgacagccggtactgcctgagcagcagactgagagtgtccgccaccttctggcagaacccccggaaccacttcagatgccaggtgcagttctacggcctgagcgagaacgacgagtggacccaggacagagccaagcccgtgacccagatcgtgtctgccgaagcctggggcagagccgattgcggatcccagagcttcggcctgctggaccccaagctgtgctacctgctggatggcatcctgttcatctacggcgtgatcctgaccgccctgttcctgagagtgaagttcagcagaagcgccgacgcccctgcctaccagcagggacagaaccaactgtacaacgagctgaacctgggcagacgggaagagtacgacgtgctggacaagcggagaggcagggaccctgagatgggcggaaagccccagcggagaaagaacccccaggaaggactgtataacgaactccagaaagacaagatggccgaagcctacagcgagatcggcatgaagggcgagcggagaagaggcaagggccacgatggcctgtaccagggcctgagcaccgccaccaaggacacctatgacgccctgcacatgcaggccctgcctccaagaagggccaagcgatctggatctggagcaacaaacttctcactactcaaacaagcaggtgacgtggaggagaatcccgggcctactagtatggactggatttggcgcatccttttccttgtcggcgctgctaccggcgcgcattccttcgaagaagtgaagctgcaagagtctggccccagcctggtgcagagtagccaaacactgagcctgacctgtaccgtgtccggctttagcctgaccagctaccacatccactgggtccgacagacccctggcaaaggactggaatggatgggcgtgatgtggagcgacggcgacaccagctataacagcgccctgaagtcccggctgagcatcagcagagatacaagccagagccaggtgttcctgaagatgaacagcctccagaccgaggacaccgccacctactattgtgccagaggctactacagcagctacctgtacctttggttcgcctattggggccagggcaccctggttacagtcagctctacgcgtatccagaaccctgatcctgccgtgtaccagctgcgggatagcaagagcagcgacaagagcgtgtgtctgttcaccgacttcgacagccagaccaacgtgtcccagagcaaggactccgacgtgtacatcaccgataagaccgtgctggacatgcggagcatggacttcaagagcaactccgccgtggcctggtccaacaagtccgatttcgcctgcgccaacgccttcaacaacagcattatccccgaggacacattcttcccaagccccgagagcagctgcggtacccagagttttgggttgttggaccctaaattgtgctatctgttggacggaatcctgttcatttacggagtgatcctgaccgcattgttcctgcgggttaagttttccagatccgcagacgcacccgcttaccaacaagggcagaaccaactctacaatgaacttaatttggggcggagggaagagtacgacgttctggacaaaaggaggggacgagatcccgagatgggcggaaagcctcagcgaaggaagaatccgcaagaggggctttataacgaactccagaaagataaaatggcagaagcctatagtgagattgggatgaagggagaaaggaggaggggtaaaggtcacgatgggttgtaccaaggattgagcacagccactaaagatacctatgatgcgctccacatgcaggccctgccgccaaga

SEQ ID NO: 2297 - DNA, 2886 bp, Artificial Sequence
  Synthetic Polynucloetide
atggccttaccagtgaccgccttgctcctgccgctggccttgctgctccacgccgccaggccggaagtgcagctggttgaatctggcggaggactggttcagcctggcggatctctgagactgtcttgtgccgccagcggcttcagcttcagcgacttttggatgagctgggtccgacaggcccctggcaaaggacttgaatgggtcgccacaatcagccaggccggcagcgagaaggactacgtggactctgtgaagggcagattcaccatcagccgggacaacgccaagaagtccctgtacctccagatgaacagcctgagagccgaggacaccgccgtgtactattgtgcctctggcgtgtacagcttcgactacagaggccagggcaccctggtcacagtctcttctggtaccggcggaggcggatctggcggcggaggtagcggtggcggaggatctgaattcgacgtgctgatgacccagacacctgtgtctctgccagtgtctctcggaggccaggtgtccatctcctgtagaagcagccagagcctggtgcactccgacggcgatacctacctgcactggtatctccagaagcctggacagagccctcagctcctgatctaccgggtgtccaacagattcagcggcgtgcccgatagattttccggcagcggctctggcaccgacttcaccctgaagatcagcagagtggaacccgaggacctgggcctgtactactgtctccagaccacacacttcccaccttggacctttggcggaggcaccaagctggaaatgaaactcgaggacctgaagaacgtgttcccacctgaggtggccgtgttcgagcctagcgaggccgagatcagccacacccagaaagccaccctcgtgtgcctggctaccggcttctaccccgaccatgtggaactgtcttggtgggtcaacggcaaagaggtgcacagcggcgtgtctaccgacccccagccactgaaagaacagcccgccctgaacgacagccggtactgcctgagcagcagactgagagtgtccgccaccttctggcagaacccccggaaccacttcagatgccaggtgcagttctacggcctgagcgagaacgacgagtggacccaggacagagccaagcccgtgacccagatcgtgtctgccgaagcctggggcagagccgattgcggatcccagagcttcggcctgctggaccccaagctgtgctacctgctggatggcatcctgttcatctacggcgtgatcctgaccgccctgttcctgagagtgaagttcagcagaagcgccgacgcccctgcctaccagcagggacagaaccaactgtacaacgagctgaacctgggcagacgggaagagtacgacgtgctggacaagcggagaggcagggaccctgagatgggcggaaagccccagcggagaaagaacccccaggaaggactgtataacgaactccagaaagacaagatggccgaagcctacagcgagatcggcatgaagggcgagcggagaagaggcaagggccacgatggcctgtaccagggcctgagcaccgccaccaaggacacctatgacgccctgcacatgcaggccctgcctccaagaagggccaagcgatctggatctggagcaacaaacttctcactactcaaacaagcaggtgacgtggaggagaatcccgggcctactagtatggactggatttggcgcatccttttccttgtcggcgctgctaccggcgcgcattccttcgaacaggttcagctccagcagtctggacccgagcttagaaggccaggatctagcgtcagactgagctgcaaggccagcggctaccggatcaaggacttcctgatccactggattaagaacagacccgagcacggcctggaatggatcggatggattgaccctgaggacggcgagactaagtacgcccagaagttccagaccaaggccacactgaccgccgacacctctagcaacaccgcctacatgcaactgagcagcctgaccagcgaggacaccgccacctacttttgtgctagatggggcgacgtgtactacggcctgatgagaggccatgtgatggatgcctggggccagggaacaagcgtgacagtctcttctacgcgtatccagaaccctgatcctgccgtgtaccagctgcgggatagcaagagcagcgacaagagcgtgtgtctgttcaccgacttcgacagccagaccaacgtgtcccagagcaaggactccgacgtgtacatcaccgataagaccgtgctggacatgcggagcatggacttcaagagcaactccgccgtggcctggtccaacaagtccgatttcgcctgcgccaacgccttcaacaacagcattatccccgaggacacattcttcccaagccccgagagcagctgcggtacccagagttttgggttgttggaccctaaattgtgctatctgttggacggaatcctgttcatttacggagtgatcctgaccgcattgttcctgcgggttaagttttccagatccgcagacgcacccgcttaccaacaagggcagaaccaactctacaatgaacttaatttggggcggagggaagagtacgacgttctggacaaaaggaggggacgagatcccgagatgggcggaaagcctcagcgaaggaagaatccgcaagaggggctttataacgaactccagaaagataaaatggcagaagcctatagtgagattgggatgaagggagaaaggaggaggggtaaaggtcacgatgggttgtaccaaggattgagcacagccactaaagatacctatgatgcgctccacatgcaggccctgccgccaaga

SEQ ID NO: 2298 - DNA, 2871 bp, Artificial Sequence
  Synthetic Polynucloetide
atggccttaccagtgaccgccttgctcctgccgctggccttgctgctccacgccgccaggccggaagtgcagctggttgaatctggcggaggactggttcagcctggcggatctctgagactgtcttgtgccgccagcggcttcagcttcagcgacttttggatgagctgggtccgacaggcccctggcaaaggacttgaatgggtcgccacaatcagccaggccggcagcgagaaggactacgtggactctgtgaagggcagattcaccatcagccgggacaacgccaagaagtccctgtacctccagatgaacagcctgagagccgaggacaccgccgtgtactattgtgcctctggcgtgtacagcttcgactacagaggccagggcaccctggtcacagtctcttctggtaccggcggaggcggatctggcggcggaggtagcggtggcggaggatctgaattcgacatcgtgatgacacagagccccgccacactgtcactgtctccaggcgaaagagccacactgagctgtcggagcagcaagagcctccagaacgtgaacggcaacacctacctgtactggttccagcagaagcccggccagtctcctcagctcctgatctacagaatgagcaacctgaacagcggcgtgcccgacagattttctggcagcggaagcggcaccgagttcaccctgaccataagcagcctggaacctgaggacttcgccgtgtactactgtatgcagcacctggaataccccatcaccttcggagccggcaccaagctggaaatcaaactcgaggacctgaagaacgtgttcccacctgaggtggccgtgttcgagcctagcgaggccgagatcagccacacccagaaagccaccctcgtgtgcctggctaccggcttctaccccgaccatgtggaactgtcttggtgggtcaacggcaaagaggtgcacagcggcgtgtctaccgacccccagccactgaaagaacagcccgccctgaacgacagccggtactgcctgagcagcagactgagagtgtccgccaccttctggcagaacccccggaaccacttcagatgccaggtgcagttctacggcctgagcgagaacgacgagtggacccaggacagagccaagcccgtgacccagatcgtgtctgccgaagcctggggcagagccgattgcggatcccagagcttcggcctgctggaccccaagctgtgctacctgctggatggcatcctgttcatctacggcgtgatcctgaccgccctgttcctgagagtgaagttcagcagaagcgccgacgcccctgcctaccagcagggacagaaccaactgtacaacgagctgaacctgggcagacgggaagagtacgacgtgctggacaagcggagaggcagggaccctgagatgggcggaaagccccagcggagaaagaacccccaggaaggactgtataacgaactccagaaagacaagatggccgaagcctacagcgagatcggcatgaagggcgagcggagaagaggcaagggccacgatggcctgtaccagggcctgagcaccgccaccaaggacacctatgacgccctgcacatgcaggccctgcctccaagaagggccaagcgatctggatctggagcaacaaacttctcactactcaaacaagcaggtgacgtggaggagaatcccgggcctactagtatggactggatttggcgcatccttttccttgtcggcgctgctaccggcgcgcattccttcgaagaagtgcaactggttgaatctggcggcggactggttaagcctggcggatctctgaagctgagctgtgccgccagcggctacacctttaccagctacgtgatgcactgggtccgacaggcccctggcaaaggacttgagtggatcggctacatcaacccctacaacgatggcaccaagtacaacgagaagttccagggcagagtgaccatcagctccgacaagagcatcagcaccgcctacatggaactgagcagcctgagaagcgaggataccgccatgtactattgcgccagaggcacctactactacggcaccagagtgttcgactactggggccagggaaccctggtcacagtctcttctacgcgtatccagaaccctgatcctgccgtgtaccagctgcgggatagcaagagcagcgacaagagcgtgtgtctgttcaccgacttcgacagccagaccaacgtgtcccagagcaaggactccgacgtgtacatcaccgataagaccgtgctggacatgcggagcatggacttcaagagcaactccgccgtggcctggtccaacaagtccgatttcgcctgcgccaacgccttcaacaacagcattatccccgaggacacattcttcccaagccccgagagcagctgcggtacccagagttttgggttgttggaccctaaattgtgctatctgttggacggaatcctgttcatttacggagtgatcctgaccgcattgttcctgcgggttaagttttccagatccgcagacgcacccgcttaccaacaagggcagaaccaactctacaatgaacttaatttggggcggagggaagagtacgacgttctggacaaaaggaggggacgagatcccgagatgggcggaaagcctcagcgaaggaagaatccgcaagaggggctttataacgaactccagaaagataaaatggcagaagcctatagtgagattgggatgaagggagaaaggaggaggggtaaaggtcacgatgggttgtaccaaggattgagcacagccactaaagatacctatgatgcgctccacatgcaggccctgccgccaaga

SEQ ID NO: 2299 - DNA, 2859 bp, Artificial Sequence
  Synthetic Polynucloetide
atggccttaccagtgaccgccttgctcctgccgctggccttgctgctccacgccgccaggccggaagtgcagctggttgaatctggcggaggactggttcagcctggcggatctctgagactgtcttgtgccgccagcggcttcagcttcagcgacttttggatgagctgggtccgacaggcccctggcaaaggacttgaatgggtcgccacaatcagccaggccggcagcgagaaggactacgtggactctgtgaagggcagattcaccatcagccgggacaacgccaagaagtccctgtacctccagatgaacagcctgagagccgaggacaccgccgtgtactattgtgcctctggcgtgtacagcttcgactacagaggccagggcaccctggtcacagtctcttctggtaccggcggaggcggatctggcggcggaggtagcggtggcggaggatctgaattcgacatccagatgacacagagccctagcagcctgtctgccagcgtgggagacagagtgaccatcacatgcaaggccagcgaccacatcaacaactggctggcctggtatcagcagaagcctggacaggcccctaagctgctgatctacggcgctaccacactggaaacaggcgtgcccagcagattttctggcagcggctctggcaccgactacaccctgacaatatccagcctccagcctgaggacttcgccacctactactgtcagcagagctggaacaccccttggacattcggccagggcaccaagctggaaatcaagagactcgaggacctgaagaacgtgttcccacctgaggtggccgtgttcgagcctagcgaggccgagatcagccacacccagaaagccaccctcgtgtgcctggctaccggcttctaccccgaccatgtggaactgtcttggtgggtcaacggcaaagaggtgcacagcggcgtgtctaccgacccccagccactgaaagaacagcccgccctgaacgacagccggtactgcctgagcagcagactgagagtgtccgccaccttctggcagaacccccggaaccacttcagatgccaggtgcagttctacggcctgagcgagaacgacgagtggacccaggacagagccaagcccgtgacccagatcgtgtctgccgaagcctggggcagagccgattgcggatcccagagcttcggcctgctggaccccaagctgtgctacctgctggatggcatcctgttcatctacggcgtgatcctgaccgccctgttcctgagagtgaagttcagcagaagcgccgacgcccctgcctaccagcagggacagaaccaactgtacaacgagctgaacctgggcagacgggaagagtacgacgtgctggacaagcggagaggcagggaccctgagatgggcggaaagccccagcggagaaagaacccccaggaaggactgtataacgaactccagaaagacaagatggccgaagcctacagcgagatcggcatgaagggcgagcggagaagaggcaagggccacgatggcctgtaccagggcctgagcaccgccaccaaggacacctatgacgccctgcacatgcaggccctgcctccaagaagggccaagcgatctggatctggagcaacaaacttctcactactcaaacaagcaggtgacgtggaggagaatcccgggcctactagtatggactggatttggcgcatccttttccttgtcggcgctgctaccggcgcgcattccttcgaacaagttcagcttcaacagcctggcgctgagctggtcaaacctggcgcttctgtgaagatgagctgcaaagccagcggctacgccttcagcagctactggatcaactggatgaagcagaaacccggccagggactcgaatggatcggccaaatctatcccggcgacggcgacaccaactacaacggcaagttcaagggcagagccacactgaccgccgatacctctagcagcacagcctacatgcagctgagcagcctgaccagcgaagatagcgccgtgtacttctgtgcccggtccatcacaacagtcgtgggctgcgctatggactattggggccagggaacaagcgtgaccgtgtctagtacgcgtatccagaaccctgatcctgccgtgtaccagctgcgggatagcaagagcagcgacaagagcgtgtgtctgttcaccgacttcgacagccagaccaacgtgtcccagagcaaggactccgacgtgtacatcaccgataagaccgtgctggacatgcggagcatggacttcaagagcaactccgccgtggcctggtccaacaagtccgatttcgcctgcgccaacgccttcaacaacagcattatccccgaggacacattcttcccaagccccgagagcagctgcggtacccagagttttgggttgttggaccctaaattgtgctatctgttggacggaatcctgttcatttacggagtgatcctgaccgcattgttcctgcgggttaagttttccagatccgcagacgcacccgcttaccaacaagggcagaaccaactctacaatgaacttaatttggggcggagggaagagtacgacgttctggacaaaaggaggggacgagatcccgagatgggcggaaagcctcagcgaaggaagaatccgcaagaggggctttataacgaactccagaaagataaaatggcagaagcctatagtgagattgggatgaagggagaaaggaggaggggtaaaggtcacgatgggttgtaccaaggattgagcacagccactaaagatacctatgatgcgctccacatgcaggccctgccgccaaga

SEQ ID NO: 2300 - DNA, 2865 bp, Artificial Sequence
  Synthetic Polynucloetide
atggccttaccagtgaccgccttgctcctgccgctggccttgctgctccacgccgccaggccggaagtgcagctggttgaatctggcggaggactggttcagcctggcggatctctgagactgtcttgtgccgccagcggcttcagcttcagcgacttttggatgagctgggtccgacaggcccctggcaaaggacttgaatgggtcgccacaatcagccaggccggcagcgagaaggactacgtggactctgtgaagggcagattcaccatcagccgggacaacgccaagaagtccctgtacctccagatgaacagcctgagagccgaggacaccgccgtgtactattgtgcctctggcgtgtacagcttcgactacagaggccagggcaccctggtcacagtctcttctggtaccggcggaggcggatctggcggcggaggtagcggtggcggaggatctgaattccagatcgtgctgtctcagtctcctgccatcctgagcgcttccccaggcgagaaagtgaccatgacctgtagagccagcagcagcgtgtcctacatgcactggtatcagcagaagcccggcagcagccctaagccttggatctacgccaccagcaatctggcctctggcgtgccagccagattttctggctctggcagcggcaccagctacagcttcacaatcagcagagtggaagccgaggacgccgccacctactattgtcagcagtggaccttcaatcctcctaccttcggcggaggcacccggctggaaatcaaaagaacagtggctgctctcgaggacctgaagaacgtgttcccacctgaggtggccgtgttcgagcctagcgaggccgagatcagccacacccagaaagccaccctcgtgtgcctggctaccggcttctaccccgaccatgtggaactgtcttggtgggtcaacggcaaagaggtgcacagcggcgtgtctaccgacccccagccactgaaagaacagcccgccctgaacgacagccggtactgcctgagcagcagactgagagtgtccgccaccttctggcagaacccccggaaccacttcagatgccaggtgcagttctacggcctgagcgagaacgacgagtggacccaggacagagccaagcccgtgacccagatcgtgtctgccgaagcctggggcagagccgattgcggatcccagagcttcggcctgctggaccccaagctgtgctacctgctggatggcatcctgttcatctacggcgtgatcctgaccgccctgttcctgagagtgaagttcagcagaagcgccgacgcccctgcctaccagcagggacagaaccaactgtacaacgagctgaacctgggcagacgggaagagtacgacgtgctggacaagcggagaggcagggaccctgagatgggcggaaagccccagcggagaaagaacccccaggaaggactgtataacgaactccagaaagacaagatggccgaagcctacagcgagatcggcatgaagggcgagcggagaagaggcaagggccacgatggcctgtaccagggcctgagcaccgccaccaaggacacctatgacgccctgcacatgcaggccctgcctccaagaagggccaagcgatctggatctggagcaacaaacttctcactactcaaacaagcaggtgacgtggaggagaatcccgggcctactagtatggactggatttggcgcatccttttccttgtcggcgctgctaccggcgcgcattccttcgaacaggcttatctgcaacagagcggagccgaactcgtcagacctggcgcttctgtgaagatgagctgcaaggccagcggctacaccttcaccagctataatatgcactgggtcaagcagacccctcggcagggactcgaatggatcggcggaatctatcccggcaacggcgacacctcctacaaccagaagttcaagggcaaagccacactgaccgtgggcaagagcagcagcaccgcctatatgcagctcagcagcctgaccagcgaggacagcgccgtgtacttctgcgccagatacgactacaactacgctatggactactggggccagggcaccagcgtgacagttagctctgccagcacgcgtatccagaaccctgatcctgccgtgtaccagctgcgggatagcaagagcagcgacaagagcgtgtgtctgttcaccgacttcgacagccagaccaacgtgtcccagagcaaggactccgacgtgtacatcaccgataagaccgtgctggacatgcggagcatggacttcaagagcaactccgccgtggcctggtccaacaagtccgatttcgcctgcgccaacgccttcaacaacagcattatccccgaggacacattcttcccaagccccgagagcagctgcggtacccagagttttgggttgttggaccctaaattgtgctatctgttggacggaatcctgttcatttacggagtgatcctgaccgcattgttcctgcgggttaagttttccagatccgcagacgcacccgcttaccaacaagggcagaaccaactctacaatgaacttaatttggggcggagggaagagtacgacgttctggacaaaaggaggggacgagatcccgagatgggcggaaagcctcagcgaaggaagaatccgcaagaggggctttataacgaactccagaaagataaaatggcagaagcctatagtgagattgggatgaagggagaaaggaggaggggtaaaggtcacgatgggttgtaccaaggattgagcacagccactaaagatacctatgatgcgctccacatgcaggccctgccgccaaga

SEQ ID NO: 2301 - DNA, 2859 bp, Artificial Sequence
  Synthetic Polynucloetide
atggccttaccagtgaccgccttgctcctgccgctggccttgctgctccacgccgccaggccggaagtgcagctggttgaatctggcggaggactggttcagcctggcggatctctgagactgtcttgtgccgccagcggcttcagcttcagcgacttttggatgagctgggtccgacaggcccctggcaaaggacttgaatgggtcgccacaatcagccaggccggcagcgagaaggactacgtggactctgtgaagggcagattcaccatcagccgggacaacgccaagaagtccctgtacctccagatgaacagcctgagagccgaggacaccgccgtgtactattgtgcctctggcgtgtacagcttcgactacagaggccagggcaccctggtcacagtctcttctggtaccggcggaggcggatctggcggcggaggtagcggtggcggaggatctgaattcgagatcgtgctgacacagagccctgccaccctgtctctgagccctggcgaaagagccaccctgagctgtagagccagccagagcgtgtccagctacctggcctggtatcagcagaagcccggccaggctccccggctgctgatctacgatgccagcaatagagccaccggcatccccgccagattttccggctctggcagcggcaccgacttcaccctgaccatcagctccctggaacccgaggacttcgccgtgtactactgccagcagcggagcaactggcccatcacattcggccagggcacccggctggaaatcaaactcgaggacctgaagaacgtgttcccacctgaggtggccgtgttcgagcctagcgaggccgagatcagccacacccagaaagccaccctcgtgtgcctggctaccggcttctaccccgaccatgtggaactgtcttggtgggtcaacggcaaagaggtgcacagcggcgtgtctaccgacccccagccactgaaagaacagcccgccctgaacgacagccggtactgcctgagcagcagactgagagtgtccgccaccttctggcagaacccccggaaccacttcagatgccaggtgcagttctacggcctgagcgagaacgacgagtggacccaggacagagccaagcccgtgacccagatcgtgtctgccgaagcctggggcagagccgattgcggatcccagagcttcggcctgctggaccccaagctgtgctacctgctggatggcatcctgttcatctacggcgtgatcctgaccgccctgttcctgagagtgaagttcagcagaagcgccgacgcccctgcctaccagcagggacagaaccaactgtacaacgagctgaacctgggcagacgggaagagtacgacgtgctggacaagcggagaggcagggaccctgagatgggcggaaagccccagcggagaaagaacccccaggaaggactgtataacgaactccagaaagacaagatggccgaagcctacagcgagatcggcatgaagggcgagcggagaagaggcaagggccacgatggcctgtaccagggcctgagcaccgccaccaaggacacctatgacgccctgcacatgcaggccctgcctccaagaagggccaagcgatctggatctggagcaacaaacttctcactactcaaacaagcaggtgacgtggaggagaatcccgggcctactagtatggactggatttggcgcatccttttccttgtcggcgctgctaccggcgcgcattccttcgaagaggtgcagcttgttgagtctggcggaggactggtgcagcccgatagaagcctgagactgtcttgtgccgccagcggcttcaccttccacgattatgccatgcactgggtccgacaggcccctggcaaaggacttgaatgggtgtccaccatctcttggaacagcggcacaatcggctacgccgactctgtgaagggcagattcaccatcagccgggacaacgccaagaacagcctgtacctccagatgaactccctgagagccgaggacacagccctgtactactgcgccaaggacatccagtacggcaactactactacggcatggacgtgtggggccagggcacaacagtgacagtctcttctacgcgtatccagaaccctgatcctgccgtgtaccagctgcgggatagcaagagcagcgacaagagcgtgtgtctgttcaccgacttcgacagccagaccaacgtgtcccagagcaaggactccgacgtgtacatcaccgataagaccgtgctggacatgcggagcatggacttcaagagcaactccgccgtggcctggtccaacaagtccgatttcgcctgcgccaacgccttcaacaacagcattatccccgaggacacattcttcccaagccccgagagcagctgcggtacccagagttttgggttgttggaccctaaattgtgctatctgttggacggaatcctgttcatttacggagtgatcctgaccgcattgttcctgcgggttaagttttccagatccgcagacgcacccgcttaccaacaagggcagaaccaactctacaatgaacttaatttggggcggagggaagagtacgacgttctggacaaaaggaggggacgagatcccgagatgggcggaaagcctcagcgaaggaagaatccgcaagaggggctttataacgaactccagaaagataaaatggcagaagcctatagtgagattgggatgaagggagaaaggaggaggggtaaaggtcacgatgggttgtaccaaggattgagcacagccactaaagatacctatgatgcgctccacatgcaggccctgccgccaaga

SEQ ID NO: 2302 - DNA, 2844 bp, Artificial Sequence
  Synthetic Polynucloetide
atggccttaccagtgaccgccttgctcctgccgctggccttgctgctccacgccgccaggccggaagtgcagctggttgaatctggcggaggactggttcagcctggcggatctctgagactgtcttgtgccgccagcggcttcagcttcagcgacttttggatgagctgggtccgacaggcccctggcaaaggacttgaatgggtcgccacaatcagccaggccggcagcgagaaggactacgtggactctgtgaagggcagattcaccatcagccgggacaacgccaagaagtccctgtacctccagatgaacagcctgagagccgaggacaccgccgtgtactattgtgcctctggcgtgtacagcttcgactacagaggccagggcaccctggtcacagtctcttctggtaccggcggaggcggatctggcggcggaggtagcggtggcggaggatctgaattcgacatccagatgacacagagccctagcagcctgtctgccagcgtgggagatagagtgaccatcaactgcaaggccagccaggacatcaacagctacctgagctggttccagcagaagcctggcaaggcccctaagacactgatctaccgggccaacagactggtggatggcgtgccaagcagattttctggcagcggcagcggccaggattacaccctgacaatatccagcctccagcctgaggacttcgccacctactactgcctccagtacgacgagttccctctgacctttggcggaggcaccaaggtggaaatcaaactcgaggacctgaagaacgtgttcccacctgaggtggccgtgttcgagcctagcgaggccgagatcagccacacccagaaagccaccctcgtgtgcctggctaccggcttctaccccgaccatgtggaactgtcttggtgggtcaacggcaaagaggtgcacagcggcgtgtctaccgacccccagccactgaaagaacagcccgccctgaacgacagccggtactgcctgagcagcagactgagagtgtccgccaccttctggcagaacccccggaaccacttcagatgccaggtgcagttctacggcctgagcgagaacgacgagtggacccaggacagagccaagcccgtgacccagatcgtgtctgccgaagcctggggcagagccgattgcggatcccagagcttcggcctgctggaccccaagctgtgctacctgctggatggcatcctgttcatctacggcgtgatcctgaccgccctgttcctgagagtgaagttcagcagaagcgccgacgcccctgcctaccagcagggacagaaccaactgtacaacgagctgaacctgggcagacgggaagagtacgacgtgctggacaagcggagaggcagggaccctgagatgggcggaaagccccagcggagaaagaacccccaggaaggactgtataacgaactccagaaagacaagatggccgaagcctacagcgagatcggcatgaagggcgagcggagaagaggcaagggccacgatggcctgtaccagggcctgagcaccgccaccaaggacacctatgacgccctgcacatgcaggccctgcctccaagaagggccaagcgatctggatctggagcaacaaacttctcactactcaaacaagcaggtgacgtggaggagaatcccgggcctactagtatggactggatttggcgcatccttttccttgtcggcgctgctaccggcgcgcattccttcgaacaggtgcaactggtgcagtctggggccgaagtgaagaaacctggggcctctgtgaaggtgtcctgcaaagccagcggctacacctttaccaactacgacatcaactgggtccgacaggctccaggccaaggactggaatggatcggctggatctatcctggcgacggcagcaccaagtacaacgagaagttcaaggccaaggccacactgaccgccgataccagcacaagcaccgcctacatggaactgcggagcctgagaagcgacgacaccgccgtgtactattgtgcctccggctacgaggacgctatggactattggggccagggcaccaccgtgacagtgtctagtacgcgtatccagaaccctgatcctgccgtgtaccagctgcgggatagcaagagcagcgacaagagcgtgtgtctgttcaccgacttcgacagccagaccaacgtgtcccagagcaaggactccgacgtgtacatcaccgataagaccgtgctggacatgcggagcatggacttcaagagcaactccgccgtggcctggtccaacaagtccgatttcgcctgcgccaacgccttcaacaacagcattatccccgaggacacattcttcccaagccccgagagcagctgcggtacccagagttttgggttgttggaccctaaattgtgctatctgttggacggaatcctgttcatttacggagtgatcctgaccgcattgttcctgcgggttaagttttccagatccgcagacgcacccgcttaccaacaagggcagaaccaactctacaatgaacttaatttggggcggagggaagagtacgacgttctggacaaaaggaggggacgagatcccgagatgggcggaaagcctcagcgaaggaagaatccgcaagaggggctttataacgaactccagaaagataaaatggcagaagcctatagtgagattgggatgaagggagaaaggaggaggggtaaaggtcacgatgggttgtaccaaggattgagcacagccactaaagatacctatgatgcgctccacatgcaggccctgccgccaaga

SEQ ID NO: 2303 - DNA, 2850 bp, Artificial Sequence
  Synthetic Polynucloetide
atggccttaccagtgaccgccttgctcctgccgctggccttgctgctccacgccgccaggccggaagtgcagctggttgaatctggcggaggactggttcagcctggcggatctctgagactgtcttgtgccgccagcggcttcagcttcagcgacttttggatgagctgggtccgacaggcccctggcaaaggacttgaatgggtcgccacaatcagccaggccggcagcgagaaggactacgtggactctgtgaagggcagattcaccatcagccgggacaacgccaagaagtccctgtacctccagatgaacagcctgagagccgaggacaccgccgtgtactattgtgcctctggcgtgtacagcttcgactacagaggccagggcaccctggtcacagtctcttctggtaccggcggaggcggatctggcggcggaggtagcggtggcggaggatctgaattcgacatcgtgatgacccagacacctctgagcctgagcgtgacacctggacagcctgccagcattagctgcaagagcagccagtctctgctggacggcgacggcaagacctacctgaattggctgctccagaagcctggacagagccctcagcggctgatctacctggtgtccaagctggatagcggcgtgcccgatagattttctggcagcggctctggcaccgacttcaccctgaagatcagcagagtggaagccgaggacgtgggcgtgtactactgttggcagggcacacacttccccagaacattcggccagggcacaaagctggaaatcaaactcgaggacctgaagaacgtgttcccacctgaggtggccgtgttcgagcctagcgaggccgagatcagccacacccagaaagccaccctcgtgtgcctggctaccggcttctaccccgaccatgtggaactgtcttggtgggtcaacggcaaagaggtgcacagcggcgtgtctaccgacccccagccactgaaagaacagcccgccctgaacgacagccggtactgcctgagcagcagactgagagtgtccgccaccttctggcagaacccccggaaccacttcagatgccaggtgcagttctacggcctgagcgagaacgacgagtggacccaggacagagccaagcccgtgacccagatcgtgtctgccgaagcctggggcagagccgattgcggatcccagagcttcggcctgctggaccccaagctgtgctacctgctggatggcatcctgttcatctacggcgtgatcctgaccgccctgttcctgagagtgaagttcagcagaagcgccgacgcccctgcctaccagcagggacagaaccaactgtacaacgagctgaacctgggcagacgggaagagtacgacgtgctggacaagcggagaggcagggaccctgagatgggcggaaagccccagcggagaaagaacccccaggaaggactgtataacgaactccagaaagacaagatggccgaagcctacagcgagatcggcatgaagggcgagcggagaagaggcaagggccacgatggcctgtaccagggcctgagcaccgccaccaaggacacctatgacgccctgcacatgcaggccctgcctccaagaagggccaagcgatctggatctggagcaacaaacttctcactactcaaacaagcaggtgacgtggaggagaatcccgggcctactagtatggactggatttggcgcatccttttccttgtcggcgctgctaccggcgcgcattccttcgaacaagtgcaactggttcagagcggagccgaagtgaagaaacctggggcctctgtgaaggtgtcctgcaaggccagcggctacaccttcaaggacacctacatccactgggtccgacaggcccctggacaaggacttgagtggatgggcagaatcgaccccgccaacggcaacaccaaatacgaccccaagttccagggcagagtgaccatgaccagagacaccagcatcagcaccgcctacatggaactgagccggctgagatccgatgacaccgccgtgtactattgcgctagaagaggcggagtggattggggccagggaacactggttaccgtgtctagtacgcgtatccagaaccctgatcctgccgtgtaccagctgcgggatagcaagagcagcgacaagagcgtgtgtctgttcaccgacttcgacagccagaccaacgtgtcccagagcaaggactccgacgtgtacatcaccgataagaccgtgctggacatgcggagcatggacttcaagagcaactccgccgtggcctggtccaacaagtccgatttcgcctgcgccaacgccttcaacaacagcattatccccgaggacacattcttcccaagccccgagagcagctgcggtacccagagttttgggttgttggaccctaaattgtgctatctgttggacggaatcctgttcatttacggagtgatcctgaccgcattgttcctgcgggttaagttttccagatccgcagacgcacccgcttaccaacaagggcagaaccaactctacaatgaacttaatttggggcggagggaagagtacgacgttctggacaaaaggaggggacgagatcccgagatgggcggaaagcctcagcgaaggaagaatccgcaagaggggctttataacgaactccagaaagataaaatggcagaagcctatagtgagattgggatgaagggagaaaggaggaggggtaaaggtcacgatgggttgtaccaaggattgagcacagccactaaagatacctatgatgcgctccacatgcaggccctgccgccaaga

SEQ ID NO: 2304 - DNA, 2853 bp, Artificial Sequence
  Synthetic Polynucloetide
atggccttaccagtgaccgccttgctcctgccgctggccttgctgctccacgccgccaggccggaagtgcagctggttgaatctggcggaggactggttcagcctggcggatctctgagactgtcttgtgccgccagcggcttcagcttcagcgacttttggatgagctgggtccgacaggcccctggcaaaggacttgaatgggtcgccacaatcagccaggccggcagcgagaaggactacgtggactctgtgaagggcagattcaccatcagccgggacaacgccaagaagtccctgtacctccagatgaacagcctgagagccgaggacaccgccgtgtactattgtgcctctggcgtgtacagcttcgactacagaggccagggcaccctggtcacagtctcttctggtaccggcggaggcggatctggcggcggaggtagcggtggcggaggatctgaattcgacatccagatgacacagagccctagcagcctgtctgccagcgtgggagacagagtgaccatcacatgcaaggccagccaggatgtgtctacagccgtggcctggttccagcagaagcctggaaaagcccctaagctgctgatctacagccccagctacagatacaccggcgtgcccagcagattttctggcagcggctctggcaccgacttcaccctgacaatatccagcctccagcctgaggacttcacctactactgccagcagctctacagcaccccttacacattcggccagggcaccaaggtggaaatcaaactcgaggacctgaagaacgtgttcccacctgaggtggccgtgttcgagcctagcgaggccgagatcagccacacccagaaagccaccctcgtgtgcctggctaccggcttctaccccgaccatgtggaactgtcttggtgggtcaacggcaaagaggtgcacagcggcgtgtctaccgacccccagccactgaaagaacagcccgccctgaacgacagccggtactgcctgagcagcagactgagagtgtccgccaccttctggcagaacccccggaaccacttcagatgccaggtgcagttctacggcctgagcgagaacgacgagtggacccaggacagagccaagcccgtgacccagatcgtgtctgccgaagcctggggcagagccgattgcggatcccagagcttcggcctgctggaccccaagctgtgctacctgctggatggcatcctgttcatctacggcgtgatcctgaccgccctgttcctgagagtgaagttcagcagaagcgccgacgcccctgcctaccagcagggacagaaccaactgtacaacgagctgaacctgggcagacgggaagagtacgacgtgctggacaagcggagaggcagggaccctgagatgggcggaaagccccagcggagaaagaacccccaggaaggactgtataacgaactccagaaagacaagatggccgaagcctacagcgagatcggcatgaagggcgagcggagaagaggcaagggccacgatggcctgtaccagggcctgagcaccgccaccaaggacacctatgacgccctgcacatgcaggccctgcctccaagaagggccaagcgatctggatctggagcaacaaacttctcactactcaaacaagcaggtgacgtggaggagaatcccgggcctactagtatggactggatttggcgcatccttttccttgtcggcgctgctaccggcgcgcattccttcgaagaagtgcaactggttcagagcggagccgaagtgaagaaacctggggcctctgtgaaggtgtcctgcaaagccagcggctacacctttaccgactactacctggacgtggtcgtgcggcaagctcctggacaaggactggaatggatcggcagagtgaacccctacaacggcggcaccatctacaaccagaaattcaagggaagagtgaccctgaccagagacaccagcacctccacagcctacctggaactgagcagcctgagaagcgaagataccgccgtgtactactgcgccagggaccactacagatatgaccctctgctggactactggggccagggaaccctggttacagtgtctagtacgcgtatccagaaccctgatcctgccgtgtaccagctgcgggatagcaagagcagcgacaagagcgtgtgtctgttcaccgacttcgacagccagaccaacgtgtcccagagcaaggactccgacgtgtacatcaccgataagaccgtgctggacatgcggagcatggacttcaagagcaactccgccgtggcctggtccaacaagtccgatttcgcctgcgccaacgccttcaacaacagcattatccccgaggacacattcttcccaagccccgagagcagctgcggtacccagagttttgggttgttggaccctaaattgtgctatctgttggacggaatcctgttcatttacggagtgatcctgaccgcattgttcctgcgggttaagttttccagatccgcagacgcacccgcttaccaacaagggcagaaccaactctacaatgaacttaatttggggcggagggaagagtacgacgttctggacaaaaggaggggacgagatcccgagatgggcggaaagcctcagcgaaggaagaatccgcaagaggggctttataacgaactccagaaagataaaatggcagaagcctatagtgagattgggatgaagggagaaaggaggaggggtaaaggtcacgatgggttgtaccaaggattgagcacagccactaaagatacctatgatgcgctccacatgcaggccctgccgccaaga

SEQ ID NO: 2305 - DNA, 2871 bp, Artificial Sequence
  Synthetic Polynucloetide
atggccttaccagtgaccgccttgctcctgccgctggccttgctgctccacgccgccaggccggaagtgcagctggttgaatctggcggaggactggttcagcctggcggatctctgagactgtcttgtgccgccagcggcttcagcttcagcgacttttggatgagctgggtccgacaggcccctggcaaaggacttgaatgggtcgccacaatcagccaggccggcagcgagaaggactacgtggactctgtgaagggcagattcaccatcagccgggacaacgccaagaagtccctgtacctccagatgaacagcctgagagccgaggacaccgccgtgtactattgtgcctctggcgtgtacagcttcgactacagaggccagggcaccctggtcacagtctcttctggtaccggcggaggcggatctggcggcggaggtagcggtggcggaggatctgaattcgacatccagatgacacagagccctagcagcctgtctgccagcgtgggagacagagtgaccatcacctgtagagccagccagagcgtgtccaccagcagctacaactacatgcactggtatcagcagaagcccggcaagcctcctaagctgctgattaagtacgccagcaacctggaaagcggcgtgcccagcagattttctggcagcggctctggcaccgacttcaccctgacaatatccagcctccagcctgaggacttcgccacctactactgtcagcactcctgggagatccctctgacattcggccagggcaccaaggtggaaatcaaactcgaggacctgaagaacgtgttcccacctgaggtggccgtgttcgagcctagcgaggccgagatcagccacacccagaaagccaccctcgtgtgcctggctaccggcttctaccccgaccatgtggaactgtcttggtgggtcaacggcaaagaggtgcacagcggcgtgtctaccgacccccagccactgaaagaacagcccgccctgaacgacagccggtactgcctgagcagcagactgagagtgtccgccaccttctggcagaacccccggaaccacttcagatgccaggtgcagttctacggcctgagcgagaacgacgagtggacccaggacagagccaagcccgtgacccagatcgtgtctgccgaagcctggggcagagccgattgcggatcccagagcttcggcctgctggaccccaagctgtgctacctgctggatggcatcctgttcatctacggcgtgatcctgaccgccctgttcctgagagtgaagttcagcagaagcgccgacgcccctgcctaccagcagggacagaaccaactgtacaacgagctgaacctgggcagacgggaagagtacgacgtgctggacaagcggagaggcagggaccctgagatgggcggaaagccccagcggagaaagaacccccaggaaggactgtataacgaactccagaaagacaagatggccgaagcctacagcgagatcggcatgaagggcgagcggagaagaggcaagggccacgatggcctgtaccagggcctgagcaccgccaccaaggacacctatgacgccctgcacatgcaggccctgcctccaagaagggccaagcgatctggatctggagcaacaaacttctcactactcaaacaagcaggtgacgtggaggagaatcccgggcctactagtatggactggatttggcgcatccttttccttgtcggcgctgctaccggcgcgcattccttcgaagaagtgcaactggttcagagcggagccgaagtgaagaaacctggggcctctgtgaaggtgtcctgcaaggccagcggctacagcttcaccgactattatatgcactgggtccgacaggctccaggccagggacttgagtggatcggcagaatcaacccctacaacggcgctgccttctacagccagaacttcaaggatagagtgaccctgaccgtggacaccagcaccagcacagcctacctggaactgagcagcctgagaagcgaggacaccgccgtgtactactgcgccattgagagaggcgctgacctggaaggctacgctatggattattggggccagggaaccctggtcaccgtgtcatctacgcgtatccagaaccctgatcctgccgtgtaccagctgcgggatagcaagagcagcgacaagagcgtgtgtctgttcaccgacttcgacagccagaccaacgtgtcccagagcaaggactccgacgtgtacatcaccgataagaccgtgctggacatgcggagcatggacttcaagagcaactccgccgtggcctggtccaacaagtccgatttcgcctgcgccaacgccttcaacaacagcattatccccgaggacacattcttcccaagccccgagagcagctgcggtacccagagttttgggttgttggaccctaaattgtgctatctgttggacggaatcctgttcatttacggagtgatcctgaccgcattgttcctgcgggttaagttttccagatccgcagacgcacccgcttaccaacaagggcagaaccaactctacaatgaacttaatttggggcggagggaagagtacgacgttctggacaaaaggaggggacgagatcccgagatgggcggaaagcctcagcgaaggaagaatccgcaagaggggctttataacgaactccagaaagataaaatggcagaagcctatagtgagattgggatgaagggagaaaggaggaggggtaaaggtcacgatgggttgtaccaaggattgagcacagccactaaagatacctatgatgcgctccacatgcaggccctgccgccaaga

SEQ ID NO: 2306 - DNA, 2865 bp, Artificial Sequence
  Synthetic Polynucloetide
atggccttaccagtgaccgccttgctcctgccgctggccttgctgctccacgccgccaggccggaagtgcagctggttgaatctggcggaggactggttcagcctggcggatctctgagactgtcttgtgccgccagcggcttcagcttcagcgacttttggatgagctgggtccgacaggcccctggcaaaggacttgaatgggtcgccacaatcagccaggccggcagcgagaaggactacgtggactctgtgaagggcagattcaccatcagccgggacaacgccaagaagtccctgtacctccagatgaacagcctgagagccgaggacaccgccgtgtactattgtgcctctggcgtgtacagcttcgactacagaggccagggcaccctggtcacagtctcttctggtaccggcggaggcggatctggcggcggaggtagcggtggcggaggatctgaattcgagatcgtgctgacacagtctccagccacactgagcgcttctccaggcgagagagtgaccctgacctgtagagccagcagcaacgtgatctccagctacgtgcactggtatcagcagaagcctggcagcagccccagactgtttctgtacagcaccagcaatctggcctccggcgtgccaagcagattttctggctctggcagcggcaccgacttcacctttaccatctctagcctggaagccgaggacgccgccacctactactgtcagcagtacagcggctaccctctgaccttcggccagggcacaagactggaaatcaaactcgaggacctgaagaacgtgttcccacctgaggtggccgtgttcgagcctagcgaggccgagatcagccacacccagaaagccaccctcgtgtgcctggctaccggcttctaccccgaccatgtggaactgtcttggtgggtcaacggcaaagaggtgcacagcggcgtgtctaccgacccccagccactgaaagaacagcccgccctgaacgacagccggtactgcctgagcagcagactgagagtgtccgccaccttctggcagaacccccggaaccacttcagatgccaggtgcagttctacggcctgagcgagaacgacgagtggacccaggacagagccaagcccgtgacccagatcgtgtctgccgaagcctggggcagagccgattgcggatcccagagcttcggcctgctggaccccaagctgtgctacctgctggatggcatcctgttcatctacggcgtgatcctgaccgccctgttcctgagagtgaagttcagcagaagcgccgacgcccctgcctaccagcagggacagaaccaactgtacaacgagctgaacctgggcagacgggaagagtacgacgtgctggacaagcggagaggcagggaccctgagatgggcggaaagccccagcggagaaagaacccccaggaaggactgtataacgaactccagaaagacaagatggccgaagcctacagcgagatcggcatgaagggcgagcggagaagaggcaagggccacgatggcctgtaccagggcctgagcaccgccaccaaggacacctatgacgccctgcacatgcaggccctgcctccaagaagggccaagcgatctggatctggagcaacaaacttctcactactcaaacaagcaggtgacgtggaggagaatcccgggcctactagtatggactggatttggcgcatccttttccttgtcggcgctgctaccggcgcgcattccttcgaacaagttcagctgcaagagtctggccctggcctggtcaagcctagcgaaacactgagcctgacctgcgccgtgtctggctactctatcaccagcgcctactattggaactggatcagacagcctcctggcaaaggactggaatggatcggctacatcagctacgacggcagaaacaactacaaccccagcctgaagaaccggatcaccatcaatcccgacaccagcaagaaccagttcagcctccagctgaacagcgtgacccctgaggataccgccgtgtactactgtgccagagaaggcgactacgacgtgggcaactactacgctatggactactggggccagggaaccctggtcacagtctcttctacgcgtatccagaaccctgatcctgccgtgtaccagctgcgggatagcaagagcagcgacaagagcgtgtgtctgttcaccgacttcgacagccagaccaacgtgtcccagagcaaggactccgacgtgtacatcaccgataagaccgtgctggacatgcggagcatggacttcaagagcaactccgccgtggcctggtccaacaagtccgatttcgcctgcgccaacgccttcaacaacagcattatccccgaggacacattcttcccaagccccgagagcagctgcggtacccagagttttgggttgttggaccctaaattgtgctatctgttggacggaatcctgttcatttacggagtgatcctgaccgcattgttcctgcgggttaagttttccagatccgcagacgcacccgcttaccaacaagggcagaaccaactctacaatgaacttaatttggggcggagggaagagtacgacgttctggacaaaaggaggggacgagatcccgagatgggcggaaagcctcagcgaaggaagaatccgcaagaggggctttataacgaactccagaaagataaaatggcagaagcctatagtgagattgggatgaagggagaaaggaggaggggtaaaggtcacgatgggttgtaccaaggattgagcacagccactaaagatacctatgatgcgctccacatgcaggccctgccgccaaga

SEQ ID NO: 2307 - DNA, 2865 bp, Artificial Sequence
  Synthetic Polynucloetide
atggccttaccagtgaccgccttgctcctgccgctggccttgctgctccacgccgccaggccggaagtgcagctggttgaatctggcggaggactggttcagcctggcggatctctgagactgtcttgtgccgccagcggcttcagcttcagcgacttttggatgagctgggtccgacaggcccctggcaaaggacttgaatgggtcgccacaatcagccaggccggcagcgagaaggactacgtggactctgtgaagggcagattcaccatcagccgggacaacgccaagaagtccctgtacctccagatgaacagcctgagagccgaggacaccgccgtgtactattgtgcctctggcgtgtacagcttcgactacagaggccagggcaccctggtcacagtctcttctggtaccggcggaggcggatctggcggcggaggtagcggtggcggaggatctgaattcgagatcgtgctgacacagtctcccgccacactgtcactgtctccaggcgaaagagccacactgagctgtagagccagcagcaacgtgatctccagctacgtgcactggtatcagcagaagcctggacaggcccctcggctgctgatctacagcacaagcaatctggcctctggcatccccgccagattttctggctctggaagcggcaccgacttcaccctgaccataagcagcctggaacctgaggacttcgccgtgtactactgccagcagtatagcggctaccctctgaccttcggccagggcacaagactggaaatcaaactcgaggacctgaagaacgtgttcccacctgaggtggccgtgttcgagcctagcgaggccgagatcagccacacccagaaagccaccctcgtgtgcctggctaccggcttctaccccgaccatgtggaactgtcttggtgggtcaacggcaaagaggtgcacagcggcgtgtctaccgacccccagccactgaaagaacagcccgccctgaacgacagccggtactgcctgagcagcagactgagagtgtccgccaccttctggcagaacccccggaaccacttcagatgccaggtgcagttctacggcctgagcgagaacgacgagtggacccaggacagagccaagcccgtgacccagatcgtgtctgccgaagcctggggcagagccgattgcggatcccagagcttcggcctgctggaccccaagctgtgctacctgctggatggcatcctgttcatctacggcgtgatcctgaccgccctgttcctgagagtgaagttcagcagaagcgccgacgcccctgcctaccagcagggacagaaccaactgtacaacgagctgaacctgggcagacgggaagagtacgacgtgctggacaagcggagaggcagggaccctgagatgggcggaaagccccagcggagaaagaacccccaggaaggactgtataacgaactccagaaagacaagatggccgaagcctacagcgagatcggcatgaagggcgagcggagaagaggcaagggccacgatggcctgtaccagggcctgagcaccgccaccaaggacacctatgacgccctgcacatgcaggccctgcctccaagaagggccaagcgatctggatctggagcaacaaacttctcactactcaaacaagcaggtgacgtggaggagaatcccgggcctactagtatggactggatttggcgcatccttttccttgtcggcgctgctaccggcgcgcattccttcgaagaagtgcaactggtggaaagtggcggcggactggtgcaacctggaagaagcctgagactgtcctgtgccgccagcggctactctatcacaagcgcctactactggaactgggtccgacaggctcctggcaaaggactggaatgggtgtcctacatcagctacgacggcagaaacaactacaaccccagcctgaagaaccgcttcaccatcagccgggacaacgccaagaagtccctgtacctccagatgaacagcctgagagccgaggacacagccctgtactattgcgccaaagagggcgactacgacgtcggcaactactacgctatggactactggggccagggaaccaccgtgactgtctcttctacgcgtatccagaaccctgatcctgccgtgtaccagctgcgggatagcaagagcagcgacaagagcgtgtgtctgttcaccgacttcgacagccagaccaacgtgtcccagagcaaggactccgacgtgtacatcaccgataagaccgtgctggacatgcggagcatggacttcaagagcaactccgccgtggcctggtccaacaagtccgatttcgcctgcgccaacgccttcaacaacagcattatccccgaggacacattcttcccaagccccgagagcagctgcggtacccagagttttgggttgttggaccctaaattgtgctatctgttggacggaatcctgttcatttacggagtgatcctgaccgcattgttcctgcgggttaagttttccagatccgcagacgcacccgcttaccaacaagggcagaaccaactctacaatgaacttaatttggggcggagggaagagtacgacgttctggacaaaaggaggggacgagatcccgagatgggcggaaagcctcagcgaaggaagaatccgcaagaggggctttataacgaactccagaaagataaaatggcagaagcctatagtgagattgggatgaagggagaaaggaggaggggtaaaggtcacgatgggttgtaccaaggattgagcacagccactaaagatacctatgatgcgctccacatgcaggccctgccgccaaga

SEQ ID NO: 2308 - DNA, 2862 bp, Artificial Sequence
  Synthetic Polynucloetide
atggccttaccagtgaccgccttgctcctgccgctggccttgctgctccacgccgccaggccggaagtgcagctggttgaatctggcggaggactggttcagcctggcggatctctgagactgtcttgtgccgccagcggcttcagcttcagcgacttttggatgagctgggtccgacaggcccctggcaaaggacttgaatgggtcgccacaatcagccaggccggcagcgagaaggactacgtggactctgtgaagggcagattcaccatcagccgggacaacgccaagaagtccctgtacctccagatgaacagcctgagagccgaggacaccgccgtgtactattgtgcctctggcgtgtacagcttcgactacagaggccagggcaccctggtcacagtctcttctggtaccggcggaggcggatctggcggcggaggtagcggtggcggaggatctgaattcgacgtggtcatgacacagaccccactgagcctgcctgtgtctctgggagatcaggccagcatctcctgtagaagcagccagagcctggtgcacagcaacggcaacacctacctgcggtggtatctccagaagcctggacagagccccaaggtgctgatctacaaggtgtccaacagagtgtccggcgtgcccgatagattttctggcagcggctctggcaccgacttcaccctgaagatcaatagagtggaagccgaggacctgggcgtgtacttctgtagccagagcacccatgtgccttggacctttggcggaggcaccaagctggaaatcaagctcgaggacctgaagaacgtgttcccacctgaggtggccgtgttcgagcctagcgaggccgagatcagccacacccagaaagccaccctcgtgtgcctggctaccggcttctaccccgaccatgtggaactgtcttggtgggtcaacggcaaagaggtgcacagcggcgtgtctaccgacccccagccactgaaagaacagcccgccctgaacgacagccggtactgcctgagcagcagactgagagtgtccgccaccttctggcagaacccccggaaccacttcagatgccaggtgcagttctacggcctgagcgagaacgacgagtggacccaggacagagccaagcccgtgacccagatcgtgtctgccgaagcctggggcagagccgattgcggatcccagagcttcggcctgctggaccccaagctgtgctacctgctggatggcatcctgttcatctacggcgtgatcctgaccgccctgttcctgagagtgaagttcagcagaagcgccgacgcccctgcctaccagcagggacagaaccaactgtacaacgagctgaacctgggcagacgggaagagtacgacgtgctggacaagcggagaggcagggaccctgagatgggcggaaagccccagcggagaaagaacccccaggaaggactgtataacgaactccagaaagacaagatggccgaagcctacagcgagatcggcatgaagggcgagcggagaagaggcaagggccacgatggcctgtaccagggcctgagcaccgccaccaaggacacctatgacgccctgcacatgcaggccctgcctccaagaagggccaagcgatctggatctggagcaacaaacttctcactactcaaacaagcaggtgacgtggaggagaatcccgggcctactagtatggactggatttggcgcatccttttccttgtcggcgctgctaccggcgcgcattccttcgaaggcgtgaagctggacgagacaggcggaggacttgttcaacctggcggagccatgaagctgagctgtgtgaccagcggctttaccttcggccactactggatgaactgggtccgacagtcccctgagaaaggactggaatgggtcgcccagttcagaaacaagccctacaactacgaaacctactacagcgacagcgtgaagggcagattcaccatcagccgggacgacagcaagtccagcgtgtacctccagatgaacaacctgcgcgtggaagataccggcatctactactgtaccggggccagctacggcatggaatatctcggccagggcaccagcgtgaccgtgtctacaacgcgtatccagaaccctgatcctgccgtgtaccagctgcgggatagcaagagcagcgacaagagcgtgtgtctgttcaccgacttcgacagccagaccaacgtgtcccagagcaaggactccgacgtgtacatcaccgataagaccgtgctggacatgcggagcatggacttcaagagcaactccgccgtggcctggtccaacaagtccgatttcgcctgcgccaacgccttcaacaacagcattatccccgaggacacattcttcccaagccccgagagcagctgcggtacccagagttttgggttgttggaccctaaattgtgctatctgttggacggaatcctgttcatttacggagtgatcctgaccgcattgttcctgcgggttaagttttccagatccgcagacgcacccgcttaccaacaagggcagaaccaactctacaatgaacttaatttggggcggagggaagagtacgacgttctggacaaaaggaggggacgagatcccgagatgggcggaaagcctcagcgaaggaagaatccgcaagaggggctttataacgaactccagaaagataaaatggcagaagcctatagtgagattgggatgaagggagaaaggaggaggggtaaaggtcacgatgggttgtaccaaggattgagcacagccactaaagatacctatgatgcgctccacatgcaggccctgccgccaaga

SEQ ID NO: 2309 - DNA, 2880 bp, Artificial Sequence
  Synthetic Polynucloetide
atggccttaccagtgaccgccttgctcctgccgctggccttgctgctccacgccgccaggccggaagtgcagctggttgaatctggcggaggactggttcagcctggcggatctctgagactgtcttgtgccgccagcggcttcagcttcagcgacttttggatgagctgggtccgacaggcccctggcaaaggacttgaatgggtcgccacaatcagccaggccggcagcgagaaggactacgtggactctgtgaagggcagattcaccatcagccgggacaacgccaagaagtccctgtacctccagatgaacagcctgagagccgaggacaccgccgtgtactattgtgcctctggcgtgtacagcttcgactacagaggccagggcaccctggtcacagtctcttctggtaccggcggaggcggatctggcggcggaggtagcggtggcggaggatctgaattccaggtgcaactggtggaatctggcggcaatctggttcagcctggcggctctctgagactgtcttgtgccgccagcggcttcaccttcggcagcttttctatgagctgggtccgacaagctcctggcggaggacttgaatgggtggcaggactgtctgccagaagcagcctgacacactacgccgactctgtgaagggcagattcaccatcagccgggacaacgccaagaacagcgtgtacctccagatgaacagcctgagagtggaagataccgccgtgtactactgcgccagaagaagctacgacagcagcggctactggggccacttctacagctacatggatgtgtggggccagggcaccctggttacagtttctctcgaggacctgaagaacgtgttcccacctgaggtggccgtgttcgagcctagcgaggccgagatcagccacacccagaaagccaccctcgtgtgcctggctaccggcttctaccccgaccatgtggaactgtcttggtgggtcaacggcaaagaggtgcacagcggcgtgtctaccgacccccagccactgaaagaacagcccgccctgaacgacagccggtactgcctgagcagcagactgagagtgtccgccaccttctggcagaacccccggaaccacttcagatgccaggtgcagttctacggcctgagcgagaacgacgagtggacccaggacagagccaagcccgtgacccagatcgtgtctgccgaagcctggggcagagccgattgcggatcccagagcttcggcctgctggaccccaagctgtgctacctgctggatggcatcctgttcatctacggcgtgatcctgaccgccctgttcctgagagtgaagttcagcagaagcgccgacgcccctgcctaccagcagggacagaaccaactgtacaacgagctgaacctgggcagacgggaagagtacgacgtgctggacaagcggagaggcagggaccctgagatgggcggaaagccccagcggagaaagaacccccaggaaggactgtataacgaactccagaaagacaagatggccgaagcctacagcgagatcggcatgaagggcgagcggagaagaggcaagggccacgatggcctgtaccagggcctgagcaccgccaccaaggacacctatgacgccctgcacatgcaggccctgcctccaagaagggccaagcgatctggatctggagcaacaaacttctcactactcaaacaagcaggtgacgtggaggagaatcccgggcctactagtatggactggatttggcgcatccttttccttgtcggcgctgctaccggcgcgcattccttcgaatctgtgctgacccagcctagctccgtgtctgctgctcctggacagaaagtgaccatctcctgtagcggcagcaccagcaacatcggcaacaactacgtgtcctggtatcagcagcaccccggcaaggcccctaagctgatgatctacgacgtgtccaagaggcccagcggcgtgccagatagattttccggcagcaagagcggcaacagcgccagcctggatattagcggactccagtctgaggacgaggccgactactattgcgccgcctgggatgatagcctgagcgagtttctgtttggcaccggcaccaagctgacagtgcttggaacgcgtatccagaaccctgatcctgccgtgtaccagctgcgggatagcaagagcagcgacaagagcgtgtgtctgttcaccgacttcgacagccagaccaacgtgtcccagagcaaggactccgacgtgtacatcaccgataagaccgtgctggacatgcggagcatggacttcaagagcaactccgccgtggcctggtccaacaagtccgatttcgcctgcgccaacgccttcaacaacagcattatccccgaggacacattcttcccaagccccgagagcagctgcggtacccagagttttgggttgttggaccctaaattgtgctatctgttggacggaatcctgttcatttacggagtgatcctgaccgcattgttcctgcgggttaagttttccagatccgcagacgcacccgcttaccaacaagggcagaaccaactctacaatgaacttaatttggggcggagggaagagtacgacgttctggacaaaaggaggggacgagatcccgagatgggcggaaagcctcagcgaaggaagaatccgcaagaggggctttataacgaactccagaaagataaaatggcagaagcctatagtgagattgggatgaagggagaaaggaggaggggtaaaggtcacgatgggttgtaccaaggattgagcacagccactaaagatacctatgatgcgctccacatgcaggccctgccgccaaga

SEQ ID NO: 2310 - DNA, 2865 bp, Artificial Sequence
  Synthetic Polynucloetide
atggccttaccagtgaccgccttgctcctgccgctggccttgctgctccacgccgccaggccggaagtgcagctggttgaatctggcggaggactggttcagcctggcggatctctgagactgtcttgtgccgccagcggcttcagcttcagcgacttttggatgagctgggtccgacaggcccctggcaaaggacttgaatgggtcgccacaatcagccaggccggcagcgagaaggactacgtggactctgtgaagggcagattcaccatcagccgggacaacgccaagaagtccctgtacctccagatgaacagcctgagagccgaggacaccgccgtgtactattgtgcctctggcgtgtacagcttcgactacagaggccagggcaccctggtcacagtctcttctggtaccggcggaggcggatctggcggcggaggtagcggtggcggaggatctgaattcgacgtggtcatgacacagagcccttctagcctgtctgccagcgtgggcgacagagtgacaatcacctgtcagagcagcctggacatcagccactacctgaactggtatcagcagaagcccggcaaggcccctaagctgctgatctacgacgccagcaatctggaaaccggcgtgcccagcagattttctggcagcggaagcggcacccacttcaccttcacaatatccagcctccagcctgaggacttcgccacctactactgccagcagtacgacaacctgcctctgacctttggcggaggcaccaagctggaaatcaagagactcgaggacctgaagaacgtgttcccacctgaggtggccgtgttcgagcctagcgaggccgagatcagccacacccagaaagccaccctcgtgtgcctggctaccggcttctaccccgaccatgtggaactgtcttggtgggtcaacggcaaagaggtgcacagcggcgtgtctaccgacccccagccactgaaagaacagcccgccctgaacgacagccggtactgcctgagcagcagactgagagtgtccgccaccttctggcagaacccccggaaccacttcagatgccaggtgcagttctacggcctgagcgagaacgacgagtggacccaggacagagccaagcccgtgacccagatcgtgtctgccgaagcctggggcagagccgattgcggatcccagagcttcggcctgctggaccccaagctgtgctacctgctggatggcatcctgttcatctacggcgtgatcctgaccgccctgttcctgagagtgaagttcagcagaagcgccgacgcccctgcctaccagcagggacagaaccaactgtacaacgagctgaacctgggcagacgggaagagtacgacgtgctggacaagcggagaggcagggaccctgagatgggcggaaagccccagcggagaaagaacccccaggaaggactgtataacgaactccagaaagacaagatggccgaagcctacagcgagatcggcatgaagggcgagcggagaagaggcaagggccacgatggcctgtaccagggcctgagcaccgccaccaaggacacctatgacgccctgcacatgcaggccctgcctccaagaagggccaagcgatctggatctggagcaacaaacttctcactactcaaacaagcaggtgacgtggaggagaatcccgggcctactagtatggactggatttggcgcatccttttccttgtcggcgctgctaccggcgcgcattccttcgaacaagttcaactggttcaatcaggcggaggcgtggtgcaacctggtggctctctgagagtgtcttgtgctgcctctggcgtgaccctgagcgactatggaatgcactgggtccgacaggcccctggcaaaggacttgagtgggtcgccttcatcagaaacgacggcagcgacaagtattacgccgacagcgtgaagggcagattcaccatcagccgggacaacagcgagaaaaccgtgtctctccagatgtctagcctgagagccgaggacaccgccgtgtactactgtgccaagaatggcgagagcggccctctggactactggtatctggatctgtggggcagaggcaccctggtcacagtctcttctacgcgtatccagaaccctgatcctgccgtgtaccagctgcgggatagcaagagcagcgacaagagcgtgtgtctgttcaccgacttcgacagccagaccaacgtgtcccagagcaaggactccgacgtgtacatcaccgataagaccgtgctggacatgcggagcatggacttcaagagcaactccgccgtggcctggtccaacaagtccgatttcgcctgcgccaacgccttcaacaacagcattatccccgaggacacattcttcccaagccccgagagcagctgcggtacccagagttttgggttgttggaccctaaattgtgctatctgttggacggaatcctgttcatttacggagtgatcctgaccgcattgttcctgcgggttaagttttccagatccgcagacgcacccgcttaccaacaagggcagaaccaactctacaatgaacttaatttggggcggagggaagagtacgacgttctggacaaaaggaggggacgagatcccgagatgggcggaaagcctcagcgaaggaagaatccgcaagaggggctttataacgaactccagaaagataaaatggcagaagcctatagtgagattgggatgaagggagaaaggaggaggggtaaaggtcacgatgggttgtaccaaggattgagcacagccactaaagatacctatgatgcgctccacatgcaggccctgccgccaaga

SEQ ID NO: 2311 - DNA, 2877 bp, Artificial Sequence
  Synthetic Polynucloetide
atggccttaccagtgaccgccttgctcctgccgctggccttgctgctccacgccgccaggccggaagtgcagctggttgaatctggcggaggactggttcagcctggcggatctctgagactgtcttgtgccgccagcggcttcagcttcagcgacttttggatgagctgggtccgacaggcccctggcaaaggacttgaatgggtcgccacaatcagccaggccggcagcgagaaggactacgtggactctgtgaagggcagattcaccatcagccgggacaacgccaagaagtccctgtacctccagatgaacagcctgagagccgaggacaccgccgtgtactattgtgcctctggcgtgtacagcttcgactacagaggccagggcaccctggtcacagtctcttctggtaccggcggaggcggatctggcggcggaggtagcggtggcggaggatctgaattcagctacgagctgacacagcctccatccgtgtctggcacacctggacagagagtggctatctcctgtagcggcagcagcagcaacatcggcaccagaatggtcacctggtatcagcacgtgccaggcacagcccctaagctgctgatcttcaacaacaaccagcggcctagcggcgtgcccgatagattttctgccagcaagagcggcacaagcgccagcctggctatcatcggactccagtctgacgacgaggccgactactactgtgccacctgggacgacaacgtgaagtcctacgtgttcggcaccggcaccaaagtgacagtgcttggaagtagactcgaggacctgaagaacgtgttcccacctgaggtggccgtgttcgagcctagcgaggccgagatcagccacacccagaaagccaccctcgtgtgcctggctaccggcttctaccccgaccatgtggaactgtcttggtgggtcaacggcaaagaggtgcacagcggcgtgtctaccgacccccagccactgaaagaacagcccgccctgaacgacagccggtactgcctgagcagcagactgagagtgtccgccaccttctggcagaacccccggaaccacttcagatgccaggtgcagttctacggcctgagcgagaacgacgagtggacccaggacagagccaagcccgtgacccagatcgtgtctgccgaagcctggggcagagccgattgcggatcccagagcttcggcctgctggaccccaagctgtgctacctgctggatggcatcctgttcatctacggcgtgatcctgaccgccctgttcctgagagtgaagttcagcagaagcgccgacgcccctgcctaccagcagggacagaaccaactgtacaacgagctgaacctgggcagacgggaagagtacgacgtgctggacaagcggagaggcagggaccctgagatgggcggaaagccccagcggagaaagaacccccaggaaggactgtataacgaactccagaaagacaagatggccgaagcctacagcgagatcggcatgaagggcgagcggagaagaggcaagggccacgatggcctgtaccagggcctgagcaccgccaccaaggacacctatgacgccctgcacatgcaggccctgcctccaagaagggccaagcgatctggatctggagcaacaaacttctcactactcaaacaagcaggtgacgtggaggagaatcccgggcctactagtatggactggatttggcgcatccttttccttgtcggcgctgctaccggcgcgcattccttcgaacttgaaatggcccaggttcagctccagcagtggggagctggactgctgaagcctagcgagacactgagcctgacctgtgctgtgtacggcggcagcttcagcggctactactggtcctggatcagacagcctcctggcaaaggactggaatggatcggcgagatcaaccacagcggctccaccaactacaaccccagcctgaagtccagagtgaccatcagcgtggacaccagcaagaaccagttctccctgaagctgagcagcgtgacagccgctgataccgccgtgtactattgcgctagagcccctcagtcttggtacgtgggagatgtgtggggccagggcacactggttacagtgtcatctacgcgtatccagaaccctgatcctgccgtgtaccagctgcgggatagcaagagcagcgacaagagcgtgtgtctgttcaccgacttcgacagccagaccaacgtgtcccagagcaaggactccgacgtgtacatcaccgataagaccgtgctggacatgcggagcatggacttcaagagcaactccgccgtggcctggtccaacaagtccgatttcgcctgcgccaacgccttcaacaacagcattatccccgaggacacattcttcccaagccccgagagcagctgcggtacccagagttttgggttgttggaccctaaattgtgctatctgttggacggaatcctgttcatttacggagtgatcctgaccgcattgttcctgcgggttaagttttccagatccgcagacgcacccgcttaccaacaagggcagaaccaactctacaatgaacttaatttggggcggagggaagagtacgacgttctggacaaaaggaggggacgagatcccgagatgggcggaaagcctcagcgaaggaagaatccgcaagaggggctttataacgaactccagaaagataaaatggcagaagcctatagtgagattgggatgaagggagaaaggaggaggggtaaaggtcacgatgggttgtaccaaggattgagcacagccactaaagatacctatgatgcgctccacatgcaggccctgccgccaaga

SEQ ID NO: 2312 - DNA, 2868 bp, Artificial Sequence
  Synthetic Polynucloetide
atggccttaccagtgaccgccttgctcctgccgctggccttgctgctccacgccgccaggccggaagtgcagctggttgaatctggcggaggactggttcagcctggcggatctctgagactgtcttgtgccgccagcggcttcagcttcagcgacttttggatgagctgggtccgacaggcccctggcaaaggacttgaatgggtcgccacaatcagccaggccggcagcgagaaggactacgtggactctgtgaagggcagattcaccatcagccgggacaacgccaagaagtccctgtacctccagatgaacagcctgagagccgaggacaccgccgtgtactattgtgcctctggcgtgtacagcttcgactacagaggccagggcaccctggtcacagtctcttctggtaccggcggaggcggatctggcggcggaggtagcggtggcggaggatctgaattccagtctgtgctgacacagcctcctagcctgtctgtggcccctggaaagacagccagcatcacatgcggcggcaacaacatcggcatgaagtccgtgcactggtatcagcagaggccaggacaggctcctgtgctggtcatctactacgacagcgacagaccctctggcatccccggcagattttccggcagcaactctggcaataccgccacactgaccatctccagagtggaagctggcgacgaggccgactactactgccaagtgtgggataccaccggcgatcaccctggctatgtgtttggcaccggcaccaaagtgacagtgcttctcgaggacctgaagaacgtgttcccacctgaggtggccgtgttcgagcctagcgaggccgagatcagccacacccagaaagccaccctcgtgtgcctggctaccggcttctaccccgaccatgtggaactgtcttggtgggtcaacggcaaagaggtgcacagcggcgtgtctaccgacccccagccactgaaagaacagcccgccctgaacgacagccggtactgcctgagcagcagactgagagtgtccgccaccttctggcagaacccccggaaccacttcagatgccaggtgcagttctacggcctgagcgagaacgacgagtggacccaggacagagccaagcccgtgacccagatcgtgtctgccgaagcctggggcagagccgattgcggatcccagagcttcggcctgctggaccccaagctgtgctacctgctggatggcatcctgttcatctacggcgtgatcctgaccgccctgttcctgagagtgaagttcagcagaagcgccgacgcccctgcctaccagcagggacagaaccaactgtacaacgagctgaacctgggcagacgggaagagtacgacgtgctggacaagcggagaggcagggaccctgagatgggcggaaagccccagcggagaaagaacccccaggaaggactgtataacgaactccagaaagacaagatggccgaagcctacagcgagatcggcatgaagggcgagcggagaagaggcaagggccacgatggcctgtaccagggcctgagcaccgccaccaaggacacctatgacgccctgcacatgcaggccctgcctccaagaagggccaagcgatctggatctggagcaacaaacttctcactactcaaacaagcaggtgacgtggaggagaatcccgggcctactagtatggactggatttggcgcatccttttccttgtcggcgctgctaccggcgcgcattccttcgaacaagttcaactggttcagagcggagccgaagtgaagaaacctggcagcagcgtgaaggtgtcctgcaaagcaagcggcggcacctttagcagctacgccatctcttgggtccgacaggcacctggacaaggactggaatggatgggcggcatcatccccatcttcggcacagccaattacgcccagaaattccagggcagagtgaccatcaccgccgacgagtctacaagcaccgcctacatggaactgagcagcctgagaagcgaggacaccgccgtgtactattgtgccagaggcgtgtacggctacagcggctctgccccttatgatgagtggggccagggaaccctggtcaccgtttcttctacgcgtatccagaaccctgatcctgccgtgtaccagctgcgggatagcaagagcagcgacaagagcgtgtgtctgttcaccgacttcgacagccagaccaacgtgtcccagagcaaggactccgacgtgtacatcaccgataagaccgtgctggacatgcggagcatggacttcaagagcaactccgccgtggcctggtccaacaagtccgatttcgcctgcgccaacgccttcaacaacagcattatccccgaggacacattcttcccaagccccgagagcagctgcggtacccagagttttgggttgttggaccctaaattgtgctatctgttggacggaatcctgttcatttacggagtgatcctgaccgcattgttcctgcgggttaagttttccagatccgcagacgcacccgcttaccaacaagggcagaaccaactctacaatgaacttaatttggggcggagggaagagtacgacgttctggacaaaaggaggggacgagatcccgagatgggcggaaagcctcagcgaaggaagaatccgcaagaggggctttataacgaactccagaaagataaaatggcagaagcctatagtgagattgggatgaagggagaaaggaggaggggtaaaggtcacgatgggttgtaccaaggattgagcacagccactaaagatacctatgatgcgctccacatgcaggccctgccgccaaga

SEQ ID NO: 2313 - DNA, 2862 bp, Artificial Sequence
  Synthetic Polynucloetide
atggccttaccagtgaccgccttgctcctgccgctggccttgctgctccacgccgccaggccggaagtgcagctggttgaatctggcggaggactggttcagcctggcggatctctgagactgtcttgtgccgccagcggcttcagcttcagcgacttttggatgagctgggtccgacaggcccctggcaaaggacttgaatgggtcgccacaatcagccaggccggcagcgagaaggactacgtggactctgtgaagggcagattcaccatcagccgggacaacgccaagaagtccctgtacctccagatgaacagcctgagagccgaggacaccgccgtgtactattgtgcctctggcgtgtacagcttcgactacagaggccagggcaccctggtcacagtctcttctggtaccggcggaggcggatctggcggcggaggtagcggtggcggaggatctgaattcgaggtgcaactggttgagtctggcggaggactggtgcagcctggaagaagcctgagactgtcttgtgccgccagcggcttcaccttcgacgattatgccatgcactgggtccgacaggcccctggcaaaggacttgaatgggtgtccggcatctcctggaacagcggctctatcggctacgccgattccgtgaagggcagattcaccatcagccgggacaacgccaagaacagcctgtacctccagatgaactccctgagagccgaggacacagccctgtactactgcgccaaagacaaaggcggaggctactacgacttttggagcggcagcgattattggggccagggcacactggtcacagtgtctagcctcgaggacctgaagaacgtgttcccacctgaggtggccgtgttcgagcctagcgaggccgagatcagccacacccagaaagccaccctcgtgtgcctggctaccggcttctaccccgaccatgtggaactgtcttggtgggtcaacggcaaagaggtgcacagcggcgtgtctaccgacccccagccactgaaagaacagcccgccctgaacgacagccggtactgcctgagcagcagactgagagtgtccgccaccttctggcagaacccccggaaccacttcagatgccaggtgcagttctacggcctgagcgagaacgacgagtggacccaggacagagccaagcccgtgacccagatcgtgtctgccgaagcctggggcagagccgattgcggatcccagagcttcggcctgctggaccccaagctgtgctacctgctggatggcatcctgttcatctacggcgtgatcctgaccgccctgttcctgagagtgaagttcagcagaagcgccgacgcccctgcctaccagcagggacagaaccaactgtacaacgagctgaacctgggcagacgggaagagtacgacgtgctggacaagcggagaggcagggaccctgagatgggcggaaagccccagcggagaaagaacccccaggaaggactgtataacgaactccagaaagacaagatggccgaagcctacagcgagatcggcatgaagggcgagcggagaagaggcaagggccacgatggcctgtaccagggcctgagcaccgccaccaaggacacctatgacgccctgcacatgcaggccctgcctccaagaagggccaagcgatctggatctggagcaacaaacttctcactactcaaacaagcaggtgacgtggaggagaatcccgggcctactagtatggactggatttggcgcatccttttccttgtcggcgctgctaccggcgcgcattccttcgaatcttctgagctgacacaggaccctgccgtgtctgttgctctgggccagacagtgcggattacctgtcagggcgatagcctgagaagctactacgcctcctggtatcagcagaagccaggccaggctcctgtgctggtcatctacggcaagaacaacagacccagcggcatccccgatagattcagcggaagcagctctggcaataccgccagcctgacaattactggcgctcaggccgaggacgaggccgactactactgcaacagcagagatagcagcggctgggttttcggcggaggcacaaaactgacagtgctgacgcgtatccagaaccctgatcctgccgtgtaccagctgcgggatagcaagagcagcgacaagagcgtgtgtctgttcaccgacttcgacagccagaccaacgtgtcccagagcaaggactccgacgtgtacatcaccgataagaccgtgctggacatgcggagcatggacttcaagagcaactccgccgtggcctggtccaacaagtccgatttcgcctgcgccaacgccttcaacaacagcattatccccgaggacacattcttcccaagccccgagagcagctgcggtacccagagttttgggttgttggaccctaaattgtgctatctgttggacggaatcctgttcatttacggagtgatcctgaccgcattgttcctgcgggttaagttttccagatccgcagacgcacccgcttaccaacaagggcagaaccaactctacaatgaacttaatttggggcggagggaagagtacgacgttctggacaaaaggaggggacgagatcccgagatgggcggaaagcctcagcgaaggaagaatccgcaagaggggctttataacgaactccagaaagataaaatggcagaagcctatagtgagattgggatgaagggagaaaggaggaggggtaaaggtcacgatgggttgtaccaaggattgagcacagccactaaagatacctatgatgcgctccacatgcaggccctgccgccaaga

SEQ ID NO: 2314 - DNA, 2889 bp, Artificial Sequence
  Synthetic Polynucloetide
atggccttaccagtgaccgccttgctcctgccgctggccttgctgctccacgccgccaggccggaagtgcagctggttgaatctggcggaggactggttcagcctggcggatctctgagactgtcttgtgccgccagcggcttcagcttcagcgacttttggatgagctgggtccgacaggcccctggcaaaggacttgaatgggtcgccacaatcagccaggccggcagcgagaaggactacgtggactctgtgaagggcagattcaccatcagccgggacaacgccaagaagtccctgtacctccagatgaacagcctgagagccgaggacaccgccgtgtactattgtgcctctggcgtgtacagcttcgactacagaggccagggcaccctggtcacagtctcttctggtaccggcggaggcggatctggcggcggaggtagcggtggcggaggatctgaattcgaagtgcagctccagcagtctggacctggcctggttaagcctagccagacactgagcctgacctgtgccatcagcggcgatagcgtgctgagcaacagcgacacctggaactggatcagacagagccctagcagaggactggaatggctgggcagaacctaccacagaagcacttggtacgacgactacgccagctctgtgcggggcagagtgtccatcaatgtggacaccagcaagaaccagtacagcctgcaactgaacgccgtgacacctgaggataccggcgtgtactactgcgccagagacagactccaggacggcaactcttggagcgacgcctttgatgtgtggggccagggcacaatggtcaccgtttctagcctcgaggacctgaagaacgtgttcccacctgaggtggccgtgttcgagcctagcgaggccgagatcagccacacccagaaagccaccctcgtgtgcctggctaccggcttctaccccgaccatgtggaactgtcttggtgggtcaacggcaaagaggtgcacagcggcgtgtctaccgacccccagccactgaaagaacagcccgccctgaacgacagccggtactgcctgagcagcagactgagagtgtccgccaccttctggcagaacccccggaaccacttcagatgccaggtgcagttctacggcctgagcgagaacgacgagtggacccaggacagagccaagcccgtgacccagatcgtgtctgccgaagcctggggcagagccgattgcggatcccagagcttcggcctgctggaccccaagctgtgctacctgctggatggcatcctgttcatctacggcgtgatcctgaccgccctgttcctgagagtgaagttcagcagaagcgccgacgcccctgcctaccagcagggacagaaccaactgtacaacgagctgaacctgggcagacgggaagagtacgacgtgctggacaagcggagaggcagggaccctgagatgggcggaaagccccagcggagaaagaacccccaggaaggactgtataacgaactccagaaagacaagatggccgaagcctacagcgagatcggcatgaagggcgagcggagaagaggcaagggccacgatggcctgtaccagggcctgagcaccgccaccaaggacacctatgacgccctgcacatgcaggccctgcctccaagaagggccaagcgatctggatctggagcaacaaacttctcactactcaaacaagcaggtgacgtggaggagaatcccgggcctactagtatggactggatttggcgcatccttttccttgtcggcgctgctaccggcgcgcattccttcgaacaatctgctctgacacagcctgccagcgtgtcaggatctcctggacagagcatcaccatctcttgcaccggcaccagctctgatgtcggcggctacaattacgtgtcctggtatcagcagcaccccggcaaggcccctaagctgatgatctacgacgtgtccaacagacccagcggcgtgtccaatagattctccggcagcaagagcggcaacaccgccagcctgacaatttctggactgcaagccgaggacgaggccgactactactgtagcagctacaccagcagcagcacactggtgtacgtgttcggcacaggcaccaaagtgaccgtgcttacgcgtatccagaaccctgatcctgccgtgtaccagctgcgggatagcaagagcagcgacaagagcgtgtgtctgttcaccgacttcgacagccagaccaacgtgtcccagagcaaggactccgacgtgtacatcaccgataagaccgtgctggacatgcggagcatggacttcaagagcaactccgccgtggcctggtccaacaagtccgatttcgcctgcgccaacgccttcaacaacagcattatccccgaggacacattcttcccaagccccgagagcagctgcggtacccagagttttgggttgttggaccctaaattgtgctatctgttggacggaatcctgttcatttacggagtgatcctgaccgcattgttcctgcgggttaagttttccagatccgcagacgcacccgcttaccaacaagggcagaaccaactctacaatgaacttaatttggggcggagggaagagtacgacgttctggacaaaaggaggggacgagatcccgagatgggcggaaagcctcagcgaaggaagaatccgcaagaggggctttataacgaactccagaaagataaaatggcagaagcctatagtgagattgggatgaagggagaaaggaggaggggtaaaggtcacgatgggttgtaccaaggattgagcacagccactaaagatacctatgatgcgctccacatgcaggccctgccgccaaga

SEQ ID NO: 2315 - DNA, 2823 bp, Artificial Sequence
  Synthetic Polynucloetide
atggccttaccagtgaccgccttgctcctgccgctggccttgctgctccacgccgccaggccggaagtgcagctggttgaatctggcggaggactggttcagcctggcggatctctgagactgtcttgtgccgccagcggcttcagcttcagcgacttttggatgagctgggtccgacaggcccctggcaaaggacttgaatgggtcgccacaatcagccaggccggcagcgagaaggactacgtggactctgtgaagggcagattcaccatcagccgggacaacgccaagaagtccctgtacctccagatgaacagcctgagagccgaggacaccgccgtgtactattgtgcctctggcgtgtacagcttcgactacagaggccagggcaccctggtcacagtctcttctggtaccggcggaggcggatctggcggcggaggtagcggtggcggaggatctgaattccaggtgcaactggttcagtctggggccgaagtgaagaaacctggggcctctgtgaaggtgtcctgcaaggcttccggctacacctttaccagctacgacatcaactgggtccgacaggccacaggccaaggactggaatggatgggctggatgaaccccaacagcggcaataccggctacgcccagaaattccagggcagagtgaccatgaccagaaacaccagcatcagcaccgcctacatggaactgagcagcctgagaagcgaggacaccgccgtgtactattgcgccagaggcgacagcaccaaggtggaaatcaaactcgaggacctgaagaacgtgttcccacctgaggtggccgtgttcgagcctagcgaggccgagatcagccacacccagaaagccaccctcgtgtgcctggctaccggcttctaccccgaccatgtggaactgtcttggtgggtcaacggcaaagaggtgcacagcggcgtgtctaccgacccccagccactgaaagaacagcccgccctgaacgacagccggtactgcctgagcagcagactgagagtgtccgccaccttctggcagaacccccggaaccacttcagatgccaggtgcagttctacggcctgagcgagaacgacgagtggacccaggacagagccaagcccgtgacccagatcgtgtctgccgaagcctggggcagagccgattgcggatcccagagcttcggcctgctggaccccaagctgtgctacctgctggatggcatcctgttcatctacggcgtgatcctgaccgccctgttcctgagagtgaagttcagcagaagcgccgacgcccctgcctaccagcagggacagaaccaactgtacaacgagctgaacctgggcagacgggaagagtacgacgtgctggacaagcggagaggcagggaccctgagatgggcggaaagccccagcggagaaagaacccccaggaaggactgtataacgaactccagaaagacaagatggccgaagcctacagcgagatcggcatgaagggcgagcggagaagaggcaagggccacgatggcctgtaccagggcctgagcaccgccaccaaggacacctatgacgccctgcacatgcaggccctgcctccaagaagggccaagcgatctggatctggagcaacaaacttctcactactcaaacaagcaggtgacgtggaggagaatcccgggcctactagtatggactggatttggcgcatccttttccttgtcggcgctgctaccggcgcgcattccttcgaacaatctgtgctgacccagcctagatccgtgtctggctctcctggacagagcgtgaccatctcttgtaccggcaccagctctgatgtcggcggctacaattacgtgtcctggtatcagcagcaccccggcgaagcccctaagctgattatctacgacgccgacaagcggcccagcggcatcagcaatagattcagctctggcaagagcggcaacaccgccagcctgacaatcagcggactccaggtggaagatgaggccgactactactgctgctcctatgccggcggaagcacctgggttttcggaggcggtacaaaagtgaccgtgctgacgcgtatccagaaccctgatcctgccgtgtaccagctgcgggatagcaagagcagcgacaagagcgtgtgtctgttcaccgacttcgacagccagaccaacgtgtcccagagcaaggactccgacgtgtacatcaccgataagaccgtgctggacatgcggagcatggacttcaagagcaactccgccgtggcctggtccaacaagtccgatttcgcctgcgccaacgccttcaacaacagcattatccccgaggacacattcttcccaagccccgagagcagctgcggtacccagagttttgggttgttggaccctaaattgtgctatctgttggacggaatcctgttcatttacggagtgatcctgaccgcattgttcctgcgggttaagttttccagatccgcagacgcacccgcttaccaacaagggcagaaccaactctacaatgaacttaatttggggcggagggaagagtacgacgttctggacaaaaggaggggacgagatcccgagatgggcggaaagcctcagcgaaggaagaatccgcaagaggggctttataacgaactccagaaagataaaatggcagaagcctatagtgagattgggatgaagggagaaaggaggaggggtaaaggtcacgatgggttgtaccaaggattgagcacagccactaaagatacctatgatgcgctccacatgcaggccctgccgccaaga

SEQ ID NO: 2316 - DNA, 2889 bp, Artificial Sequence
  Synthetic Polynucloetide
atggccttaccagtgaccgccttgctcctgccgctggccttgctgctccacgccgccaggccggaagtgcagctggttgaatctggcggaggactggttcagcctggcggatctctgagactgtcttgtgccgccagcggcttcagcttcagcgacttttggatgagctgggtccgacaggcccctggcaaaggacttgaatgggtcgccacaatcagccaggccggcagcgagaaggactacgtggactctgtgaagggcagattcaccatcagccgggacaacgccaagaagtccctgtacctccagatgaacagcctgagagccgaggacaccgccgtgtactattgtgcctctggcgtgtacagcttcgactacagaggccagggcaccctggtcacagtctcttctggtaccggcggaggcggatctggcggcggaggtagcggtggcggaggatctgaattcgaagtgcagctccagcagtctggacctggcctggttaagcctagccagacactgagcctgacctgtgccatcagcggcgatagcgtgtcctctaatagcgccgcctggaactggatcagacagagccctagcagaggactggaatggctgggcagaacctactaccgcagcaagtggtacagcgactacgccgtgtccgtgaagtcccggatcaccatcaatcccgacaccagcaagaaccagttcagcctgcaactgaacagcgtgacccctgaggataccgccgtgtactactgcgccagagatccctacgacttttggagcggctaccccgacgcctttgacatctggggacagggcacaatggtcaccgtttctagcctcgaggacctgaagaacgtgttcccacctgaggtggccgtgttcgagcctagcgaggccgagatcagccacacccagaaagccaccctcgtgtgcctggctaccggcttctaccccgaccatgtggaactgtcttggtgggtcaacggcaaagaggtgcacagcggcgtgtctaccgacccccagccactgaaagaacagcccgccctgaacgacagccggtactgcctgagcagcagactgagagtgtccgccaccttctggcagaacccccggaaccacttcagatgccaggtgcagttctacggcctgagcgagaacgacgagtggacccaggacagagccaagcccgtgacccagatcgtgtctgccgaagcctggggcagagccgattgcggatcccagagcttcggcctgctggaccccaagctgtgctacctgctggatggcatcctgttcatctacggcgtgatcctgaccgccctgttcctgagagtgaagttcagcagaagcgccgacgcccctgcctaccagcagggacagaaccaactgtacaacgagctgaacctgggcagacgggaagagtacgacgtgctggacaagcggagaggcagggaccctgagatgggcggaaagccccagcggagaaagaacccccaggaaggactgtataacgaactccagaaagacaagatggccgaagcctacagcgagatcggcatgaagggcgagcggagaagaggcaagggccacgatggcctgtaccagggcctgagcaccgccaccaaggacacctatgacgccctgcacatgcaggccctgcctccaagaagggccaagcgatctggatctggagcaacaaacttctcactactcaaacaagcaggtgacgtggaggagaatcccgggcctactagtatggactggatttggcgcatccttttccttgtcggcgctgctaccggcgcgcattccttcgaacaatctgctctgacacagcctgccagcgtgtcaggatctcctggacagagcatcaccatctcttgcaccggcaccagctctgatgtcggcggctacaattacgtgtcctggtatcagcagcaccccggcaaggcccctaaagtgattatcagcgaagtgaacaacagacccagcggcgtgtcccacagattcagcggctctaagtctggcaacaccgccagcctgacaatctctggactgcaagccgaggacgaggccgactacttctgtagcagctacaccagcggcagaaccctgtacgtgttcggcacaggcagcaaagtgacagtgctgggaacgcgtatccagaaccctgatcctgccgtgtaccagctgcgggatagcaagagcagcgacaagagcgtgtgtctgttcaccgacttcgacagccagaccaacgtgtcccagagcaaggactccgacgtgtacatcaccgataagaccgtgctggacatgcggagcatggacttcaagagcaactccgccgtggcctggtccaacaagtccgatttcgcctgcgccaacgccttcaacaacagcattatccccgaggacacattcttcccaagccccgagagcagctgcggtacccagagttttgggttgttggaccctaaattgtgctatctgttggacggaatcctgttcatttacggagtgatcctgaccgcattgttcctgcgggttaagttttccagatccgcagacgcacccgcttaccaacaagggcagaaccaactctacaatgaacttaatttggggcggagggaagagtacgacgttctggacaaaaggaggggacgagatcccgagatgggcggaaagcctcagcgaaggaagaatccgcaagaggggctttataacgaactccagaaagataaaatggcagaagcctatagtgagattgggatgaagggagaaaggaggaggggtaaaggtcacgatgggttgtaccaaggattgagcacagccactaaagatacctatgatgcgctccacatgcaggccctgccgccaaga

SEQ ID NO: 2317 - DNA, 2886 bp, Artificial Sequence
  Synthetic Polynucloetide
atggccttaccagtgaccgccttgctcctgccgctggccttgctgctccacgccgccaggccggaagtgcagctggttgaatctggcggaggactggttcagcctggcggatctctgagactgtcttgtgccgccagcggcttcagcttcagcgacttttggatgagctgggtccgacaggcccctggcaaaggacttgaatgggtcgccacaatcagccaggccggcagcgagaaggactacgtggactctgtgaagggcagattcaccatcagccgggacaacgccaagaagtccctgtacctccagatgaacagcctgagagccgaggacaccgccgtgtactattgtgcctctggcgtgtacagcttcgactacagaggccagggcaccctggtcacagtctcttctggtaccggcggaggcggatctggcggcggaggtagcggtggcggaggatctgaattccaatctgctctgacacagcctgccagcgcctctggatctcctggacagagcgtgaccatctcctgtaccggcacctcttctgatgtcggcggctacaactacgtgtcctggtatcagcagcaccccggcaaggcccctaagctgatgatctacgacgtgtccaacagacccagcggcgtgtccaatagattctccggcagcaagagcggcaacaccgccagcctgacaatttctggactgcaagccgaggacgaggccgactactactgtagcagctacaccagcagcagcacactgtacgtgttcggcacaggcacccagctcacagttcttctcgaggacctgaagaacgtgttcccacctgaggtggccgtgttcgagcctagcgaggccgagatcagccacacccagaaagccaccctcgtgtgcctggctaccggcttctaccccgaccatgtggaactgtcttggtgggtcaacggcaaagaggtgcacagcggcgtgtctaccgacccccagccactgaaagaacagcccgccctgaacgacagccggtactgcctgagcagcagactgagagtgtccgccaccttctggcagaacccccggaaccacttcagatgccaggtgcagttctacggcctgagcgagaacgacgagtggacccaggacagagccaagcccgtgacccagatcgtgtctgccgaagcctggggcagagccgattgcggatcccagagcttcggcctgctggaccccaagctgtgctacctgctggatggcatcctgttcatctacggcgtgatcctgaccgccctgttcctgagagtgaagttcagcagaagcgccgacgcccctgcctaccagcagggacagaaccaactgtacaacgagctgaacctgggcagacgggaagagtacgacgtgctggacaagcggagaggcagggaccctgagatgggcggaaagccccagcggagaaagaacccccaggaaggactgtataacgaactccagaaagacaagatggccgaagcctacagcgagatcggcatgaagggcgagcggagaagaggcaagggccacgatggcctgtaccagggcctgagcaccgccaccaaggacacctatgacgccctgcacatgcaggccctgcctccaagaagggccaagcgatctggatctggagcaacaaacttctcactactcaaacaagcaggtgacgtggaggagaatcccgggcctactagtatggactggatttggcgcatccttttccttgtcggcgctgctaccggcgcgcattccttcgaagaagtgcagctccagcagtctggacctggcctggttaagcctagccagacactgagcctgacctgtgccatcagcggcgattccatgctgagcaacagcgacacctggaactggatcagacagagccccagcagaggcctggaatggctgggcagaacataccacagaagcacttggtacgacgactacgccagctctgtgcggggcagagtgtccatcaatgtggacaccagcaagaaccagtacagcctgcaactgaacgccgtgacacctgaggataccggcgtgtactactgtgccagagtgcggctccaggacggcaattcttggagcgacgcctttgatgtgtggggccagggcacaatggtcaccgtttctagcacgcgtatccagaaccctgatcctgccgtgtaccagctgcgggatagcaagagcagcgacaagagcgtgtgtctgttcaccgacttcgacagccagaccaacgtgtcccagagcaaggactccgacgtgtacatcaccgataagaccgtgctggacatgcggagcatggacttcaagagcaactccgccgtggcctggtccaacaagtccgatttcgcctgcgccaacgccttcaacaacagcattatccccgaggacacattcttcccaagccccgagagcagctgcggtacccagagttttgggttgttggaccctaaattgtgctatctgttggacggaatcctgttcatttacggagtgatcctgaccgcattgttcctgcgggttaagttttccagatccgcagacgcacccgcttaccaacaagggcagaaccaactctacaatgaacttaatttggggcggagggaagagtacgacgttctggacaaaaggaggggacgagatcccgagatgggcggaaagcctcagcgaaggaagaatccgcaagaggggctttataacgaactccagaaagataaaatggcagaagcctatagtgagattgggatgaagggagaaaggaggaggggtaaaggtcacgatgggttgtaccaaggattgagcacagccactaaagatacctatgatgcgctccacatgcaggccctgccgccaaga

SEQ ID NO: 2318 - DNA, 2886 bp, Artificial Sequence
  Synthetic Polynucloetide
atggccttaccagtgaccgccttgctcctgccgctggccttgctgctccacgccgccaggccggaagtgcagctggttgaatctggcggaggactggttcagcctggcggatctctgagactgtcttgtgccgccagcggcttcagcttcagcgacttttggatgagctgggtccgacaggcccctggcaaaggacttgaatgggtcgccacaatcagccaggccggcagcgagaaggactacgtggactctgtgaagggcagattcaccatcagccgggacaacgccaagaagtccctgtacctccagatgaacagcctgagagccgaggacaccgccgtgtactattgtgcctctggcgtgtacagcttcgactacagaggccagggcaccctggtcacagtctcttctggtaccggcggaggcggatctggcggcggaggtagcggtggcggaggatctgaattcgacgtgatgctgacccagacaccactgagcctgcctgtgtctctgggcgatcaggccagcatctcctgtagaagcagccagagcatcctgcacagcaccggcgatacctacctggaatggtatctccagaagcctggacagagccccaagctgctgattaacaaggtgtccaaccggctgagcggcgtgcccgatagattttctggcagcggctctggcaccgacttcaccctgaagatcagcagagtggaagccgaggacctgggcgtgtactactgcttccaaggcagccatgttccttggacctttggcggaggcaccaagctggaaatcaagagagctgacgccgctcctaccgtgtccatctttcctctcgaggacctgaagaacgtgttcccacctgaggtggccgtgttcgagcctagcgaggccgagatcagccacacccagaaagccaccctcgtgtgcctggctaccggcttctaccccgaccatgtggaactgtcttggtgggtcaacggcaaagaggtgcacagcggcgtgtctaccgacccccagccactgaaagaacagcccgccctgaacgacagccggtactgcctgagcagcagactgagagtgtccgccaccttctggcagaacccccggaaccacttcagatgccaggtgcagttctacggcctgagcgagaacgacgagtggacccaggacagagccaagcccgtgacccagatcgtgtctgccgaagcctggggcagagccgattgcggatcccagagcttcggcctgctggaccccaagctgtgctacctgctggatggcatcctgttcatctacggcgtgatcctgaccgccctgttcctgagagtgaagttcagcagaagcgccgacgcccctgcctaccagcagggacagaaccaactgtacaacgagctgaacctgggcagacgggaagagtacgacgtgctggacaagcggagaggcagggaccctgagatgggcggaaagccccagcggagaaagaacccccaggaaggactgtataacgaactccagaaagacaagatggccgaagcctacagcgagatcggcatgaagggcgagcggagaagaggcaagggccacgatggcctgtaccagggcctgagcaccgccaccaaggacacctatgacgccctgcacatgcaggccctgcctccaagaagggccaagcgatctggatctggagcaacaaacttctcactactcaaacaagcaggtgacgtggaggagaatcccgggcctactagtatggactggatttggcgcatccttttccttgtcggcgctgctaccggcgcgcattccttcgaacaagtgaagctccagcagagcggccctagccttgtgaaacctggcgcttccgtgaagatgagctgcaaggccagcggctacaccttcaccgatttctacatgaaatgggtcaagcagagccacggcaagtctctggaatggatcggcgacatcaaccccaacatcggagacaccttctacaaccagaagttcaagggcaaagccacactgaccgtggacaagagcagcagcaccgcctacatgcagctcaacagcctgaccagcgaggacagcgccgtgtacttttgttccgtgggctacttcgacgtgtggggagccggaacaaccgtgacagtctcttctacgcgtatccagaaccctgatcctgccgtgtaccagctgcgggatagcaagagcagcgacaagagcgtgtgtctgttcaccgacttcgacagccagaccaacgtgtcccagagcaaggactccgacgtgtacatcaccgataagaccgtgctggacatgcggagcatggacttcaagagcaactccgccgtggcctggtccaacaagtccgatttcgcctgcgccaacgccttcaacaacagcattatccccgaggacacattcttcccaagccccgagagcagctgcggtacccagagttttgggttgttggaccctaaattgtgctatctgttggacggaatcctgttcatttacggagtgatcctgaccgcattgttcctgcgggttaagttttccagatccgcagacgcacccgcttaccaacaagggcagaaccaactctacaatgaacttaatttggggcggagggaagagtacgacgttctggacaaaaggaggggacgagatcccgagatgggcggaaagcctcagcgaaggaagaatccgcaagaggggctttataacgaactccagaaagataaaatggcagaagcctatagtgagattgggatgaagggagaaaggaggaggggtaaaggtcacgatgggttgtaccaaggattgagcacagccactaaagatacctatgatgcgctccacatgcaggccctgccgccaaga

SEQ ID NO: 2319 - DNA, 2874 bp, Artificial Sequence
  Synthetic Polynucloetide
atggccttaccagtgaccgccttgctcctgccgctggccttgctgctccacgccgccaggccggaagtgcagctggttgaatctggcggaggactggttcagcctggcggatctctgagactgtcttgtgccgccagcggcttcagcttcagcgacttttggatgagctgggtccgacaggcccctggcaaaggacttgaatgggtcgccacaatcagccaggccggcagcgagaaggactacgtggactctgtgaagggcagattcaccatcagccgggacaacgccaagaagtccctgtacctccagatgaacagcctgagagccgaggacaccgccgtgtactattgtgcctctggcgtgtacagcttcgactacagaggccagggcaccctggtcacagtctcttctggtaccggcggaggcggatctggcggcggaggtagcggtggcggaggatctgaattcgagatcgtgctgacacagtctcccgccacactgtcactgtctccaggcgaaagagccacactgagctgtagagccagccagagcgtgtccatctacctggcctggtatcagcagaagcctggacaggctccccggctgctgatctacgatgccagcaatagagccacaggcatccccgccagattttctggctctggcagcggcaccgatttcaccctgaccataagcagcctggaacctgaggacttcgccgtgtactactgccagcagagaagcaactggcctcctttcacattcggccctggcaccaaggtggacatcaaactcgaggacctgaagaacgtgttcccacctgaggtggccgtgttcgagcctagcgaggccgagatcagccacacccagaaagccaccctcgtgtgcctggctaccggcttctaccccgaccatgtggaactgtcttggtgggtcaacggcaaagaggtgcacagcggcgtgtctaccgacccccagccactgaaagaacagcccgccctgaacgacagccggtactgcctgagcagcagactgagagtgtccgccaccttctggcagaacccccggaaccacttcagatgccaggtgcagttctacggcctgagcgagaacgacgagtggacccaggacagagccaagcccgtgacccagatcgtgtctgccgaagcctggggcagagccgattgcggatcccagagcttcggcctgctggaccccaagctgtgctacctgctggatggcatcctgttcatctacggcgtgatcctgaccgccctgttcctgagagtgaagttcagcagaagcgccgacgcccctgcctaccagcagggacagaaccaactgtacaacgagctgaacctgggcagacgggaagagtacgacgtgctggacaagcggagaggcagggaccctgagatgggcggaaagccccagcggagaaagaacccccaggaaggactgtataacgaactccagaaagacaagatggccgaagcctacagcgagatcggcatgaagggcgagcggagaagaggcaagggccacgatggcctgtaccagggcctgagcaccgccaccaaggacacctatgacgccctgcacatgcaggccctgcctccaagaagggccaagcgatctggatctggagcaacaaacttctcactactcaaacaagcaggtgacgtggaggagaatcccgggcctactagtatggactggatttggcgcatccttttccttgtcggcgctgctaccggcgcgcattccttcgaacaggtgcagcttgttgaaagcggaggcggagttgtgcagcctggcagaagtctgagactgtcttgtgccgccagcggcttcaccttcagcagctatggaatgcactgggtccgacaggcccctggcaaaggacttgaatgggttgccgtgatctgggacgacggcagcaacaagtattacgtggacagcgtgaagggcagattcaccatcagccgggacaacagcaagaacaccctgtacctccagatgaacagcctgagagccgaggacacagccgtgtattattgcgccagagatgactactacggcagcggctccttcaacagctactatggcacagacgtgtggggccagggcacaacagttaccgttagctctacgcgtatccagaaccctgatcctgccgtgtaccagctgcgggatagcaagagcagcgacaagagcgtgtgtctgttcaccgacttcgacagccagaccaacgtgtcccagagcaaggactccgacgtgtacatcaccgataagaccgtgctggacatgcggagcatggacttcaagagcaactccgccgtggcctggtccaacaagtccgatttcgcctgcgccaacgccttcaacaacagcattatccccgaggacacattcttcccaagccccgagagcagctgcggtacccagagttttgggttgttggaccctaaattgtgctatctgttggacggaatcctgttcatttacggagtgatcctgaccgcattgttcctgcgggttaagttttccagatccgcagacgcacccgcttaccaacaagggcagaaccaactctacaatgaacttaatttggggcggagggaagagtacgacgttctggacaaaaggaggggacgagatcccgagatgggcggaaagcctcagcgaaggaagaatccgcaagaggggctttataacgaactccagaaagataaaatggcagaagcctatagtgagattgggatgaagggagaaaggaggaggggtaaaggtcacgatgggttgtaccaaggattgagcacagccactaaagatacctatgatgcgctccacatgcaggccctgccgccaaga

SEQ ID NO: 2320 - DNA, 2829 bp, Artificial Sequence
  Synthetic Polynucloetide
atggccttaccagtgaccgccttgctcctgccgctggccttgctgctccacgccgccaggccggaagtgcagctggttgaatctggcggaggactggttcagcctggcggatctctgagactgtcttgtgccgccagcggcttcagcttcagcgacttttggatgagctgggtccgacaggcccctggcaaaggacttgaatgggtcgccacaatcagccaggccggcagcgagaaggactacgtggactctgtgaagggcagattcaccatcagccgggacaacgccaagaagtccctgtacctccagatgaacagcctgagagccgaggacaccgccgtgtactattgtgcctctggcgtgtacagcttcgactacagaggccagggcaccctggtcacagtctcttctggtaccggcggaggcggatctggcggcggaggtagcggtggcggaggatctgaattcgacatccagatgacacagagccctagcagcctgtctgccagcgtgggagacagagtgaccatcacctgtagagccagccagggcatctcttcttggctggcctggtatcagcagaagcccgagaaggcccctaagagcctgatctatgccgccagctctctccagagcggagtgcctagcagattttctggcagcggctccggcaccgatttcaccctgacaatatccagcctccagcctgaggacttcgccacctactactgccagcagtacaacagctacccctacaccttcggccagggcaccaagctggaaatcaaactcgaggacctgaagaacgtgttcccacctgaggtggccgtgttcgagcctagcgaggccgagatcagccacacccagaaagccaccctcgtgtgcctggctaccggcttctaccccgaccatgtggaactgtcttggtgggtcaacggcaaagaggtgcacagcggcgtgtctaccgacccccagccactgaaagaacagcccgccctgaacgacagccggtactgcctgagcagcagactgagagtgtccgccaccttctggcagaacccccggaaccacttcagatgccaggtgcagttctacggcctgagcgagaacgacgagtggacccaggacagagccaagcccgtgacccagatcgtgtctgccgaagcctggggcagagccgattgcggatcccagagcttcggcctgctggaccccaagctgtgctacctgctggatggcatcctgttcatctacggcgtgatcctgaccgccctgttcctgagagtgaagttcagcagaagcgccgacgcccctgcctaccagcagggacagaaccaactgtacaacgagctgaacctgggcagacgggaagagtacgacgtgctggacaagcggagaggcagggaccctgagatgggcggaaagccccagcggagaaagaacccccaggaaggactgtataacgaactccagaaagacaagatggccgaagcctacagcgagatcggcatgaagggcgagcggagaagaggcaagggccacgatggcctgtaccagggcctgagcaccgccaccaaggacacctatgacgccctgcacatgcaggccctgcctccaagaagggccaagcgatctggatctggagcaacaaacttctcactactcaaacaagcaggtgacgtggaggagaatcccgggcctactagtatggactggatttggcgcatccttttccttgtcggcgctgctaccggcgcgcattccttcgaagaagtgcaactggttcaatctggcggcggactggttcatccaggcggttctctgagactgagctgtgccggctctggcttcaccttcagcacctacctgatgtactgggtccgacaggcccctggcaagacactggaatgggtgtccgctattggcagcggaggcgatacctactacgccgactctgtgaagggcagattcaccatcagccgggacaacgccaagaacagcctgtacctccagatgaactccctgagagccgaggacatggccgtgtactactgtgccagaggactcggctattggggccagggaacactggtcacagtgtcctctacgcgtatccagaaccctgatcctgccgtgtaccagctgcgggatagcaagagcagcgacaagagcgtgtgtctgttcaccgacttcgacagccagaccaacgtgtcccagagcaaggactccgacgtgtacatcaccgataagaccgtgctggacatgcggagcatggacttcaagagcaactccgccgtggcctggtccaacaagtccgatttcgcctgcgccaacgccttcaacaacagcattatccccgaggacacattcttcccaagccccgagagcagctgcggtacccagagttttgggttgttggaccctaaattgtgctatctgttggacggaatcctgttcatttacggagtgatcctgaccgcattgttcctgcgggttaagttttccagatccgcagacgcacccgcttaccaacaagggcagaaccaactctacaatgaacttaatttggggcggagggaagagtacgacgttctggacaaaaggaggggacgagatcccgagatgggcggaaagcctcagcgaaggaagaatccgcaagaggggctttataacgaactccagaaagataaaatggcagaagcctatagtgagattgggatgaagggagaaaggaggaggggtaaaggtcacgatgggttgtaccaaggattgagcacagccactaaagatacctatgatgcgctccacatgcaggccctgccgccaaga

SEQ ID NO: 2321 - DNA, 2886 bp, Artificial Sequence
  Synthetic Polynucloetide
atggccttaccagtgaccgccttgctcctgccgctggccttgctgctccacgccgccaggccggaagtgcagctggttgaatctggcggaggactggttcagcctggcggatctctgagactgtcttgtgccgccagcggcttcagcttcagcgacttttggatgagctgggtccgacaggcccctggcaaaggacttgaatgggtcgccacaatcagccaggccggcagcgagaaggactacgtggactctgtgaagggcagattcaccatcagccgggacaacgccaagaagtccctgtacctccagatgaacagcctgagagccgaggacaccgccgtgtactattgtgcctctggcgtgtacagcttcgactacagaggccagggcaccctggtcacagtctcttctggtaccggcggaggcggatctggcggcggaggtagcggtggcggaggatctgaattcctgcctgttctgacacagcctccatccgtgtctgtggcccctggaaagaccgccagaatcacatgcggcggcaacaacatcggcagcaagagcgtgcactggtatcagcagaagcctggacaggctcctgtgctggtggtgtacgacgacagcgatagacctagcggcatccccgagagattcagcggcagcaattccggcaataccgccacactgaccatcagcagagtggaagctggcgacgaggccgactactactgccaagtgtgggacagcagcagcgactacgtggtgtttggcggcggaacaaagctgacagtgcttctcgaggacctgaagaacgtgttcccacctgaggtggccgtgttcgagcctagcgaggccgagatcagccacacccagaaagccaccctcgtgtgcctggctaccggcttctaccccgaccatgtggaactgtcttggtgggtcaacggcaaagaggtgcacagcggcgtgtctaccgacccccagccactgaaagaacagcccgccctgaacgacagccggtactgcctgagcagcagactgagagtgtccgccaccttctggcagaacccccggaaccacttcagatgccaggtgcagttctacggcctgagcgagaacgacgagtggacccaggacagagccaagcccgtgacccagatcgtgtctgccgaagcctggggcagagccgattgcggatcccagagcttcggcctgctggaccccaagctgtgctacctgctggatggcatcctgttcatctacggcgtgatcctgaccgccctgttcctgagagtgaagttcagcagaagcgccgacgcccctgcctaccagcagggacagaaccaactgtacaacgagctgaacctgggcagacgggaagagtacgacgtgctggacaagcggagaggcagggaccctgagatgggcggaaagccccagcggagaaagaacccccaggaaggactgtataacgaactccagaaagacaagatggccgaagcctacagcgagatcggcatgaagggcgagcggagaagaggcaagggccacgatggcctgtaccagggcctgagcaccgccaccaaggacacctatgacgccctgcacatgcaggccctgcctccaagaagggccaagcgatctggatctggagcaacaaacttctcactactcaaacaagcaggtgacgtggaggagaatcccgggcctactagtatggactggatttggcgcatccttttccttgtcggcgctgctaccggcgcgcattccttcgaagaagttcaactggtgcagagcggagccgaagtgaagaagccaggcgagagcctgaagattagctgcaaaggcagcggctacagcttcaccagctactggatcggctgggtccgacagatgcctggcaaaggactggaatggatgggcatcatctaccccggcgacagcgacaccagatacagccctagctttcagggccaagtgaccatctccgccgacaagagcatcagcacagcctacctccagtggtcctctctgaaggccagcgataccgccatgtactactgcgccagacaagtctggggatggcaaggcggcatgtaccccaggtctaactggtggtacaacctggactcttggggccagggcacactggtcacagtctcttctacgcgtatccagaaccctgatcctgccgtgtaccagctgcgggatagcaagagcagcgacaagagcgtgtgtctgttcaccgacttcgacagccagaccaacgtgtcccagagcaaggactccgacgtgtacatcaccgataagaccgtgctggacatgcggagcatggacttcaagagcaactccgccgtggcctggtccaacaagtccgatttcgcctgcgccaacgccttcaacaacagcattatccccgaggacacattcttcccaagccccgagagcagctgcggtacccagagttttgggttgttggaccctaaattgtgctatctgttggacggaatcctgttcatttacggagtgatcctgaccgcattgttcctgcgggttaagttttccagatccgcagacgcacccgcttaccaacaagggcagaaccaactctacaatgaacttaatttggggcggagggaagagtacgacgttctggacaaaaggaggggacgagatcccgagatgggcggaaagcctcagcgaaggaagaatccgcaagaggggctttataacgaactccagaaagataaaatggcagaagcctatagtgagattgggatgaagggagaaaggaggaggggtaaaggtcacgatgggttgtaccaaggattgagcacagccactaaagatacctatgatgcgctccacatgcaggccctgccgccaaga

SEQ ID NO: 2322 - DNA, 2865 bp, Artificial Sequence
  Synthetic Polynucloetide
atggccttaccagtgaccgccttgctcctgccgctggccttgctgctccacgccgccaggccggaagtgcagctggttgaatctggcggaggactggttcagcctggcggatctctgagactgtcttgtgccgccagcggcttcagcttcagcgacttttggatgagctgggtccgacaggcccctggcaaaggacttgaatgggtcgccacaatcagccaggccggcagcgagaaggactacgtggactctgtgaagggcagattcaccatcagccgggacaacgccaagaagtccctgtacctccagatgaacagcctgagagccgaggacaccgccgtgtactattgtgcctctggcgtgtacagcttcgactacagaggccagggcaccctggtcacagtctcttctggtaccggcggaggcggatctggcggcggaggtagcggtggcggaggatctgaattcgagctggtcatgacacagagccctgcttctctggccgtgtcactgggacagagagccaccatctcttgcagagccagcgagagcgtggacagctacggcaagagcttcatgcactggtatcagctcaagcccggccagcctcctaagctgctgatctacagagcctccaacctggaaagcggcgtgccagccagattttctggcagcggcagcagaaccgacttcaccctgaccattgatcccgtggaagccgatgatgccgccacctactactgccagcagaacaacgaggacccctggacatttggcggaggcaccaagctggaaatcaaactcgaggacctgaagaacgtgttcccacctgaggtggccgtgttcgagcctagcgaggccgagatcagccacacccagaaagccaccctcgtgtgcctggctaccggcttctaccccgaccatgtggaactgtcttggtgggtcaacggcaaagaggtgcacagcggcgtgtctaccgacccccagccactgaaagaacagcccgccctgaacgacagccggtactgcctgagcagcagactgagagtgtccgccaccttctggcagaacccccggaaccacttcagatgccaggtgcagttctacggcctgagcgagaacgacgagtggacccaggacagagccaagcccgtgacccagatcgtgtctgccgaagcctggggcagagccgattgcggatcccagagcttcggcctgctggaccccaagctgtgctacctgctggatggcatcctgttcatctacggcgtgatcctgaccgccctgttcctgagagtgaagttcagcagaagcgccgacgcccctgcctaccagcagggacagaaccaactgtacaacgagctgaacctgggcagacgggaagagtacgacgtgctggacaagcggagaggcagggaccctgagatgggcggaaagccccagcggagaaagaacccccaggaaggactgtataacgaactccagaaagacaagatggccgaagcctacagcgagatcggcatgaagggcgagcggagaagaggcaagggccacgatggcctgtaccagggcctgagcaccgccaccaaggacacctatgacgccctgcacatgcaggccctgcctccaagaagggccaagcgatctggatctggagcaacaaacttctcactactcaaacaagcaggtgacgtggaggagaatcccgggcctactagtatggactggatttggcgcatccttttccttgtcggcgctgctaccggcgcgcattccttcgaagaagtgcagctcgaacagtctggccccgagcttgtgaaacctggcgcttccgtgaagatgagctgcaaggccagcggctacaccttcaccaactactacatgaaatgggtcaagcagagccacggcaagtccctggaatggatcggcgatctgaaccccaacaacggcgacaccttctacaaccagaagttcaagggcaaagccacactgaccgtggacaagagcagcaacaccgcctacatgcagctcaactccctgaccagcgaggacagcgccgtgtactactgtgccagaaccggcagatacgaagagaacgctatggactactggggccagggcacaagcgtgacagtctcttctacgcgtatccagaaccctgatcctgccgtgtaccagctgcgggatagcaagagcagcgacaagagcgtgtgtctgttcaccgacttcgacagccagaccaacgtgtcccagagcaaggactccgacgtgtacatcaccgataagaccgtgctggacatgcggagcatggacttcaagagcaactccgccgtggcctggtccaacaagtccgatttcgcctgcgccaacgccttcaacaacagcattatccccgaggacacattcttcccaagccccgagagcagctgcggtacccagagttttgggttgttggaccctaaattgtgctatctgttggacggaatcctgttcatttacggagtgatcctgaccgcattgttcctgcgggttaagttttccagatccgcagacgcacccgcttaccaacaagggcagaaccaactctacaatgaacttaatttggggcggagggaagagtacgacgttctggacaaaaggaggggacgagatcccgagatgggcggaaagcctcagcgaaggaagaatccgcaagaggggctttataacgaactccagaaagataaaatggcagaagcctatagtgagattgggatgaagggagaaaggaggaggggtaaaggtcacgatgggttgtaccaaggattgagcacagccactaaagatacctatgatgcgctccacatgcaggccctgccgccaaga

SEQ ID NO: 2323 - DNA, 2847 bp, Artificial Sequence
  Synthetic Polynucloetide
atggccttaccagtgaccgccttgctcctgccgctggccttgctgctccacgccgccaggccggaagtgcagctggttgaatctggcggaggactggttcagcctggcggatctctgagactgtcttgtgccgccagcggcttcagcttcagcgacttttggatgagctgggtccgacaggcccctggcaaaggacttgaatgggtcgccacaatcagccaggccggcagcgagaaggactacgtggactctgtgaagggcagattcaccatcagccgggacaacgccaagaagtccctgtacctccagatgaacagcctgagagccgaggacaccgccgtgtactattgtgcctctggcgtgtacagcttcgactacagaggccagggcaccctggtcacagtctcttctggtaccggcggaggcggatctggcggcggaggtagcggtggcggaggatctgaattcgacgtggtcatgacacagagcccttctagcctgtctgccagcgtgggcgacagagtgaccatcacctgtatggcctccgaggacatctacatccggctggcctggtatcagcagaagcctggaaacgcccctaagctgctgatctacgccgccacctctctggaaacaggcgtgccaagcagattttccggcagcggctctggcaccgatttcaccctgacaatatccagcctccagcctgaggacttcgccacctactactgccagcagtattggagcagcccctggacatttggcggaggcaccaaggtggaaatcaaactcgaggacctgaagaacgtgttcccacctgaggtggccgtgttcgagcctagcgaggccgagatcagccacacccagaaagccaccctcgtgtgcctggctaccggcttctaccccgaccatgtggaactgtcttggtgggtcaacggcaaagaggtgcacagcggcgtgtctaccgacccccagccactgaaagaacagcccgccctgaacgacagccggtactgcctgagcagcagactgagagtgtccgccaccttctggcagaacccccggaaccacttcagatgccaggtgcagttctacggcctgagcgagaacgacgagtggacccaggacagagccaagcccgtgacccagatcgtgtctgccgaagcctggggcagagccgattgcggatcccagagcttcggcctgctggaccccaagctgtgctacctgctggatggcatcctgttcatctacggcgtgatcctgaccgccctgttcctgagagtgaagttcagcagaagcgccgacgcccctgcctaccagcagggacagaaccaactgtacaacgagctgaacctgggcagacgggaagagtacgacgtgctggacaagcggagaggcagggaccctgagatgggcggaaagccccagcggagaaagaacccccaggaaggactgtataacgaactccagaaagacaagatggccgaagcctacagcgagatcggcatgaagggcgagcggagaagaggcaagggccacgatggcctgtaccagggcctgagcaccgccaccaaggacacctatgacgccctgcacatgcaggccctgcctccaagaagggccaagcgatctggatctggagcaacaaacttctcactactcaaacaagcaggtgacgtggaggagaatcccgggcctactagtatggactggatttggcgcatccttttccttgtcggcgctgctaccggcgcgcattccttcgaacaggttcagctgcaagagtctggccccggactggtcaagcctagccaaacactgagcctgacctgtaccgtgtccggctacagcatcaccagcgactacacctggaactggatcagacagcctcctggcaacggactggaatggatcggctacatcacctacagcggcagcaccagctacaaccccagcctgaaaagccgggtgctgatctccgtggacaccagcaagaatcaggtgtccctgaagctgagcagcgtgacagccgctgataccgccgtgtactactgtgccagactggggagaagatacacaatggactactggggccagggcaccaccgtgacagtttcttctacgcgtatccagaaccctgatcctgccgtgtaccagctgcgggatagcaagagcagcgacaagagcgtgtgtctgttcaccgacttcgacagccagaccaacgtgtcccagagcaaggactccgacgtgtacatcaccgataagaccgtgctggacatgcggagcatggacttcaagagcaactccgccgtggcctggtccaacaagtccgatttcgcctgcgccaacgccttcaacaacagcattatccccgaggacacattcttcccaagccccgagagcagctgcggtacccagagttttgggttgttggaccctaaattgtgctatctgttggacggaatcctgttcatttacggagtgatcctgaccgcattgttcctgcgggttaagttttccagatccgcagacgcacccgcttaccaacaagggcagaaccaactctacaatgaacttaatttggggcggagggaagagtacgacgttctggacaaaaggaggggacgagatcccgagatgggcggaaagcctcagcgaaggaagaatccgcaagaggggctttataacgaactccagaaagataaaatggcagaagcctatagtgagattgggatgaagggagaaaggaggaggggtaaaggtcacgatgggttgtaccaaggattgagcacagccactaaagatacctatgatgcgctccacatgcaggccctgccgccaaga

SEQ ID NO: 2324 - DNA, 2859 bp, Artificial Sequence
  Synthetic Polynucloetide
atggccttaccagtgaccgccttgctcctgccgctggccttgctgctccacgccgccaggccggaagtgcagctggttgaatctggcggaggactggttcagcctggcggatctctgagactgtcttgtgccgccagcggcttcagcttcagcgacttttggatgagctgggtccgacaggcccctggcaaaggacttgaatgggtcgccacaatcagccaggccggcagcgagaaggactacgtggactctgtgaagggcagattcaccatcagccgggacaacgccaagaagtccctgtacctccagatgaacagcctgagagccgaggacaccgccgtgtactattgtgcctctggcgtgtacagcttcgactacagaggccagggcaccctggtcacagtctcttctggtaccggcggaggcggatctggcggcggaggtagcggtggcggaggatctgaattcgatattgtgctgactcagagccctgccactctgagccttagtccaggcgacagagctaccatctcctgtagggcctctgaatccgtgaccattctgggctctcatctcatatattggtatcaacaaaagccgggccagcctccacggctgctcattcaactggcctctaacgtgcagaccggcgtgccagctagattttctggctctggctcccggaccgactttacactgacaatcagctccgtggaacccgaagattttgccgtctattattgcctccagtccaggaccattcctcggacattcggccagggaacaaaactcgaaatcaagcggctcgaggacctgaagaacgtgttcccacctgaggtggccgtgttcgagcctagcgaggccgagatcagccacacccagaaagccaccctcgtgtgcctggctaccggcttctaccccgaccatgtggaactgtcttggtgggtcaacggcaaagaggtgcacagcggcgtgtctaccgacccccagccactgaaagaacagcccgccctgaacgacagccggtactgcctgagcagcagactgagagtgtccgccaccttctggcagaacccccggaaccacttcagatgccaggtgcagttctacggcctgagcgagaacgacgagtggacccaggacagagccaagcccgtgacccagatcgtgtctgccgaagcctggggcagagccgattgcggatcccagagcttcggcctgctggaccccaagctgtgctacctgctggatggcatcctgttcatctacggcgtgatcctgaccgccctgttcctgagagtgaagttcagcagaagcgccgacgcccctgcctaccagcagggacagaaccaactgtacaacgagctgaacctgggcagacgggaagagtacgacgtgctggacaagcggagaggcagggaccctgagatgggcggaaagccccagcggagaaagaacccccaggaaggactgtataacgaactccagaaagacaagatggccgaagcctacagcgagatcggcatgaagggcgagcggagaagaggcaagggccacgatggcctgtaccagggcctgagcaccgccaccaaggacacctatgacgccctgcacatgcaggccctgcctccaagaagggccaagcgatctggatctggagcaacaaacttctcactactcaaacaagcaggtgacgtggaggagaatcccgggcctactagtatggactggatttggcgcatccttttccttgtcggcgctgctaccggcgcgcattccttcgaacaggtgcagctcgttcagagtggccccgaagtgaaaaagccaggcgagtccgtgaagatttcctgcaaagcctccggctacacattccggcactactctatgaattgggtcaagcaggccccaggccagggccttaagtggatgggacgcatcaataccgagtccggcgtgccaatctacgccgatgacttcaaaggccggttcagcttcaccgtggatacctctgcctccaccgcctacctggaaatcagcagcctgaccagcgaggatacagctgtgtacttctgtagcaacgattacctctacagcctggatttctggggacagggaaccacactgaccgtgtctagcacgcgtatccagaaccctgatcctgccgtgtaccagctgcgggatagcaagagcagcgacaagagcgtgtgtctgttcaccgacttcgacagccagaccaacgtgtcccagagcaaggactccgacgtgtacatcaccgataagaccgtgctggacatgcggagcatggacttcaagagcaactccgccgtggcctggtccaacaagtccgatttcgcctgcgccaacgccttcaacaacagcattatccccgaggacacattcttcccaagccccgagagcagctgcggtacccagagttttgggttgttggaccctaaattgtgctatctgttggacggaatcctgttcatttacggagtgatcctgaccgcattgttcctgcgggttaagttttccagatccgcagacgcacccgcttaccaacaagggcagaaccaactctacaatgaacttaatttggggcggagggaagagtacgacgttctggacaaaaggaggggacgagatcccgagatgggcggaaagcctcagcgaaggaagaatccgcaagaggggctttataacgaactccagaaagataaaatggcagaagcctatagtgagattgggatgaagggagaaaggaggaggggtaaaggtcacgatgggttgtaccaaggattgagcacagccactaaagatacctatgatgcgctccacatgcaggccctgccgccaaga

SEQ ID NO: 2325 - DNA, 2859 bp, Artificial Sequence
  Synthetic Polynucloetide
atggccttaccagtgaccgccttgctcctgccgctggccttgctgctccacgccgccaggccggaagtgcagctggttgaatctggcggaggactggttcagcctggcggatctctgagactgtcttgtgccgccagcggcttcagcttcagcgacttttggatgagctgggtccgacaggcccctggcaaaggacttgaatgggtcgccacaatcagccaggccggcagcgagaaggactacgtggactctgtgaagggcagattcaccatcagccgggacaacgccaagaagtccctgtacctccagatgaacagcctgagagccgaggacaccgccgtgtactattgtgcctctggcgtgtacagcttcgactacagaggccagggcaccctggtcacagtctcttctggtaccggcggaggcggatctggcggcggaggtagcggtggcggaggatctgaattcgacatcgtgctgacacagtctcccgccacactgtcactgagccctggcgatagagccacactgagctgtagagccagcgagagcgtgacaatcctgggcagccacctgatctactggtatcagcagaagcccggacaggcccctagactgctgattcagctcgccagcaatgtgcagacaggcatccctgccagattttccggcagcggcagcagaaccgatttcaccctgaccataagcagcctggaacctgaggacttcgccgtgtactactgcctccagagccggacaatccccagaacctttggacagggcaccaagctggaaatcaagagactcgaggacctgaagaacgtgttcccacctgaggtggccgtgttcgagcctagcgaggccgagatcagccacacccagaaagccaccctcgtgtgcctggctaccggcttctaccccgaccatgtggaactgtcttggtgggtcaacggcaaagaggtgcacagcggcgtgtctaccgacccccagccactgaaagaacagcccgccctgaacgacagccggtactgcctgagcagcagactgagagtgtccgccaccttctggcagaacccccggaaccacttcagatgccaggtgcagttctacggcctgagcgagaacgacgagtggacccaggacagagccaagcccgtgacccagatcgtgtctgccgaagcctggggcagagccgattgcggatcccagagcttcggcctgctggaccccaagctgtgctacctgctggatggcatcctgttcatctacggcgtgatcctgaccgccctgttcctgagagtgaagttcagcagaagcgccgacgcccctgcctaccagcagggacagaaccaactgtacaacgagctgaacctgggcagacgggaagagtacgacgtgctggacaagcggagaggcagggaccctgagatgggcggaaagccccagcggagaaagaacccccaggaaggactgtataacgaactccagaaagacaagatggccgaagcctacagcgagatcggcatgaagggcgagcggagaagaggcaagggccacgatggcctgtaccagggcctgagcaccgccaccaaggacacctatgacgccctgcacatgcaggccctgcctccaagaagggccaagcgatctggatctggagcaacaaacttctcactactcaaacaagcaggtgacgtggaggagaatcccgggcctactagtatggactggatttggcgcatccttttccttgtcggcgctgctaccggcgcgcattccttcgaacaggttcagctggtgcagtctggcagcgagctgaagaaacctggcgagagcgtgaagatcagctgcaaggccagcggctacaccttcacacactacagcatgaactgggtccgacaggcccctggacaaggactggaatggatgggcagaatcaacaccgagacaggcgagcccctgtacgccgacgatttcaagggcagattcgtgttcagcctggacaccagcgccagcacagcctatctccagatcagctctctgaaggccgaggacaccgccgtgtactactgctccaacgactacctgtactccctggactattggggccagggcacactggtcacagtgtctagtacgcgtatccagaaccctgatcctgccgtgtaccagctgcgggatagcaagagcagcgacaagagcgtgtgtctgttcaccgacttcgacagccagaccaacgtgtcccagagcaaggactccgacgtgtacatcaccgataagaccgtgctggacatgcggagcatggacttcaagagcaactccgccgtggcctggtccaacaagtccgatttcgcctgcgccaacgccttcaacaacagcattatccccgaggacacattcttcccaagccccgagagcagctgcggtacccagagttttgggttgttggaccctaaattgtgctatctgttggacggaatcctgttcatttacggagtgatcctgaccgcattgttcctgcgggttaagttttccagatccgcagacgcacccgcttaccaacaagggcagaaccaactctacaatgaacttaatttggggcggagggaagagtacgacgttctggacaaaaggaggggacgagatcccgagatgggcggaaagcctcagcgaaggaagaatccgcaagaggggctttataacgaactccagaaagataaaatggcagaagcctatagtgagattgggatgaagggagaaaggaggaggggtaaaggtcacgatgggttgtaccaaggattgagcacagccactaaagatacctatgatgcgctccacatgcaggccctgccgccaaga

SEQ ID NO: 2326 - DNA, 2862 bp, Artificial Sequence
  Synthetic Polynucloetide
atggccttaccagtgaccgccttgctcctgccgctggccttgctgctccacgccgccaggccggaagtgcagctggttgaatctggcggaggactggttcagcctggcggatctctgagactgtcttgtgccgccagcggcttcagcttcagcgacttttggatgagctgggtccgacaggcccctggcaaaggacttgaatgggtcgccacaatcagccaggccggcagcgagaaggactacgtggactctgtgaagggcagattcaccatcagccgggacaacgccaagaagtccctgtacctccagatgaacagcctgagagccgaggacaccgccgtgtactattgtgcctctggcgtgtacagcttcgactacagaggccagggcaccctggtcacagtctcttctggtaccggcggaggcggatctggcggcggaggtagcggtggcggaggatctgaattcgacatccagctgactcagagccctagctttctgagcgccagcgtgggcgacagagtgaccattacatgtagagccagccagggcatcagcaccgacctgaactggtatcagcagaagcctggcaaggcccctaagctgctgatctacgccgccagcaatctggaaagcggcgtgccaagcagattttccggctctggcagcggcaccgagttcaccctgacaatatctagcctccagcctgaggacttcgccacctactactgccagcagagctacaactggccctacacctttggcggaggcaccaaggtggaaatcaagagactcgaggacctgaagaacgtgttcccacctgaggtggccgtgttcgagcctagcgaggccgagatcagccacacccagaaagccaccctcgtgtgcctggctaccggcttctaccccgaccatgtggaactgtcttggtgggtcaacggcaaagaggtgcacagcggcgtgtctaccgacccccagccactgaaagaacagcccgccctgaacgacagccggtactgcctgagcagcagactgagagtgtccgccaccttctggcagaacccccggaaccacttcagatgccaggtgcagttctacggcctgagcgagaacgacgagtggacccaggacagagccaagcccgtgacccagatcgtgtctgccgaagcctggggcagagccgattgcggatcccagagcttcggcctgctggaccccaagctgtgctacctgctggatggcatcctgttcatctacggcgtgatcctgaccgccctgttcctgagagtgaagttcagcagaagcgccgacgcccctgcctaccagcagggacagaaccaactgtacaacgagctgaacctgggcagacgggaagagtacgacgtgctggacaagcggagaggcagggaccctgagatgggcggaaagccccagcggagaaagaacccccaggaaggactgtataacgaactccagaaagacaagatggccgaagcctacagcgagatcggcatgaagggcgagcggagaagaggcaagggccacgatggcctgtaccagggcctgagcaccgccaccaaggacacctatgacgccctgcacatgcaggccctgcctccaagaagggccaagcgatctggatctggagcaacaaacttctcactactcaaacaagcaggtgacgtggaggagaatcccgggcctactagtatggactggatttggcgcatccttttccttgtcggcgctgctaccggcgcgcattccttcgaagaagttcagctggttgaatcaggcggaggactcgtgaaacctggcggctctctgagactgtcttgtgccgccagcggcttcaccttcagcaacttcgagatgaactgggtccgacaggccccaggcaaaggactggaatgggtgtccggcatcagctccaatggccggtacatcaactacgccgacagcgtgaagggcagattcaccatcagccgggacaacgccaagaacagcctgtacctccagatgaactccctgagagccgaggacaccgccgtgtactattgtgccagagtggtggacttcgaccaggactacaacggcttcgactattggggccagggcaccctggttaccgttagctctacgcgtatccagaaccctgatcctgccgtgtaccagctgcgggatagcaagagcagcgacaagagcgtgtgtctgttcaccgacttcgacagccagaccaacgtgtcccagagcaaggactccgacgtgtacatcaccgataagaccgtgctggacatgcggagcatggacttcaagagcaactccgccgtggcctggtccaacaagtccgatttcgcctgcgccaacgccttcaacaacagcattatccccgaggacacattcttcccaagccccgagagcagctgcggtacccagagttttgggttgttggaccctaaattgtgctatctgttggacggaatcctgttcatttacggagtgatcctgaccgcattgttcctgcgggttaagttttccagatccgcagacgcacccgcttaccaacaagggcagaaccaactctacaatgaacttaatttggggcggagggaagagtacgacgttctggacaaaaggaggggacgagatcccgagatgggcggaaagcctcagcgaaggaagaatccgcaagaggggctttataacgaactccagaaagataaaatggcagaagcctatagtgagattgggatgaagggagaaaggaggaggggtaaaggtcacgatgggttgtaccaaggattgagcacagccactaaagatacctatgatgcgctccacatgcaggccctgccgccaaga

SEQ ID NO: 2327 - DNA, 2856 bp, Artificial Sequence
  Synthetic Polynucloetide
atggccttaccagtgaccgccttgctcctgccgctggccttgctgctccacgccgccaggccggaagtgcagctggttgaatctggcggaggactggttcagcctggcggatctctgagactgtcttgtgccgccagcggcttcagcttcagcgacttttggatgagctgggtccgacaggcccctggcaaaggacttgaatgggtcgccacaatcagccaggccggcagcgagaaggactacgtggactctgtgaagggcagattcaccatcagccgggacaacgccaagaagtccctgtacctccagatgaacagcctgagagccgaggacaccgccgtgtactattgtgcctctggcgtgtacagcttcgactacagaggccagggcaccctggtcacagtctcttctggtaccggcggaggcggatctggcggcggaggtagcggtggcggaggatctgaattcgacatccaactgactcagagccccagctttctgagcgcctctgtgggcgacagagtgaccatcacatgtagtctcagcctgggcatcagcacatggcgggattggtttccgccgaggcttggcaggggccttgagccgctgacctacgccgccagcacactgcaaagcggagtgcctagcagattttccggcagcggctctggcaccgagttcaccctgacaatatccagcctccagcctgaggacttcgccacctactactgccagcagctcaacagctaccctctgacctttggcggaggcaccaaggtggaaatcaagagactcgaggacctgaagaacgtgttcccacctgaggtggccgtgttcgagcctagcgaggccgagatcagccacacccagaaagccaccctcgtgtgcctggctaccggcttctaccccgaccatgtggaactgtcttggtgggtcaacggcaaagaggtgcacagcggcgtgtctaccgacccccagccactgaaagaacagcccgccctgaacgacagccggtactgcctgagcagcagactgagagtgtccgccaccttctggcagaacccccggaaccacttcagatgccaggtgcagttctacggcctgagcgagaacgacgagtggacccaggacagagccaagcccgtgacccagatcgtgtctgccgaagcctggggcagagccgattgcggatcccagagcttcggcctgctggaccccaagctgtgctacctgctggatggcatcctgttcatctacggcgtgatcctgaccgccctgttcctgagagtgaagttcagcagaagcgccgacgcccctgcctaccagcagggacagaaccaactgtacaacgagctgaacctgggcagacgggaagagtacgacgtgctggacaagcggagaggcagggaccctgagatgggcggaaagccccagcggagaaagaacccccaggaaggactgtataacgaactccagaaagacaagatggccgaagcctacagcgagatcggcatgaagggcgagcggagaagaggcaagggccacgatggcctgtaccagggcctgagcaccgccaccaaggacacctatgacgccctgcacatgcaggccctgcctccaagaagggccaagcgatctggatctggagcaacaaacttctcactactcaaacaagcaggtgacgtggaggagaatcccgggcctactagtatggactggatttggcgcatccttttccttgtcggcgctgctaccggcgcgcattccttcgaagaagttcaactggttgagtctggtggcggcctggttaagcctggcggatctctgagactgagctgtgccgccagcggcttcacctttagcacatacggcatgagctgggtccgacaggcccctggaaaaggacttgagtgggtcgcctacatcaacaacggctccggctacatctactacgccgacagcgtgaagggcagattcaccatcagccgggacaacgccaagaacagcctgtacctccagatgaactccctgagagccgaggacaccgccgtgtactattgtgccagaggacagtggtggagcggcggagactttgattattggggccagggcaccctggtcaccgtttcttctacgcgtatccagaaccctgatcctgccgtgtaccagctgcgggatagcaagagcagcgacaagagcgtgtgtctgttcaccgacttcgacagccagaccaacgtgtcccagagcaaggactccgacgtgtacatcaccgataagaccgtgctggacatgcggagcatggacttcaagagcaactccgccgtggcctggtccaacaagtccgatttcgcctgcgccaacgccttcaacaacagcattatccccgaggacacattcttcccaagccccgagagcagctgcggtacccagagttttgggttgttggaccctaaattgtgctatctgttggacggaatcctgttcatttacggagtgatcctgaccgcattgttcctgcgggttaagttttccagatccgcagacgcacccgcttaccaacaagggcagaaccaactctacaatgaacttaatttggggcggagggaagagtacgacgttctggacaaaaggaggggacgagatcccgagatgggcggaaagcctcagcgaaggaagaatccgcaagaggggctttataacgaactccagaaagataaaatggcagaagcctatagtgagattgggatgaagggagaaaggaggaggggtaaaggtcacgatgggttgtaccaaggattgagcacagccactaaagatacctatgatgcgctccacatgcaggccctgccgccaaga

SEQ ID NO: 2328 - DNA, 2859 bp, Artificial Sequence
  Synthetic Polynucloetide
atggccttaccagtgaccgccttgctcctgccgctggccttgctgctccacgccgccaggccggaagtgcagctggttgaatctggcggaggactggttcagcctggcggatctctgagactgtcttgtgccgccagcggcttcagcttcagcgacttttggatgagctgggtccgacaggcccctggcaaaggacttgaatgggtcgccacaatcagccaggccggcagcgagaaggactacgtggactctgtgaagggcagattcaccatcagccgggacaacgccaagaagtccctgtacctccagatgaacagcctgagagccgaggacaccgccgtgtactattgtgcctctggcgtgtacagcttcgactacagaggccagggcaccctggtcacagtctcttctggtaccggcggaggcggatctggcggcggaggtagcggtggcggaggatctgaattcgagatcgtgctgacacagtctcccgccacactgtcactgtctccaggcgaaagagccacactgagctgtagcgccagcagcagcgtgtcctacatgtactggtatcagcagaagcccggacaggcccctagactgctgatctacagaaccagcaacctggcctctggcatccccgccagattttctggctctggcagcggcaccgatttcaccctgaccataagcagcctggaacctgaggacttcgccgtgtactactgccagcagtaccacagctaccccaccacctttggacagggcaccaaggtggaaatcaagcggacagttctcgaggacctgaagaacgtgttcccacctgaggtggccgtgttcgagcctagcgaggccgagatcagccacacccagaaagccaccctcgtgtgcctggctaccggcttctaccccgaccatgtggaactgtcttggtgggtcaacggcaaagaggtgcacagcggcgtgtctaccgacccccagccactgaaagaacagcccgccctgaacgacagccggtactgcctgagcagcagactgagagtgtccgccaccttctggcagaacccccggaaccacttcagatgccaggtgcagttctacggcctgagcgagaacgacgagtggacccaggacagagccaagcccgtgacccagatcgtgtctgccgaagcctggggcagagccgattgcggatcccagagcttcggcctgctggaccccaagctgtgctacctgctggatggcatcctgttcatctacggcgtgatcctgaccgccctgttcctgagagtgaagttcagcagaagcgccgacgcccctgcctaccagcagggacagaaccaactgtacaacgagctgaacctgggcagacgggaagagtacgacgtgctggacaagcggagaggcagggaccctgagatgggcggaaagccccagcggagaaagaacccccaggaaggactgtataacgaactccagaaagacaagatggccgaagcctacagcgagatcggcatgaagggcgagcggagaagaggcaagggccacgatggcctgtaccagggcctgagcaccgccaccaaggacacctatgacgccctgcacatgcaggccctgcctccaagaagggccaagcgatctggatctggagcaacaaacttctcactactcaaacaagcaggtgacgtggaggagaatcccgggcctactagtatggactggatttggcgcatccttttccttgtcggcgctgctaccggcgcgcattccttcgaagaagtgcagctggttgaatcaggtggcggcctggttcaacctggcggatctctgagactgtcttgtgccgccagcggcttcagcttcaacacctacgccatgaactgggtccgacaggctcctggcaaaggactggaatgggtgtcccacatcagaagcaagagcaacaacttcgccacctactacgccgacagcgtgaaggacagattcaccatcagccgggacaacgccaagaacagcctgtacctccagatgaactccctgagagccgaggacaccgccgtgtattattgcgccagacaaggcggcgacttccctatggattattggggccagggcaccctggtcaccgtttcttctacgcgtatccagaaccctgatcctgccgtgtaccagctgcgggatagcaagagcagcgacaagagcgtgtgtctgttcaccgacttcgacagccagaccaacgtgtcccagagcaaggactccgacgtgtacatcaccgataagaccgtgctggacatgcggagcatggacttcaagagcaactccgccgtggcctggtccaacaagtccgatttcgcctgcgccaacgccttcaacaacagcattatccccgaggacacattcttcccaagccccgagagcagctgcggtacccagagttttgggttgttggaccctaaattgtgctatctgttggacggaatcctgttcatttacggagtgatcctgaccgcattgttcctgcgggttaagttttccagatccgcagacgcacccgcttaccaacaagggcagaaccaactctacaatgaacttaatttggggcggagggaagagtacgacgttctggacaaaaggaggggacgagatcccgagatgggcggaaagcctcagcgaaggaagaatccgcaagaggggctttataacgaactccagaaagataaaatggcagaagcctatagtgagattgggatgaagggagaaaggaggaggggtaaaggtcacgatgggttgtaccaaggattgagcacagccactaaagatacctatgatgcgctccacatgcaggccctgccgccaaga

SEQ ID NO: 2329 - DNA, 2847 bp, Artificial Sequence
  Synthetic Polynucloetide
atggccttaccagtgaccgccttgctcctgccgctggccttgctgctccacgccgccaggccggaagtgcagctggttgaatctggcggaggactggttcagcctggcggatctctgagactgtcttgtgccgccagcggcttcagcttcagcgacttttggatgagctgggtccgacaggcccctggcaaaggacttgaatgggtcgccacaatcagccaggccggcagcgagaaggactacgtggactctgtgaagggcagattcaccatcagccgggacaacgccaagaagtccctgtacctccagatgaacagcctgagagccgaggacaccgccgtgtactattgtgcctctggcgtgtacagcttcgactacagaggccagggcaccctggtcacagtctcttctggtaccggcggaggcggatctggcggcggaggtagcggtggcggaggatctgaattcgacgtggtcatgacacagagcccttctagcctgtctgccagcgtgggcgacagagtgaccatcacctgtaaagccagcgaggacatctacatccggctggcctggtatcagcagaagcctggaaaggcccctaagctgctgatctacgccgccacctctctggaaacaggcgtgccaagcagattttccggcagcggctctggcaccgatttcaccctgacaatatccagcctccagcctgaggacttcgccacctactactgccagcagtattggaccacaccttggacctttggcggaggcaccaaggtggaaatcaaactcgaggacctgaagaacgtgttcccacctgaggtggccgtgttcgagcctagcgaggccgagatcagccacacccagaaagccaccctcgtgtgcctggctaccggcttctaccccgaccatgtggaactgtcttggtgggtcaacggcaaagaggtgcacagcggcgtgtctaccgacccccagccactgaaagaacagcccgccctgaacgacagccggtactgcctgagcagcagactgagagtgtccgccaccttctggcagaacccccggaaccacttcagatgccaggtgcagttctacggcctgagcgagaacgacgagtggacccaggacagagccaagcccgtgacccagatcgtgtctgccgaagcctggggcagagccgattgcggatcccagagcttcggcctgctggaccccaagctgtgctacctgctggatggcatcctgttcatctacggcgtgatcctgaccgccctgttcctgagagtgaagttcagcagaagcgccgacgcccctgcctaccagcagggacagaaccaactgtacaacgagctgaacctgggcagacgggaagagtacgacgtgctggacaagcggagaggcagggaccctgagatgggcggaaagccccagcggagaaagaacccccaggaaggactgtataacgaactccagaaagacaagatggccgaagcctacagcgagatcggcatgaagggcgagcggagaagaggcaagggccacgatggcctgtaccagggcctgagcaccgccaccaaggacacctatgacgccctgcacatgcaggccctgcctccaagaagggccaagcgatctggatctggagcaacaaacttctcactactcaaacaagcaggtgacgtggaggagaatcccgggcctactagtatggactggatttggcgcatccttttccttgtcggcgctgctaccggcgcgcattccttcgaacaggtgcagctccaagagtctggccctggactggtcaagcctagccagacactgagcctgacctgtaccgtgtccggctacagcatcaccatcgactacacctggaactggatcagacagcctcctggcaaaggactggaatggatcggctacatcacctacagcggcagcaccgactacaaccccagcctgaaaagccgggtgctgatctccgtggacaccagcaagaatcaggtgtccctgaagctgagcagcgtgacagccgctgataccgccgtgtactactgtgccagactgggcagaagatacgccctggattattggggccagggcaccaccgtgacagtgtcatctacgcgtatccagaaccctgatcctgccgtgtaccagctgcgggatagcaagagcagcgacaagagcgtgtgtctgttcaccgacttcgacagccagaccaacgtgtcccagagcaaggactccgacgtgtacatcaccgataagaccgtgctggacatgcggagcatggacttcaagagcaactccgccgtggcctggtccaacaagtccgatttcgcctgcgccaacgccttcaacaacagcattatccccgaggacacattcttcccaagccccgagagcagctgcggtacccagagttttgggttgttggaccctaaattgtgctatctgttggacggaatcctgttcatttacggagtgatcctgaccgcattgttcctgcgggttaagttttccagatccgcagacgcacccgcttaccaacaagggcagaaccaactctacaatgaacttaatttggggcggagggaagagtacgacgttctggacaaaaggaggggacgagatcccgagatgggcggaaagcctcagcgaaggaagaatccgcaagaggggctttataacgaactccagaaagataaaatggcagaagcctatagtgagattgggatgaagggagaaaggaggaggggtaaaggtcacgatgggttgtaccaaggattgagcacagccactaaagatacctatgatgcgctccacatgcaggccctgccgccaaga

SEQ ID NO: 2330 - DNA, 2859 bp, Artificial Sequence
  Synthetic Polynucloetide
atggccttaccagtgaccgccttgctcctgccgctggccttgctgctccacgccgccaggccggaagtgcagctggttgaatctggcggaggactggttcagcctggcggatctctgagactgtcttgtgccgccagcggcttcagcttcagcgacttttggatgagctgggtccgacaggcccctggcaaaggacttgaatgggtcgccacaatcagccaggccggcagcgagaaggactacgtggactctgtgaagggcagattcaccatcagccgggacaacgccaagaagtccctgtacctccagatgaacagcctgagagccgaggacaccgccgtgtactattgtgcctctggcgtgtacagcttcgactacagaggccagggcaccctggtcacagtctcttctggtaccggcggaggcggatctggcggcggaggtagcggtggcggaggatctgaattcgacatccagatgacccagaccacaagcagcctgtctgccagcctgggcgacagagtgaccatctcttgtagagccagccaggacatcagcaactacctgaactggtatcagcagaaacccgacggcaccgtgaagctgctgatctactacaccagcatcctgcacagcggcgtgcccagcagattttctggctctggcagcggcaccgactacagcctgaccatcagcaatctggaacaagaggacttcgctacctacttctgccagcaaggcaacaccctgccttggacatttggcggaggcaccaagctggaaatcaaagctctcgaggacctgaagaacgtgttcccacctgaggtggccgtgttcgagcctagcgaggccgagatcagccacacccagaaagccaccctcgtgtgcctggctaccggcttctaccccgaccatgtggaactgtcttggtgggtcaacggcaaagaggtgcacagcggcgtgtctaccgacccccagccactgaaagaacagcccgccctgaacgacagccggtactgcctgagcagcagactgagagtgtccgccaccttctggcagaacccccggaaccacttcagatgccaggtgcagttctacggcctgagcgagaacgacgagtggacccaggacagagccaagcccgtgacccagatcgtgtctgccgaagcctggggcagagccgattgcggatcccagagcttcggcctgctggaccccaagctgtgctacctgctggatggcatcctgttcatctacggcgtgatcctgaccgccctgttcctgagagtgaagttcagcagaagcgccgacgcccctgcctaccagcagggacagaaccaactgtacaacgagctgaacctgggcagacgggaagagtacgacgtgctggacaagcggagaggcagggaccctgagatgggcggaaagccccagcggagaaagaacccccaggaaggactgtataacgaactccagaaagacaagatggccgaagcctacagcgagatcggcatgaagggcgagcggagaagaggcaagggccacgatggcctgtaccagggcctgagcaccgccaccaaggacacctatgacgccctgcacatgcaggccctgcctccaagaagggccaagcgatctggatctggagcaacaaacttctcactactcaaacaagcaggtgacgtggaggagaatcccgggcctactagtatggactggatttggcgcatccttttccttgtcggcgctgctaccggcgcgcattccttcgaagtgcaactggttgaatctggcggcggactggttaagcctggcggatctctgaagctgagctgtgccgcctctggcttcgccttcagcatctacgatatgagctgggtccgacagacccctgagaagagactggaatgggtcgcctacatctctagcggcggagggacctactatcccgacacagtgaagggcagattcaccatctccagagacaacgccaagaacaccctgtacctccagatgagcagcctgaagtccgaggacaccgccatgtactactgcgccagacacagcggctatggcacacattggggagtgctgtttgcctactggggccagggaacactggtcacagtttctgctacgcgtatccagaaccctgatcctgccgtgtaccagctgcgggatagcaagagcagcgacaagagcgtgtgtctgttcaccgacttcgacagccagaccaacgtgtcccagagcaaggactccgacgtgtacatcaccgataagaccgtgctggacatgcggagcatggacttcaagagcaactccgccgtggcctggtccaacaagtccgatttcgcctgcgccaacgccttcaacaacagcattatccccgaggacacattcttcccaagccccgagagcagctgcggtacccagagttttgggttgttggaccctaaattgtgctatctgttggacggaatcctgttcatttacggagtgatcctgaccgcattgttcctgcgggttaagttttccagatccgcagacgcacccgcttaccaacaagggcagaaccaactctacaatgaacttaatttggggcggagggaagagtacgacgttctggacaaaaggaggggacgagatcccgagatgggcggaaagcctcagcgaaggaagaatccgcaagaggggctttataacgaactccagaaagataaaatggcagaagcctatagtgagattgggatgaagggagaaaggaggaggggtaaaggtcacgatgggttgtaccaaggattgagcacagccactaaagatacctatgatgcgctccacatgcaggccctgccgccaaga

SEQ ID NO: 2331 - DNA, 2892 bp, Artificial Sequence
  Synthetic Polynucloetide
atggccttaccagtgaccgccttgctcctgccgctggccttgctgctccacgccgccaggccggaagtgcagctggttgaatctggcggaggactggttcagcctggcggatctctgagactgtcttgtgccgccagcggcttcagcttcagcgacttttggatgagctgggtccgacaggcccctggcaaaggacttgaatgggtcgccacaatcagccaggccggcagcgagaaggactacgtggactctgtgaagggcagattcaccatcagccgggacaacgccaagaagtccctgtacctccagatgaacagcctgagagccgaggacaccgccgtgtactattgtgcctctggcgtgtacagcttcgactacagaggccagggcaccctggtcacagtctcttctggtaccggcggaggcggatctggcggcggaggtagcggtggcggaggatctgaattcgacatcgtgatgacacagagccctgatagcctggccgtgtctctgggagagagagccaccatcaactgcaagagcagccagagcctgctgtacagaagcaaccagaagaactacctggcctggtatcagcagaagcccggccagcctcctaagctgctgatctactgggccagcaccagagaaagcggcgtgcccgatagattttctggctctggcagcggcaccgacttcaccctgacaatttctagcctgcaagccgaggacgtggccgtgtactactgccagcagtattacaactaccccagaaccttcggccagggcaccaaggtggaaatcaagagaacagttctcgaggacctgaagaacgtgttcccacctgaggtggccgtgttcgagcctagcgaggccgagatcagccacacccagaaagccaccctcgtgtgcctggctaccggcttctaccccgaccatgtggaactgtcttggtgggtcaacggcaaagaggtgcacagcggcgtgtctaccgacccccagccactgaaagaacagcccgccctgaacgacagccggtactgcctgagcagcagactgagagtgtccgccaccttctggcagaacccccggaaccacttcagatgccaggtgcagttctacggcctgagcgagaacgacgagtggacccaggacagagccaagcccgtgacccagatcgtgtctgccgaagcctggggcagagccgattgcggatcccagagcttcggcctgctggaccccaagctgtgctacctgctggatggcatcctgttcatctacggcgtgatcctgaccgccctgttcctgagagtgaagttcagcagaagcgccgacgcccctgcctaccagcagggacagaaccaactgtacaacgagctgaacctgggcagacgggaagagtacgacgtgctggacaagcggagaggcagggaccctgagatgggcggaaagccccagcggagaaagaacccccaggaaggactgtataacgaactccagaaagacaagatggccgaagcctacagcgagatcggcatgaagggcgagcggagaagaggcaagggccacgatggcctgtaccagggcctgagcaccgccaccaaggacacctatgacgccctgcacatgcaggccctgcctccaagaagggccaagcgatctggatctggagcaacaaacttctcactactcaaacaagcaggtgacgtggaggagaatcccgggcctactagtatggactggatttggcgcatccttttccttgtcggcgctgctaccggcgcgcattccttcgaagaagttcagctgcttgaatcaggcggcggactggttcaacctggcggatctctgagactgagctgtgccgccagcggctacagcatcacaagcgactatgcctggaactgggtccgacaggcccctggcaaaggactggaatgggtgtcctacatcagcaacagcggcagcaccagctacaaccccagcctgaagtcccggttcaccatcagcagagacaacagcaagaacaccctgtacctccagatgaacagcctgagagctgaggacaccgccgtgtattattgcgccaaagagcggaactacgactacgacgattactactacgctatggactactggggccagggaaccctggtcacagtctcttctacgcgtatccagaaccctgatcctgccgtgtaccagctgcgggatagcaagagcagcgacaagagcgtgtgtctgttcaccgacttcgacagccagaccaacgtgtcccagagcaaggactccgacgtgtacatcaccgataagaccgtgctggacatgcggagcatggacttcaagagcaactccgccgtggcctggtccaacaagtccgatttcgcctgcgccaacgccttcaacaacagcattatccccgaggacacattcttcccaagccccgagagcagctgcggtacccagagttttgggttgttggaccctaaattgtgctatctgttggacggaatcctgttcatttacggagtgatcctgaccgcattgttcctgcgggttaagttttccagatccgcagacgcacccgcttaccaacaagggcagaaccaactctacaatgaacttaatttggggcggagggaagagtacgacgttctggacaaaaggaggggacgagatcccgagatgggcggaaagcctcagcgaaggaagaatccgcaagaggggctttataacgaactccagaaagataaaatggcagaagcctatagtgagattgggatgaagggagaaaggaggaggggtaaaggtcacgatgggttgtaccaaggattgagcacagccactaaagatacctatgatgcgctccacatgcaggccctgccgccaaga

SEQ ID NO: 2332 - DNA, 2871 bp, Artificial Sequence
  Synthetic Polynucloetide
atggccttaccagtgaccgccttgctcctgccgctggccttgctgctccacgccgccaggccggaagtgcagctggttgaatctggcggaggactggttcagcctggcggatctctgagactgtcttgtgccgccagcggcttcagcttcagcgacttttggatgagctgggtccgacaggcccctggcaaaggacttgaatgggtcgccacaatcagccaggccggcagcgagaaggactacgtggactctgtgaagggcagattcaccatcagccgggacaacgccaagaagtccctgtacctccagatgaacagcctgagagccgaggacaccgccgtgtactattgtgcctctggcgtgtacagcttcgactacagaggccagggcaccctggtcacagtctcttctggtaccggcggaggcggatctggcggcggaggtagcggtggcggaggatctgaattcgacgtggtcatgacacagagccctctgagcctgcctgtgacacttggacagcctgccagcatcagctgtagaagcagccagagcctgctgcacagcagcggcaatacctacctggaatggtatcagcagaggcccggacagagccccagacctctgatctacaagatcagcacccggttcagcggcgtgcccgatagattttctggctctggcagcggcaccgacttcaccctgaagattagcagagtggaagccgaggacgtgggcgtgtactactgcttccaaggcagccacgtgccatacacctttggcggcggaacaaaggtggaaatcaagagactcgaggacctgaagaacgtgttcccacctgaggtggccgtgttcgagcctagcgaggccgagatcagccacacccagaaagccaccctcgtgtgcctggctaccggcttctaccccgaccatgtggaactgtcttggtgggtcaacggcaaagaggtgcacagcggcgtgtctaccgacccccagccactgaaagaacagcccgccctgaacgacagccggtactgcctgagcagcagactgagagtgtccgccaccttctggcagaacccccggaaccacttcagatgccaggtgcagttctacggcctgagcgagaacgacgagtggacccaggacagagccaagcccgtgacccagatcgtgtctgccgaagcctggggcagagccgattgcggatcccagagcttcggcctgctggaccccaagctgtgctacctgctggatggcatcctgttcatctacggcgtgatcctgaccgccctgttcctgagagtgaagttcagcagaagcgccgacgcccctgcctaccagcagggacagaaccaactgtacaacgagctgaacctgggcagacgggaagagtacgacgtgctggacaagcggagaggcagggaccctgagatgggcggaaagccccagcggagaaagaacccccaggaaggactgtataacgaactccagaaagacaagatggccgaagcctacagcgagatcggcatgaagggcgagcggagaagaggcaagggccacgatggcctgtaccagggcctgagcaccgccaccaaggacacctatgacgccctgcacatgcaggccctgcctccaagaagggccaagcgatctggatctggagcaacaaacttctcactactcaaacaagcaggtgacgtggaggagaatcccgggcctactagtatggactggatttggcgcatccttttccttgtcggcgctgctaccggcgcgcattccttcgaacaagttcagctggttcagagcggagccgaagtgaagaaacctggggcctctgtgaaggtgtcctgcaaagcctctggcctgaccatcgaggactactacatgcactgggtccgacaggcccctggacaaggacttgaatggatgggctggatcgaccccgagaacggcgatacagagtacggccctaagttccagggcagagtgaccatgaccagagacaccagcatcaacaccgcctacatggaactgagccggctgagatccgatgacaccgccgtgtactattgcgccgtgcacaatgcccactacggcacttggtttgcctattggggccagggcacactggtcaccgttagctctacgcgtatccagaaccctgatcctgccgtgtaccagctgcgggatagcaagagcagcgacaagagcgtgtgtctgttcaccgacttcgacagccagaccaacgtgtcccagagcaaggactccgacgtgtacatcaccgataagaccgtgctggacatgcggagcatggacttcaagagcaactccgccgtggcctggtccaacaagtccgatttcgcctgcgccaacgccttcaacaacagcattatccccgaggacacattcttcccaagccccgagagcagctgcggtacccagagttttgggttgttggaccctaaattgtgctatctgttggacggaatcctgttcatttacggagtgatcctgaccgcattgttcctgcgggttaagttttccagatccgcagacgcacccgcttaccaacaagggcagaaccaactctacaatgaacttaatttggggcggagggaagagtacgacgttctggacaaaaggaggggacgagatcccgagatgggcggaaagcctcagcgaaggaagaatccgcaagaggggctttataacgaactccagaaagataaaatggcagaagcctatagtgagattgggatgaagggagaaaggaggaggggtaaaggtcacgatgggttgtaccaaggattgagcacagccactaaagatacctatgatgcgctccacatgcaggccctgccgccaaga

SEQ ID NO: 2333 - DNA, 2847 bp, Artificial Sequence
  Synthetic Polynucloetide
atggccttaccagtgaccgccttgctcctgccgctggccttgctgctccacgccgccaggccggaagtgcagctggttgaatctggcggaggactggttcagcctggcggatctctgagactgtcttgtgccgccagcggcttcagcttcagcgacttttggatgagctgggtccgacaggcccctggcaaaggacttgaatgggtcgccacaatcagccaggccggcagcgagaaggactacgtggactctgtgaagggcagattcaccatcagccgggacaacgccaagaagtccctgtacctccagatgaacagcctgagagccgaggacaccgccgtgtactattgtgcctctggcgtgtacagcttcgactacagaggccagggcaccctggtcacagtctcttctggtaccggcggaggcggatctggcggcggaggtagcggtggcggaggatctgaattcgacatccagatgacacagagccctagcagcctgtctgccagcgtgggagacagagtgaccatcacctgtagagccagcgagaacatctacagcaacctggcctggtatcagcagaagcctggcaaggcccctaagctgctgatctacgccgccaccaatctggctgatggcgtgccaagcagattttccggctctggcagcggcaccgatttcaccctgacaatatccagcctccagcctgaggacttcgccacctactactgccagcacttttggggcacccctacattcggccagggcaccaaggtggaaatcaagagaacagttctcgaggacctgaagaacgtgttcccacctgaggtggccgtgttcgagcctagcgaggccgagatcagccacacccagaaagccaccctcgtgtgcctggctaccggcttctaccccgaccatgtggaactgtcttggtgggtcaacggcaaagaggtgcacagcggcgtgtctaccgacccccagccactgaaagaacagcccgccctgaacgacagccggtactgcctgagcagcagactgagagtgtccgccaccttctggcagaacccccggaaccacttcagatgccaggtgcagttctacggcctgagcgagaacgacgagtggacccaggacagagccaagcccgtgacccagatcgtgtctgccgaagcctggggcagagccgattgcggatcccagagcttcggcctgctggaccccaagctgtgctacctgctggatggcatcctgttcatctacggcgtgatcctgaccgccctgttcctgagagtgaagttcagcagaagcgccgacgcccctgcctaccagcagggacagaaccaactgtacaacgagctgaacctgggcagacgggaagagtacgacgtgctggacaagcggagaggcagggaccctgagatgggcggaaagccccagcggagaaagaacccccaggaaggactgtataacgaactccagaaagacaagatggccgaagcctacagcgagatcggcatgaagggcgagcggagaagaggcaagggccacgatggcctgtaccagggcctgagcaccgccaccaaggacacctatgacgccctgcacatgcaggccctgcctccaagaagggccaagcgatctggatctggagcaacaaacttctcactactcaaacaagcaggtgacgtggaggagaatcccgggcctactagtatggactggatttggcgcatccttttccttgtcggcgctgctaccggcgcgcattccttcgaagaagtgcagctggttgaatcaggtggcggcctggttcaacctggcggatctctgagactgagctgtgccgcctctggcttcagcctgacaaattacggcgtgcactgggtccgacaggcccctggaaaaggactggaatgggtgtccgtgatttggagcggcggcagcaccgattacaacgccgccttcatcagccggttcaccatcagcgccgacaccagcaagaataccgcctacctccagatgaactccctgagagccgaggacaccgccgtgtactattgcgccagagaactgatccacgctatggacaactggggccagggaaccctggtcacagtctcttctacgcgtatccagaaccctgatcctgccgtgtaccagctgcgggatagcaagagcagcgacaagagcgtgtgtctgttcaccgacttcgacagccagaccaacgtgtcccagagcaaggactccgacgtgtacatcaccgataagaccgtgctggacatgcggagcatggacttcaagagcaactccgccgtggcctggtccaacaagtccgatttcgcctgcgccaacgccttcaacaacagcattatccccgaggacacattcttcccaagccccgagagcagctgcggtacccagagttttgggttgttggaccctaaattgtgctatctgttggacggaatcctgttcatttacggagtgatcctgaccgcattgttcctgcgggttaagttttccagatccgcagacgcacccgcttaccaacaagggcagaaccaactctacaatgaacttaatttggggcggagggaagagtacgacgttctggacaaaaggaggggacgagatcccgagatgggcggaaagcctcagcgaaggaagaatccgcaagaggggctttataacgaactccagaaagataaaatggcagaagcctatagtgagattgggatgaagggagaaaggaggaggggtaaaggtcacgatgggttgtaccaaggattgagcacagccactaaagatacctatgatgcgctccacatgcaggccctgccgccaaga

SEQ ID NO: 2334 - DNA, 2868 bp, Artificial Sequence
  Synthetic Polynucloetide
atggccttaccagtgaccgccttgctcctgccgctggccttgctgctccacgccgccaggccggaagtgcagctggttgaatctggcggaggactggttcagcctggcggatctctgagactgtcttgtgccgccagcggcttcagcttcagcgacttttggatgagctgggtccgacaggcccctggcaaaggacttgaatgggtcgccacaatcagccaggccggcagcgagaaggactacgtggactctgtgaagggcagattcaccatcagccgggacaacgccaagaagtccctgtacctccagatgaacagcctgagagccgaggacaccgccgtgtactattgtgcctctggcgtgtacagcttcgactacagaggccagggcaccctggtcacagtctcttctggtaccggcggaggcggatctggcggcggaggtagcggtggcggaggatctgaattcgacttcgtgatgacacagagccctctgagcctgcctgtgacacctggcgaacctgccagcatcagctgtagaagcagccagagcatcgtgcacagcaacggcaacacctacctggaatggtatctccagaagcctggacagagcccacagctgctgatctacaaggtgtccaacagattcagcggcgtgcccgacagattttctggcagcggctctggcaccgacttcaccctgaagattagcagagtggaagccgaggacgtgggcgtgtactactgcttccaaggctctcacgtgcccctgacctttggacagggcaccaagctggaaatcaagagactcgaggacctgaagaacgtgttcccacctgaggtggccgtgttcgagcctagcgaggccgagatcagccacacccagaaagccaccctcgtgtgcctggctaccggcttctaccccgaccatgtggaactgtcttggtgggtcaacggcaaagaggtgcacagcggcgtgtctaccgacccccagccactgaaagaacagcccgccctgaacgacagccggtactgcctgagcagcagactgagagtgtccgccaccttctggcagaacccccggaaccacttcagatgccaggtgcagttctacggcctgagcgagaacgacgagtggacccaggacagagccaagcccgtgacccagatcgtgtctgccgaagcctggggcagagccgattgcggatcccagagcttcggcctgctggaccccaagctgtgctacctgctggatggcatcctgttcatctacggcgtgatcctgaccgccctgttcctgagagtgaagttcagcagaagcgccgacgcccctgcctaccagcagggacagaaccaactgtacaacgagctgaacctgggcagacgggaagagtacgacgtgctggacaagcggagaggcagggaccctgagatgggcggaaagccccagcggagaaagaacccccaggaaggactgtataacgaactccagaaagacaagatggccgaagcctacagcgagatcggcatgaagggcgagcggagaagaggcaagggccacgatggcctgtaccagggcctgagcaccgccaccaaggacacctatgacgccctgcacatgcaggccctgcctccaagaagggccaagcgatctggatctggagcaacaaacttctcactactcaaacaagcaggtgacgtggaggagaatcccgggcctactagtatggactggatttggcgcatccttttccttgtcggcgctgctaccggcgcgcattccttcgaagaagtgcagctggttgaaagcggagccgaagtgaagaaacctggggcctctgtgaaggtgtcctgcaaggccagcggctacacctttaccagctactggattcactgggtccgacaggcccctggacaaggacttgagtggatgggcgagaacgacccctccaacggcaggaccaactacaacgagaagttcaagaaccgcgtgaccctgaccgtggacaccagcatctctaccgcctacatggaactgagccggctgagatccgatgacaccgccgtgtactattgcgccagaggacccaactacttttacagcatggactactggggccagggcacaatggtcaccgttagctctacgcgtatccagaaccctgatcctgccgtgtaccagctgcgggatagcaagagcagcgacaagagcgtgtgtctgttcaccgacttcgacagccagaccaacgtgtcccagagcaaggactccgacgtgtacatcaccgataagaccgtgctggacatgcggagcatggacttcaagagcaactccgccgtggcctggtccaacaagtccgatttcgcctgcgccaacgccttcaacaacagcattatccccgaggacacattcttcccaagccccgagagcagctgcggtacccagagttttgggttgttggaccctaaattgtgctatctgttggacggaatcctgttcatttacggagtgatcctgaccgcattgttcctgcgggttaagttttccagatccgcagacgcacccgcttaccaacaagggcagaaccaactctacaatgaacttaatttggggcggagggaagagtacgacgttctggacaaaaggaggggacgagatcccgagatgggcggaaagcctcagcgaaggaagaatccgcaagaggggctttataacgaactccagaaagataaaatggcagaagcctatagtgagattgggatgaagggagaaaggaggaggggtaaaggtcacgatgggttgtaccaaggattgagcacagccactaaagatacctatgatgcgctccacatgcaggccctgccgccaaga

SEQ ID NO: 2335 - DNA, 2847 bp, Artificial Sequence
  Synthetic Polynucloetide
atggccttaccagtgaccgccttgctcctgccgctggccttgctgctccacgccgccaggccggaagtgcagctggttgaatctggcggaggactggttcagcctggcggatctctgagactgtcttgtgccgccagcggcttcagcttcagcgacttttggatgagctgggtccgacaggcccctggcaaaggacttgaatgggtcgccacaatcagccaggccggcagcgagaaggactacgtggactctgtgaagggcagattcaccatcagccgggacaacgccaagaagtccctgtacctccagatgaacagcctgagagccgaggacaccgccgtgtactattgtgcctctggcgtgtacagcttcgactacagaggccagggcaccctggtcacagtctcttctggtaccggcggaggcggatctggcggcggaggtagcggtggcggaggatctgaattcgacatccagctgactcagagccctagctttctgagcgccagcgtgggcgacagagtgaccatcacatgtagcgccagatccagcatcagcttcatgtactggtatcagcagaagcccggcaaggcccctaagctgctgatctacgacaccagcaatctggcctctggcgtgcccagcagattttctggaagcggcagcggcaccgagttcaccctgacaatctctagcctggaagccgaggatgccgccacctactattgccagcagtggtccagctatcccctgacatttggacagggcaccaagctggaaatcaaactcgaggacctgaagaacgtgttcccacctgaggtggccgtgttcgagcctagcgaggccgagatcagccacacccagaaagccaccctcgtgtgcctggctaccggcttctaccccgaccatgtggaactgtcttggtgggtcaacggcaaagaggtgcacagcggcgtgtctaccgacccccagccactgaaagaacagcccgccctgaacgacagccggtactgcctgagcagcagactgagagtgtccgccaccttctggcagaacccccggaaccacttcagatgccaggtgcagttctacggcctgagcgagaacgacgagtggacccaggacagagccaagcccgtgacccagatcgtgtctgccgaagcctggggcagagccgattgcggatcccagagcttcggcctgctggaccccaagctgtgctacctgctggatggcatcctgttcatctacggcgtgatcctgaccgccctgttcctgagagtgaagttcagcagaagcgccgacgcccctgcctaccagcagggacagaaccaactgtacaacgagctgaacctgggcagacgggaagagtacgacgtgctggacaagcggagaggcagggaccctgagatgggcggaaagccccagcggagaaagaacccccaggaaggactgtataacgaactccagaaagacaagatggccgaagcctacagcgagatcggcatgaagggcgagcggagaagaggcaagggccacgatggcctgtaccagggcctgagcaccgccaccaaggacacctatgacgccctgcacatgcaggccctgcctccaagaagggccaagcgatctggatctggagcaacaaacttctcactactcaaacaagcaggtgacgtggaggagaatcccgggcctactagtatggactggatttggcgcatccttttccttgtcggcgctgctaccggcgcgcattccttcgaacaggttcagctggttcagtctggggccgaagtgaagaaacctggggcctctgtgaaggtgtcctgcaaggcttccggctacacctttaccggctcttggatgaactgggtccgacaggctcctggacagggactcgaatggatcggcagaatctatcctggcgacggcgagacaaactacaacggcaagttcaaggaccgcgtgacaatcaccgccgacaagagcacaagcaccgcctacatggaactgagcagcctgcggagcgaagataccgccgtgtactactgcgcccggatctacggcaacaacgtgtacttcgatgtgtggggccagggcacaaccgtgacagtctcttctacgcgtatccagaaccctgatcctgccgtgtaccagctgcgggatagcaagagcagcgacaagagcgtgtgtctgttcaccgacttcgacagccagaccaacgtgtcccagagcaaggactccgacgtgtacatcaccgataagaccgtgctggacatgcggagcatggacttcaagagcaactccgccgtggcctggtccaacaagtccgatttcgcctgcgccaacgccttcaacaacagcattatccccgaggacacattcttcccaagccccgagagcagctgcggtacccagagttttgggttgttggaccctaaattgtgctatctgttggacggaatcctgttcatttacggagtgatcctgaccgcattgttcctgcgggttaagttttccagatccgcagacgcacccgcttaccaacaagggcagaaccaactctacaatgaacttaatttggggcggagggaagagtacgacgttctggacaaaaggaggggacgagatcccgagatgggcggaaagcctcagcgaaggaagaatccgcaagaggggctttataacgaactccagaaagataaaatggcagaagcctatagtgagattgggatgaagggagaaaggaggaggggtaaaggtcacgatgggttgtaccaaggattgagcacagccactaaagatacctatgatgcgctccacatgcaggccctgccgccaaga

SEQ ID NO: 2336 - DNA, 2871 bp, Artificial Sequence
  Synthetic Polynucloetide
atggccttaccagtgaccgccttgctcctgccgctggccttgctgctccacgccgccaggccggaagtgcagctggttgaatctggcggaggactggttcagcctggcggatctctgagactgtcttgtgccgccagcggcttcagcttcagcgacttttggatgagctgggtccgacaggcccctggcaaaggacttgaatgggtcgccacaatcagccaggccggcagcgagaaggactacgtggactctgtgaagggcagattcaccatcagccgggacaacgccaagaagtccctgtacctccagatgaacagcctgagagccgaggacaccgccgtgtactattgtgcctctggcgtgtacagcttcgactacagaggccagggcaccctggtcacagtctcttctggtaccggcggaggcggatctggcggcggaggtagcggtggcggaggatctgaattccagctggtgctgacacagtctccaagcgcctctgccagcctgggatctagcgtgaagctgacctgtacactgagcagcggccacaagaccgacaccatcgactggtatcagcagcagcctggcaaggcccctagatacctgatgaagctggaaggcagcggcagctacaacaaaggctctggcgtgcccgatagattcagcggcagttcttctggcgctgattggtatctgaccatcagcagcctccagagcgaggacgaggccgattactactgcggcacagactaccccggcaactacctgtttggcggcggaacacagctgacagtgcttggcctcgaggacctgaagaacgtgttcccacctgaggtggccgtgttcgagcctagcgaggccgagatcagccacacccagaaagccaccctcgtgtgcctggctaccggcttctaccccgaccatgtggaactgtcttggtgggtcaacggcaaagaggtgcacagcggcgtgtctaccgacccccagccactgaaagaacagcccgccctgaacgacagccggtactgcctgagcagcagactgagagtgtccgccaccttctggcagaacccccggaaccacttcagatgccaggtgcagttctacggcctgagcgagaacgacgagtggacccaggacagagccaagcccgtgacccagatcgtgtctgccgaagcctggggcagagccgattgcggatcccagagcttcggcctgctggaccccaagctgtgctacctgctggatggcatcctgttcatctacggcgtgatcctgaccgccctgttcctgagagtgaagttcagcagaagcgccgacgcccctgcctaccagcagggacagaaccaactgtacaacgagctgaacctgggcagacgggaagagtacgacgtgctggacaagcggagaggcagggaccctgagatgggcggaaagccccagcggagaaagaacccccaggaaggactgtataacgaactccagaaagacaagatggccgaagcctacagcgagatcggcatgaagggcgagcggagaagaggcaagggccacgatggcctgtaccagggcctgagcaccgccaccaaggacacctatgacgccctgcacatgcaggccctgcctccaagaagggccaagcgatctggatctggagcaacaaacttctcactactcaaacaagcaggtgacgtggaggagaatcccgggcctactagtatggactggatttggcgcatccttttccttgtcggcgctgctaccggcgcgcattccttcgaacaagaacagctggttgaaagcggcggaggactggttcaacctggcggttctctgagactgagctgtgccgccagcggcttcaccttcagcgactactacatgagctggatcagacaggccccaggcaaaggactggaatgggtcgccacaatctaccccagcagcggcaagacctactacgccgattctgccaagggcagactgaccatctccagcgacaacgccaaggacagcctgtacctccagatgaacagcctgagagccgaggacaccgccgtgtactactgcaccagagatagctacgccgacgacgccgctctgtttgacatttggggccagggcaccaccgtgaccgtttcttctacgcgtatccagaaccctgatcctgccgtgtaccagctgcgggatagcaagagcagcgacaagagcgtgtgtctgttcaccgacttcgacagccagaccaacgtgtcccagagcaaggactccgacgtgtacatcaccgataagaccgtgctggacatgcggagcatggacttcaagagcaactccgccgtggcctggtccaacaagtccgatttcgcctgcgccaacgccttcaacaacagcattatccccgaggacacattcttcccaagccccgagagcagctgcggtacccagagttttgggttgttggaccctaaattgtgctatctgttggacggaatcctgttcatttacggagtgatcctgaccgcattgttcctgcgggttaagttttccagatccgcagacgcacccgcttaccaacaagggcagaaccaactctacaatgaacttaatttggggcggagggaagagtacgacgttctggacaaaaggaggggacgagatcccgagatgggcggaaagcctcagcgaaggaagaatccgcaagaggggctttataacgaactccagaaagataaaatggcagaagcctatagtgagattgggatgaagggagaaaggaggaggggtaaaggtcacgatgggttgtaccaaggattgagcacagccactaaagatacctatgatgcgctccacatgcaggccctgccgccaaga

SEQ ID NO: 2337 - DNA, 2859 bp, Artificial Sequence
  Synthetic Polynucloetide
atggccttaccagtgaccgccttgctcctgccgctggccttgctgctccacgccgccaggccggaagtgcagctggttgaatctggcggaggactggttcagcctggcggatctctgagactgtcttgtgccgccagcggcttcagcttcagcgacttttggatgagctgggtccgacaggcccctggcaaaggacttgaatgggtcgccacaatcagccaggccggcagcgagaaggactacgtggactctgtgaagggcagattcaccatcagccgggacaacgccaagaagtccctgtacctccagatgaacagcctgagagccgaggacaccgccgtgtactattgtgcctctggcgtgtacagcttcgactacagaggccagggcaccctggtcacagtctcttctggtaccggcggaggcggatctggcggcggaggtagcggtggcggaggatctgaattcgagattgtgttgacacagtctcccgataccctgtcactgtcacccggcgagaaggcaacgctgagttgcagagcaagccagtcagtctcctcttcttttctggcctggtatcagcaaaaaccaggtcaggcaccatctctcctgatttacgttgccagcagacgggcggctggcattcccgacaggttctctggaagcggatctgggaccgattttaccctgacaattagccgcttggagcccgaagactttggtatgttttactgccagcactacggaaggacacctttcacatttggcccgggcacgaaagtcgatataaaacgcctcgaggacctgaagaacgtgttcccacctgaggtggccgtgttcgagcctagcgaggccgagatcagccacacccagaaagccaccctcgtgtgcctggctaccggcttctaccccgaccatgtggaactgtcttggtgggtcaacggcaaagaggtgcacagcggcgtgtctaccgacccccagccactgaaagaacagcccgccctgaacgacagccggtactgcctgagcagcagactgagagtgtccgccaccttctggcagaacccccggaaccacttcagatgccaggtgcagttctacggcctgagcgagaacgacgagtggacccaggacagagccaagcccgtgacccagatcgtgtctgccgaagcctggggcagagccgattgcggatcccagagcttcggcctgctggaccccaagctgtgctacctgctggatggcatcctgttcatctacggcgtgatcctgaccgccctgttcctgagagtgaagttcagcagaagcgccgacgcccctgcctaccagcagggacagaaccaactgtacaacgagctgaacctgggcagacgggaagagtacgacgtgctggacaagcggagaggcagggaccctgagatgggcggaaagccccagcggagaaagaacccccaggaaggactgtataacgaactccagaaagacaagatggccgaagcctacagcgagatcggcatgaagggcgagcggagaagaggcaagggccacgatggcctgtaccagggcctgagcaccgccaccaaggacacctatgacgccctgcacatgcaggccctgcctccaagaagggccaagcgatctggatctggagcaacaaacttctcactactcaaacaagcaggtgacgtggaggagaatcccgggcctactagtatggactggatttggcgcatccttttccttgtcggcgctgctaccggcgcgcattccttcgaacagatccagttggtggaatcagggggcggtgtggtgcagccgggtaggagcctgagactgtcatgcgtggcgtctggcttcacattcaagaactacggcatgcactgggtgcgacaggcccccggaaagggtttggagtgggtcgccgtgatctggtacgacggatctaatgagtattacggagatcctgtgaagggaaggttcaccatctcccgcgacaatagcaaaaatatgctctacctgcaaatgaactcactcagggcggatgatacggcggtctactattgcgctcgctcagggattgctgtggccggcgcattcgattactggggacagggtaccctggtgacagtatcaagcacgcgtatccagaaccctgatcctgccgtgtaccagctgcgggatagcaagagcagcgacaagagcgtgtgtctgttcaccgacttcgacagccagaccaacgtgtcccagagcaaggactccgacgtgtacatcaccgataagaccgtgctggacatgcggagcatggacttcaagagcaactccgccgtggcctggtccaacaagtccgatttcgcctgcgccaacgccttcaacaacagcattatccccgaggacacattcttcccaagccccgagagcagctgcggtacccagagttttgggttgttggaccctaaattgtgctatctgttggacggaatcctgttcatttacggagtgatcctgaccgcattgttcctgcgggttaagttttccagatccgcagacgcacccgcttaccaacaagggcagaaccaactctacaatgaacttaatttggggcggagggaagagtacgacgttctggacaaaaggaggggacgagatcccgagatgggcggaaagcctcagcgaaggaagaatccgcaagaggggctttataacgaactccagaaagataaaatggcagaagcctatagtgagattgggatgaagggagaaaggaggaggggtaaaggtcacgatgggttgtaccaaggattgagcacagccactaaagatacctatgatgcgctccacatgcaggccctgccgccaaga

SEQ ID NO: 2338 - DNA, 2877 bp, Artificial Sequence
  Synthetic Polynucloetide
atggccttaccagtgaccgccttgctcctgccgctggccttgctgctccacgccgccaggccggaagtgcagctggttgaatctggcggaggactggttcagcctggcggatctctgagactgtcttgtgccgccagcggcttcagcttcagcgacttttggatgagctgggtccgacaggcccctggcaaaggacttgaatgggtcgccacaatcagccaggccggcagcgagaaggactacgtggactctgtgaagggcagattcaccatcagccgggacaacgccaagaagtccctgtacctccagatgaacagcctgagagccgaggacaccgccgtgtactattgtgcctctggcgtgtacagcttcgactacagaggccagggcaccctggtcacagtctcttctggtaccggcggaggcggatctggcggcggaggtagcggtggcggaggatctgaattcgacattcagatgacccaaagcccgtccagcctgtccgccagcctgggagatagagtgacaatcacgtgtagagcttcccaagggataagaaatgatctcgggtggtatcagcagaagcccggcaaagcccccaaaaggcttatatatgctagtagtacactgcagtctggagttccttcccgattttcaggtagcggctccggtacagagttcaccctcacgataagctcactccagcctgaggatttcgcaacgtactactgcctccagcacaacaattttccctggactttcggccagggcaccaaggtggagatcaagaggctcgaggacctgaagaacgtgttcccacctgaggtggccgtgttcgagcctagcgaggccgagatcagccacacccagaaagccaccctcgtgtgcctggctaccggcttctaccccgaccatgtggaactgtcttggtgggtcaacggcaaagaggtgcacagcggcgtgtctaccgacccccagccactgaaagaacagcccgccctgaacgacagccggtactgcctgagcagcagactgagagtgtccgccaccttctggcagaacccccggaaccacttcagatgccaggtgcagttctacggcctgagcgagaacgacgagtggacccaggacagagccaagcccgtgacccagatcgtgtctgccgaagcctggggcagagccgattgcggatcccagagcttcggcctgctggaccccaagctgtgctacctgctggatggcatcctgttcatctacggcgtgatcctgaccgccctgttcctgagagtgaagttcagcagaagcgccgacgcccctgcctaccagcagggacagaaccaactgtacaacgagctgaacctgggcagacgggaagagtacgacgtgctggacaagcggagaggcagggaccctgagatgggcggaaagccccagcggagaaagaacccccaggaaggactgtataacgaactccagaaagacaagatggccgaagcctacagcgagatcggcatgaagggcgagcggagaagaggcaagggccacgatggcctgtaccagggcctgagcaccgccaccaaggacacctatgacgccctgcacatgcaggccctgcctccaagaagggccaagcgatctggatctggagcaacaaacttctcactactcaaacaagcaggtgacgtggaggagaatcccgggcctactagtatggactggatttggcgcatccttttccttgtcggcgctgctaccggcgcgcattccttcgaacaagttactttgaaggagtctggacctgtactggtgaagccaaccgagacactgacactcacgtgtacagtgagtggtttttccttgatcaacgcaaggatgggcgtcagctggatcaggcaaccccctggcaaggctctggaatggctcgctcacatattcagcaatgccgaaaaaagctaccggacaagcctgaaatcccgcctgactatttccaaggacacttctaagtctcaggtggtgctgaccatgaccaacatggacccggtggacaccgccacctattactgcgcaagaatccctgggtatggtgggaatggtgactaccattattatgggatggatgtgtgggggcaaggcacaaccgtaacggtctcaagcacgcgtatccagaaccctgatcctgccgtgtaccagctgcgggatagcaagagcagcgacaagagcgtgtgtctgttcaccgacttcgacagccagaccaacgtgtcccagagcaaggactccgacgtgtacatcaccgataagaccgtgctggacatgcggagcatggacttcaagagcaactccgccgtggcctggtccaacaagtccgatttcgcctgcgccaacgccttcaacaacagcattatccccgaggacacattcttcccaagccccgagagcagctgcggtacccagagttttgggttgttggaccctaaattgtgctatctgttggacggaatcctgttcatttacggagtgatcctgaccgcattgttcctgcgggttaagttttccagatccgcagacgcacccgcttaccaacaagggcagaaccaactctacaatgaacttaatttggggcggagggaagagtacgacgttctggacaaaaggaggggacgagatcccgagatgggcggaaagcctcagcgaaggaagaatccgcaagaggggctttataacgaactccagaaagataaaatggcagaagcctatagtgagattgggatgaagggagaaaggaggaggggtaaaggtcacgatgggttgtaccaaggattgagcacagccactaaagatacctatgatgcgctccacatgcaggccctgccgccaaga

SEQ ID NO: 2339 - DNA, 2856 bp, Artificial Sequence
  Synthetic Polynucloetide
atggccttaccagtgaccgccttgctcctgccgctggccttgctgctccacgccgccaggccggaagtgcagctggttgaatctggcggaggactggttcagcctggcggatctctgagactgtcttgtgccgccagcggcttcagcttcagcgacttttggatgagctgggtccgacaggcccctggcaaaggacttgaatgggtcgccacaatcagccaggccggcagcgagaaggactacgtggactctgtgaagggcagattcaccatcagccgggacaacgccaagaagtccctgtacctccagatgaacagcctgagagccgaggacaccgccgtgtactattgtgcctctggcgtgtacagcttcgactacagaggccagggcaccctggtcacagtctcttctggtaccggcggaggcggatctggcggcggaggtagcggtggcggaggatctgaattcgacatcgtgctgacacagagccctccaagcctggctatgagcctgggaaagagagccaccatcagctgtagagccagcgagagcgtgacaatcctgggctctcacctgatccactggtatcagcagaagcccggccagcctcctacactgctgattcagctggcctccaatgtgcagacaggcgtgccagccagattttctggcagcggcagcagaaccgacttcaccctgaccattgatcccgtggaagaggacgacgtggccgtgtactactgcctccagagcagaacaatccccagaacctttggcggaggcaccaagctggaaatcaaactcgaggacctgaagaacgtgttcccacctgaggtggccgtgttcgagcctagcgaggccgagatcagccacacccagaaagccaccctcgtgtgcctggctaccggcttctaccccgaccatgtggaactgtcttggtgggtcaacggcaaagaggtgcacagcggcgtgtctaccgacccccagccactgaaagaacagcccgccctgaacgacagccggtactgcctgagcagcagactgagagtgtccgccaccttctggcagaacccccggaaccacttcagatgccaggtgcagttctacggcctgagcgagaacgacgagtggacccaggacagagccaagcccgtgacccagatcgtgtctgccgaagcctggggcagagccgattgcggatcccagagcttcggcctgctggaccccaagctgtgctacctgctggatggcatcctgttcatctacggcgtgatcctgaccgccctgttcctgagagtgaagttcagcagaagcgccgacgcccctgcctaccagcagggacagaaccaactgtacaacgagctgaacctgggcagacgggaagagtacgacgtgctggacaagcggagaggcagggaccctgagatgggcggaaagccccagcggagaaagaacccccaggaaggactgtataacgaactccagaaagacaagatggccgaagcctacagcgagatcggcatgaagggcgagcggagaagaggcaagggccacgatggcctgtaccagggcctgagcaccgccaccaaggacacctatgacgccctgcacatgcaggccctgcctccaagaagggccaagcgatctggatctggagcaacaaacttctcactactcaaacaagcaggtgacgtggaggagaatcccgggcctactagtatggactggatttggcgcatccttttccttgtcggcgctgctaccggcgcgcattccttcgaacaaatccagctggtgcagtctggccccgagctgaagaaacctggcgagacagtgaagatcagctgcaaggccagcggctacaccttcaccgactacagcatcaactgggtcaagagagcccctggcaagggcctgaaatggatgggctggatcaacaccgaaaccagagagcccgcctacgcctacgacttcagaggcagattcgccttcagcctggaaaccagcgccagcacagcctacctccagatcaacaacctgaagtacgaggacaccgccacctacttttgcgccctggactacagctacgctatggactattggggccagggcaccagcgtgacagtctcttctacgcgtatccagaaccctgatcctgccgtgtaccagctgcgggatagcaagagcagcgacaagagcgtgtgtctgttcaccgacttcgacagccagaccaacgtgtcccagagcaaggactccgacgtgtacatcaccgataagaccgtgctggacatgcggagcatggacttcaagagcaactccgccgtggcctggtccaacaagtccgatttcgcctgcgccaacgccttcaacaacagcattatccccgaggacacattcttcccaagccccgagagcagctgcggtacccagagttttgggttgttggaccctaaattgtgctatctgttggacggaatcctgttcatttacggagtgatcctgaccgcattgttcctgcgggttaagttttccagatccgcagacgcacccgcttaccaacaagggcagaaccaactctacaatgaacttaatttggggcggagggaagagtacgacgttctggacaaaaggaggggacgagatcccgagatgggcggaaagcctcagcgaaggaagaatccgcaagaggggctttataacgaactccagaaagataaaatggcagaagcctatagtgagattgggatgaagggagaaaggaggaggggtaaaggtcacgatgggttgtaccaaggattgagcacagccactaaagatacctatgatgcgctccacatgcaggccctgccgccaaga

SEQ ID NO: 2340 - DNA, 2862 bp, Artificial Sequence
  Synthetic Polynucloetide
atggccttaccagtgaccgccttgctcctgccgctggccttgctgctccacgccgccaggccggaagtgcagctggttgaatctggcggaggactggttcagcctggcggatctctgagactgtcttgtgccgccagcggcttcagcttcagcgacttttggatgagctgggtccgacaggcccctggcaaaggacttgaatgggtcgccacaatcagccaggccggcagcgagaaggactacgtggactctgtgaagggcagattcaccatcagccgggacaacgccaagaagtccctgtacctccagatgaacagcctgagagccgaggacaccgccgtgtactattgtgcctctggcgtgtacagcttcgactacagaggccagggcaccctggtcacagtctcttctggtaccggcggaggcggatctggcggcggaggtagcggtggcggaggatctgaattcgatattcaactgacacaatcccccagctcactcagcgccagcgtgggggacagggttagctttacctgtcaagcctctcaggatataaataactttctgaactggtatcaacagaagcctgggaaggcgcccaaactcctgatctatgatgcgtccaacctggaaactggcgtgccttcacgctttagcggctctggcagtggtacagacttcacttttaccatctcttcacttcagccggaggacatcgccacatattactgtcaacagtacggaaacttgccctttacttttggaggcggcaccaaagttgaaatcaaaagactcgaggacctgaagaacgtgttcccacctgaggtggccgtgttcgagcctagcgaggccgagatcagccacacccagaaagccaccctcgtgtgcctggctaccggcttctaccccgaccatgtggaactgtcttggtgggtcaacggcaaagaggtgcacagcggcgtgtctaccgacccccagccactgaaagaacagcccgccctgaacgacagccggtactgcctgagcagcagactgagagtgtccgccaccttctggcagaacccccggaaccacttcagatgccaggtgcagttctacggcctgagcgagaacgacgagtggacccaggacagagccaagcccgtgacccagatcgtgtctgccgaagcctggggcagagccgattgcggatcccagagcttcggcctgctggaccccaagctgtgctacctgctggatggcatcctgttcatctacggcgtgatcctgaccgccctgttcctgagagtgaagttcagcagaagcgccgacgcccctgcctaccagcagggacagaaccaactgtacaacgagctgaacctgggcagacgggaagagtacgacgtgctggacaagcggagaggcagggaccctgagatgggcggaaagccccagcggagaaagaacccccaggaaggactgtataacgaactccagaaagacaagatggccgaagcctacagcgagatcggcatgaagggcgagcggagaagaggcaagggccacgatggcctgtaccagggcctgagcaccgccaccaaggacacctatgacgccctgcacatgcaggccctgcctccaagaagggccaagcgatctggatctggagcaacaaacttctcactactcaaacaagcaggtgacgtggaggagaatcccgggcctactagtatggactggatttggcgcatccttttccttgtcggcgctgctaccggcgcgcattccttcgaacaggtccaactgcaagaaagcggacccggactggtgaagccttctgagacacttagtctgacgtgcacggtcagtggcggctccatctcctcctattattggtcatggatacgacaacccccaggtaagggcctggaatggattggctatatctactattcaggaagcacgaactacaatcccagcctgaagtcccgagtgacaatttcagtagataccagtaaaaaccagttcagtcttaaactgtcaagcgtgacagctgccgacaccgctgtgtattactgcgtctcactggtgtattgtggaggggattgttatagcgggttcgattattggggacagggaaccctggtgactgtatcttccacgcgtatccagaaccctgatcctgccgtgtaccagctgcgggatagcaagagcagcgacaagagcgtgtgtctgttcaccgacttcgacagccagaccaacgtgtcccagagcaaggactccgacgtgtacatcaccgataagaccgtgctggacatgcggagcatggacttcaagagcaactccgccgtggcctggtccaacaagtccgatttcgcctgcgccaacgccttcaacaacagcattatccccgaggacacattcttcccaagccccgagagcagctgcggtacccagagttttgggttgttggaccctaaattgtgctatctgttggacggaatcctgttcatttacggagtgatcctgaccgcattgttcctgcgggttaagttttccagatccgcagacgcacccgcttaccaacaagggcagaaccaactctacaatgaacttaatttggggcggagggaagagtacgacgttctggacaaaaggaggggacgagatcccgagatgggcggaaagcctcagcgaaggaagaatccgcaagaggggctttataacgaactccagaaagataaaatggcagaagcctatagtgagattgggatgaagggagaaaggaggaggggtaaaggtcacgatgggttgtaccaaggattgagcacagccactaaagatacctatgatgcgctccacatgcaggccctgccgccaaga

SEQ ID NO: 2341 - DNA, 2868 bp, Artificial Sequence
  Synthetic Polynucloetide
atggccttaccagtgaccgccttgctcctgccgctggccttgctgctccacgccgccaggccggaagtgcagctggttgaatctggcggaggactggttcagcctggcggatctctgagactgtcttgtgccgccagcggcttcagcttcagcgacttttggatgagctgggtccgacaggcccctggcaaaggacttgaatgggtcgccacaatcagccaggccggcagcgagaaggactacgtggactctgtgaagggcagattcaccatcagccgggacaacgccaagaagtccctgtacctccagatgaacagcctgagagccgaggacaccgccgtgtactattgtgcctctggcgtgtacagcttcgactacagaggccagggcaccctggtcacagtctcttctggtaccggcggaggcggatctggcggcggaggtagcggtggcggaggatctgaattcgatatccagctcactcaaagcccctctagtctctctgcctcagtgggggatcgggtcagttttacttgtcaagcttcacaggatatcaacaacttccttaattggtatcagcagaagccaggaaaagcacccaagctgctcatctatgatgcctcaaatttggagacgggtgttcccagtcgattctctgggtcagggtccgggaccgactttacgtttacgatctcctctctgcagcccgaagacatcgccacatactattgtcaacagtacggcaacttgcctttcacatttgggggcgggactaaggttgaaatcaagaggctcgaggacctgaagaacgtgttcccacctgaggtggccgtgttcgagcctagcgaggccgagatcagccacacccagaaagccaccctcgtgtgcctggctaccggcttctaccccgaccatgtggaactgtcttggtgggtcaacggcaaagaggtgcacagcggcgtgtctaccgacccccagccactgaaagaacagcccgccctgaacgacagccggtactgcctgagcagcagactgagagtgtccgccaccttctggcagaacccccggaaccacttcagatgccaggtgcagttctacggcctgagcgagaacgacgagtggacccaggacagagccaagcccgtgacccagatcgtgtctgccgaagcctggggcagagccgattgcggatcccagagcttcggcctgctggaccccaagctgtgctacctgctggatggcatcctgttcatctacggcgtgatcctgaccgccctgttcctgagagtgaagttcagcagaagcgccgacgcccctgcctaccagcagggacagaaccaactgtacaacgagctgaacctgggcagacgggaagagtacgacgtgctggacaagcggagaggcagggaccctgagatgggcggaaagccccagcggagaaagaacccccaggaaggactgtataacgaactccagaaagacaagatggccgaagcctacagcgagatcggcatgaagggcgagcggagaagaggcaagggccacgatggcctgtaccagggcctgagcaccgccaccaaggacacctatgacgccctgcacatgcaggccctgcctccaagaagggccaagcgatctggatctggagcaacaaacttctcactactcaaacaagcaggtgacgtggaggagaatcccgggcctactagtatggactggatttggcgcatccttttccttgtcggcgctgctaccggcgcgcattccttcgaacaggtacagctgcaggaatctgggcccggacttgtcaagccaagtcagacactttctcttacatgtaccgtgagcggcggaagtataagcagtggaggcttttactggtcttggatacggcagcacccaggcaaaggcttggagtggattggatacattcatcattcaggatctacacactataatccatcccttaagtcccgggtcaccattagcattgatacgtctaagaatctgttcagtctcaggctgtcctccgtcactgctgccgacacagccgtgtactactgcgcctccttggtttactgcggaggcgactgttatagcggctttgattattgggggcaggggaccctcgtaaccgtgagctctacgcgtatccagaaccctgatcctgccgtgtaccagctgcgggatagcaagagcagcgacaagagcgtgtgtctgttcaccgacttcgacagccagaccaacgtgtcccagagcaaggactccgacgtgtacatcaccgataagaccgtgctggacatgcggagcatggacttcaagagcaactccgccgtggcctggtccaacaagtccgatttcgcctgcgccaacgccttcaacaacagcattatccccgaggacacattcttcccaagccccgagagcagctgcggtacccagagttttgggttgttggaccctaaattgtgctatctgttggacggaatcctgttcatttacggagtgatcctgaccgcattgttcctgcgggttaagttttccagatccgcagacgcacccgcttaccaacaagggcagaaccaactctacaatgaacttaatttggggcggagggaagagtacgacgttctggacaaaaggaggggacgagatcccgagatgggcggaaagcctcagcgaaggaagaatccgcaagaggggctttataacgaactccagaaagataaaatggcagaagcctatagtgagattgggatgaagggagaaaggaggaggggtaaaggtcacgatgggttgtaccaaggattgagcacagccactaaagatacctatgatgcgctccacatgcaggccctgccgccaaga

SEQ ID NO: 2342 - DNA, 2856 bp, Artificial Sequence
  Synthetic Polynucloetide
atggccttaccagtgaccgccttgctcctgccgctggccttgctgctccacgccgccaggccggaagtgcagctggttgaatctggcggaggactggttcagcctggcggatctctgagactgtcttgtgccgccagcggcttcagcttcagcgacttttggatgagctgggtccgacaggcccctggcaaaggacttgaatgggtcgccacaatcagccaggccggcagcgagaaggactacgtggactctgtgaagggcagattcaccatcagccgggacaacgccaagaagtccctgtacctccagatgaacagcctgagagccgaggacaccgccgtgtactattgtgcctctggcgtgtacagcttcgactacagaggccagggcaccctggtcacagtctcttctggtaccggcggaggcggatctggcggcggaggtagcggtggcggaggatctgaattcgacattcagatgacacagagccctagcagcctgagcgcctctgtgggagacagagtgaccatcacatgcaagagcagccagagcgtgctgtactccagcaatcagaagaactacctggcctggttccagcagaagcctggcaaggctcctaagctgctgatctactgggccagcaccagagaaagcggcgtgccaagcagattttctggcagcggctctggcaccgacttcaccctgacaatatccagcctccagcctgaggacttcgccacctacttttgccaccagtacctgagcagctacacattcggacagggcaccaaggtggaaatcaagcggctcgaggacctgaagaacgtgttcccacctgaggtggccgtgttcgagcctagcgaggccgagatcagccacacccagaaagccaccctcgtgtgcctggctaccggcttctaccccgaccatgtggaactgtcttggtgggtcaacggcaaagaggtgcacagcggcgtgtctaccgacccccagccactgaaagaacagcccgccctgaacgacagccggtactgcctgagcagcagactgagagtgtccgccaccttctggcagaacccccggaaccacttcagatgccaggtgcagttctacggcctgagcgagaacgacgagtggacccaggacagagccaagcccgtgacccagatcgtgtctgccgaagcctggggcagagccgattgcggatcccagagcttcggcctgctggaccccaagctgtgctacctgctggatggcatcctgttcatctacggcgtgatcctgaccgccctgttcctgagagtgaagttcagcagaagcgccgacgcccctgcctaccagcagggacagaaccaactgtacaacgagctgaacctgggcagacgggaagagtacgacgtgctggacaagcggagaggcagggaccctgagatgggcggaaagccccagcggagaaagaacccccaggaaggactgtataacgaactccagaaagacaagatggccgaagcctacagcgagatcggcatgaagggcgagcggagaagaggcaagggccacgatggcctgtaccagggcctgagcaccgccaccaaggacacctatgacgccctgcacatgcaggccctgcctccaagaagggccaagcgatctggatctggagcaacaaacttctcactactcaaacaagcaggtgacgtggaggagaatcccgggcctactagtatggactggatttggcgcatccttttccttgtcggcgctgctaccggcgcgcattccttcgaagaggtgcagctggttgaatctggcggaggactggttcagcctggcggatctctgagactgtcttgtgccgccagcggctacaccttcaccacctattggatgcactgggtccgacaggcccctggcaaaggacttgagtgggtcggatatatcaggcccagcaccggctacacagagtacaaccagaagttcaaggaccgcttcaccatcagcgccgacaccagcaagaataccgcctacctccagatgaacagcctgagagccgaggacaccgccgtgtactactgtgccagatccagatggctgctggactattggggccagggcacactggttacagtttctacgcgtatccagaaccctgatcctgccgtgtaccagctgcgggatagcaagagcagcgacaagagcgtgtgtctgttcaccgacttcgacagccagaccaacgtgtcccagagcaaggactccgacgtgtacatcaccgataagaccgtgctggacatgcggagcatggacttcaagagcaactccgccgtggcctggtccaacaagtccgatttcgcctgcgccaacgccttcaacaacagcattatccccgaggacacattcttcccaagccccgagagcagctgcggtacccagagttttgggttgttggaccctaaattgtgctatctgttggacggaatcctgttcatttacggagtgatcctgaccgcattgttcctgcgggttaagttttccagatccgcagacgcacccgcttaccaacaagggcagaaccaactctacaatgaacttaatttggggcggagggaagagtacgacgttctggacaaaaggaggggacgagatcccgagatgggcggaaagcctcagcgaaggaagaatccgcaagaggggctttataacgaactccagaaagataaaatggcagaagcctatagtgagattgggatgaagggagaaaggaggaggggtaaaggtcacgatgggttgtaccaaggattgagcacagccactaaagatacctatgatgcgctccacatgcaggccctgccgccaaga

SEQ ID NO: 2343 - DNA, 2847 bp, Artificial Sequence
  Synthetic Polynucloetide
atggccttaccagtgaccgccttgctcctgccgctggccttgctgctccacgccgccaggccggaagtgcagctggttgaatctggcggaggactggttcagcctggcggatctctgagactgtcttgtgccgccagcggcttcagcttcagcgacttttggatgagctgggtccgacaggcccctggcaaaggacttgaatgggtcgccacaatcagccaggccggcagcgagaaggactacgtggactctgtgaagggcagattcaccatcagccgggacaacgccaagaagtccctgtacctccagatgaacagcctgagagccgaggacaccgccgtgtactattgtgcctctggcgtgtacagcttcgactacagaggccagggcaccctggtcacagtctcttctggtaccggcggaggcggatctggcggcggaggtagcggtggcggaggatctgaattcgacatccagatgacacagagccctagcagcctgtctgccagcgtgggagacagagtgaccatcacctgtagagccagccaggacatcagcaactacctgaactggtatcagcagaagcccggcaaggcccctaagctgctgatctactacaccagcagactgcacagcggcgtgcccagcagattttctggctctggcagcggcaccgacttcaccctgacaatatctagcctccagcctgaggacttcgccacctactattgccagcagggcaacaccctgccttacacatttggacagggcaccaaggtggaaatcaagagactcgaggacctgaagaacgtgttcccacctgaggtggccgtgttcgagcctagcgaggccgagatcagccacacccagaaagccaccctcgtgtgcctggctaccggcttctaccccgaccatgtggaactgtcttggtgggtcaacggcaaagaggtgcacagcggcgtgtctaccgacccccagccactgaaagaacagcccgccctgaacgacagccggtactgcctgagcagcagactgagagtgtccgccaccttctggcagaacccccggaaccacttcagatgccaggtgcagttctacggcctgagcgagaacgacgagtggacccaggacagagccaagcccgtgacccagatcgtgtctgccgaagcctggggcagagccgattgcggatcccagagcttcggcctgctggaccccaagctgtgctacctgctggatggcatcctgttcatctacggcgtgatcctgaccgccctgttcctgagagtgaagttcagcagaagcgccgacgcccctgcctaccagcagggacagaaccaactgtacaacgagctgaacctgggcagacgggaagagtacgacgtgctggacaagcggagaggcagggaccctgagatgggcggaaagccccagcggagaaagaacccccaggaaggactgtataacgaactccagaaagacaagatggccgaagcctacagcgagatcggcatgaagggcgagcggagaagaggcaagggccacgatggcctgtaccagggcctgagcaccgccaccaaggacacctatgacgccctgcacatgcaggccctgcctccaagaagggccaagcgatctggatctggagcaacaaacttctcactactcaaacaagcaggtgacgtggaggagaatcccgggcctactagtatggactggatttggcgcatccttttccttgtcggcgctgctaccggcgcgcattccttcgaagaagtgcagctggttgaatcaggtggcggcctggttcaacctggcggatctctgagactgagctgtgccgccagcggcttcaccttcagcgactactttatgagctgggtccgacaggcccctggcaaaggacttgaatgggtcgccaccatcagcaatggcggcacctacacttactaccccgacagcgtgaagggcagattcaccatctccagagacaacagcaagaacaccctgtacctccagatgaactccctgagagccgaggacaccgccgtgtactactgcgccagattcgacggctacatcttcgactattggggccagggcaccctggtcacagtctcttctacgcgtatccagaaccctgatcctgccgtgtaccagctgcgggatagcaagagcagcgacaagagcgtgtgtctgttcaccgacttcgacagccagaccaacgtgtcccagagcaaggactccgacgtgtacatcaccgataagaccgtgctggacatgcggagcatggacttcaagagcaactccgccgtggcctggtccaacaagtccgatttcgcctgcgccaacgccttcaacaacagcattatccccgaggacacattcttcccaagccccgagagcagctgcggtacccagagttttgggttgttggaccctaaattgtgctatctgttggacggaatcctgttcatttacggagtgatcctgaccgcattgttcctgcgggttaagttttccagatccgcagacgcacccgcttaccaacaagggcagaaccaactctacaatgaacttaatttggggcggagggaagagtacgacgttctggacaaaaggaggggacgagatcccgagatgggcggaaagcctcagcgaaggaagaatccgcaagaggggctttataacgaactccagaaagataaaatggcagaagcctatagtgagattgggatgaagggagaaaggaggaggggtaaaggtcacgatgggttgtaccaaggattgagcacagccactaaagatacctatgatgcgctccacatgcaggccctgccgccaaga

SEQ ID NO: 2344 - DNA, 2673 bp, Artificial Sequence
  Synthetic Polynucloetide
atggccttaccagtgaccgccttgctcctgccgctggccttgctgctccacgccgccaggccggaagtgcagctggttgaatctggcggaggactggttcagcctggcggatctctgagactgtcttgtgccgccagcggcttcagcttcagcgacttttggatgagctgggtccgacaggcccctggcaaaggacttgaatgggtcgccacaatcagccaggccggcagcgagaaggactacgtggactctgtgaagggcagattcaccatcagccgggacaacgccaagaagtccctgtacctccagatgaacagcctgagagccgaggacaccgccgtgtactattgtgcctctggcgtgtacagcttcgactacagaggccagggcaccctggtcacagtctcttctggtaccggcggaggcggatctggcggcggaggtagcggtggcggaggatctgaattcgacatccagatgacacagactacatcctccctgtctgcctctctgggagacagagtcaccatcagttgcagggcaagtcaggacattagtaagtacctgaactggtatcagcagaaaccagatggaactgttaaactcctgatctaccatacatcaagattacactcaggagtcccatcaaggttcagtggcagtgggtctggaacagattattctctcaccattagcaacctggagcaagaagatattgccacttacttttgccaacagggtaatacgcttccgtacacgttcggaggggggaccaagctggagatcacactcgaggacctgaagaacgtgttcccacctgaggtggccgtgttcgagcctagcgaggccgagatcagccacacccagaaagccaccctcgtgtgcctggctaccggcttctaccccgaccatgtggaactgtcttggtgggtcaacggcaaagaggtgcacagcggcgtgtgtaccgacccccagccactgaaagaacagcccgccctgaacgacagccggtactgcctgagcagcagactgagagtgtccgccaccttctggcagaacccccggaaccacttcagatgccaggtgcagttctacggcctgagcgagaacgacgagtggacccaggacagagccaagcccgtgacccagatcgtgtctgccgaagcctggggcagagccgattgcggctttaccagcgagagctaccagcagggcgtgctgagcgccaccatcctgtacgagatcctgctgggcaaggccaccctgtacgccgtgctggtgtctgccctggtgctgatggctatggtcaagcggaaggacagccggggaagggccaagcgatctggatctggagcaacaaacttctcactactcaaacaagcaggtgacgtggaggagaatcccgggcctactagtatggactggatttggcgcatccttttccttgtcggcgctgctaccggcgcgcattccgggccccagctccagctgcaagagtctggacctggcctggtcaagcctagcgagacactgagcctgacctgtaccgtgtccggcgatagcatcagcagcggcgattactactggggctggatcagacagcctcctggcaaaggactggaatggatcggccacatctactacagcggcgtgacctactacaaccccagcctgaagtccagagtgaccatcagcgtggacaccagccggaaccagttctccctgaagctgtctagcgtgacagccgccgataccgccgtgtactactgcaccagagaggacagcagcaactggcggagtagaggccagggaacactggtcacagttagctctggatccggcggaggcggaagtggaggcggaggatctggcggcggaggctctttcgaagtgaaactgcaggagtcaggacctggcctggtggcgccctcacagagcctgtccgtcacatgcactgtctcaggggtctcattacccgactatggtgtaagctggattcgccagcctccacgaaagggtctggagtggctgggagtaatatggggtagtgaaaccacatactataattcagctctcaaatccagactgaccatcatcaaggacaactccaagagccaagttttcttaaaaatgaacagtctgcaaactgatgacacagccatttactactgtgccaaacattattactacggtggtagctatgctatggactactggggccaaggaacctcagtcaccgtctcctcaacgcgtatccagaaccctgatcctgccgtgtaccagctgcgggatagcaagagcagcgacaagagcgtgtgtctgttcaccgacttcgacagccagaccaacgtgtcccagagcaaggactccgacgtgtacatcaccgataagtgcgtgctggacatgcggagcatggacttcaagagcaactccgccgtggcctggtccaacaagtccgatttcgcctgcgccaacgccttcaacaacagcattatccccgaggacacattcttcccaagccccgagagcagctgcgacgtgaagctggtggaaaagagcttcgagacagacaccaacctgaacttccagaacctgagcgtgatcggcttcagaatcctgctgctgaaagtggccggctttaacctgctgatgaccctgcggctgtggtccagc

SEQ ID NO: 2345 - DNA, 2676 bp, Artificial Sequence
  Synthetic Polynucloetide
atggccttaccagtgaccgccttgctcctgccgctggccttgctgctccacgccgccaggccggaagtgcagctggttgaatctggcggaggactggttcagcctggcggatctctgagactgtcttgtgccgccagcggcttcagcttcagcgacttttggatgagctgggtccgacaggcccctggcaaaggacttgaatgggtcgccacaatcagccaggccggcagcgagaaggactacgtggactctgtgaagggcagattcaccatcagccgggacaacgccaagaagtccctgtacctccagatgaacagcctgagagccgaggacaccgccgtgtactattgtgcctctggcgtgtacagcttcgactacagaggccagggcaccctggtcacagtctcttctggtaccggcggaggcggatctggcggcggaggtagcggtggcggaggatctgaattcgagatcgtgatgacccagagccctgccaccctgtctctgagccctggcgaaagagccaccctgagctgtagagccagccaggacatcagcaagtacctgaactggtatcagcagaagcccggccaggcccccagactgctgatctaccacaccagcagactgcacagcggcatccccgccagattttctggctctggcagcggcaccgactacaccctgacaatcagcagcctccagcccgaggacttcgccgtgtacttctgtcagcaaggcaacaccctgccctacaccttcggccagggcaccaagctggaaatcaagctcgaggacctgaagaacgtgttcccacctgaggtggccgtgttcgagcctagcgaggccgagatcagccacacccagaaagccaccctcgtgtgcctggctaccggcttctaccccgaccatgtggaactgtcttggtgggtcaacggcaaagaggtgcacagcggcgtgtgtaccgacccccagccactgaaagaacagcccgccctgaacgacagccggtactgcctgagcagcagactgagagtgtccgccaccttctggcagaacccccggaaccacttcagatgccaggtgcagttctacggcctgagcgagaacgacgagtggacccaggacagagccaagcccgtgacccagatcgtgtctgccgaagcctggggcagagccgattgcggctttaccagcgagagctaccagcagggcgtgctgagcgccaccatcctgtacgagatcctgctgggcaaggccaccctgtacgccgtgctggtgtctgccctggtgctgatggctatggtcaagcggaaggacagccggggaagggccaagcgatctggatctggagcaacaaacttctcactactcaaacaagcaggtgacgtggaggagaatcccgggcctactagtatggactggatttggcgcatccttttccttgtcggcgctgctaccggcgcgcattccgggccccagctccagctgcaagagtctggacctggcctggtcaagcctagcgagacactgagcctgacctgtaccgtgtccggcgatagcatcagcagcggcgattactactggggctggatcagacagcctcctggcaaaggactggaatggatcggccacatctactacagcggcgtgacctactacaaccccagcctgaagtccagagtgaccatcagcgtggacaccagccggaaccagttctccctgaagctgtctagcgtgacagccgccgataccgccgtgtactactgcaccagagaggacagcagcaactggcggagtagaggccagggaacactggtcacagttagctctggatccggcggaggcggaagtggaggcggaggatctggcggcggaggctctttcgaacaggtgcaactccaggaatctggccctggcctcgtgaagcccagcgagacactgagcctgacctgtaccgtgtccggcgtgtccctgcctgactatggcgtgtcctggatcagacagccccctggcaagggcctggaatggatcggagtgatttggggcagcgaaaccacctactacaacagctccctgaagtccagagtgaccatctccaaggacaactccaagaaccaggtgtccctgaagctgagcagcgtgacagccgccgacaccgccgtgtattactgcgccaagcactactactacggcggcagctacgctatggactactggggccagggaaccctcgtgaccgtgtctagtacgcgtatccagaaccctgatcctgccgtgtaccagctgcgggatagcaagagcagcgacaagagcgtgtgtctgttcaccgacttcgacagccagaccaacgtgtcccagagcaaggactccgacgtgtacatcaccgataagtgcgtgctggacatgcggagcatggacttcaagagcaactccgccgtggcctggtccaacaagtccgatttcgcctgcgccaacgccttcaacaacagcattatccccgaggacacattcttcccaagccccgagagcagctgcgacgtgaagctggtggaaaagagcttcgagacagacaccaacctgaacttccagaacctgagcgtgatcggcttcagaatcctgctgctgaaagtggccggctttaacctgctgatgaccctgcggctgtggtccagc

SEQ ID NO: 2346 - DNA, 2679 bp, Artificial Sequence
  Synthetic Polynucloetide
atggccttaccagtgaccgccttgctcctgccgctggccttgctgctccacgccgccaggccggaagtgcagctggttgaatctggcggaggactggttcagcctggcggatctctgagactgtcttgtgccgccagcggcttcagcttcagcgacttttggatgagctgggtccgacaggcccctggcaaaggacttgaatgggtcgccacaatcagccaggccggcagcgagaaggactacgtggactctgtgaagggcagattcaccatcagccgggacaacgccaagaagtccctgtacctccagatgaacagcctgagagccgaggacaccgccgtgtactattgtgcctctggcgtgtacagcttcgactacagaggccagggcaccctggtcacagtctcttctggtaccggcggaggcggatctggcggcggaggtagcggtggcggaggatctgaattcgacgagatcgtgctgacacagagccccgccaccctgtcactgtctccaggcgaaagagccaccctgagctgtagcgccagcagcagcgtgtcctacatgcactggtatcagcagaagcccggccaggcccccagactgctgatctacgataccagcaagctggcctccggcatccccgccagattttctggcagcggctccggcaccgacttcaccctgacaatcagcagcctggaacccgaggacgtggccgtgtactactgttttcaaggcagcgtgtaccccttcaccttcggccagggcaccaagctggaaatcaagagactcgaggacctgaagaacgtgttcccacctgaggtggccgtgttcgagcctagcgaggccgagatcagccacacccagaaagccaccctcgtgtgcctggctaccggcttctaccccgaccatgtggaactgtcttggtgggtcaacggcaaagaggtgcacagcggcgtgtgtaccgacccccagccactgaaagaacagcccgccctgaacgacagccggtactgcctgagcagcagactgagagtgtccgccaccttctggcagaacccccggaaccacttcagatgccaggtgcagttctacggcctgagcgagaacgacgagtggacccaggacagagccaagcccgtgacccagatcgtgtctgccgaagcctggggcagagccgattgcggctttaccagcgagagctaccagcagggcgtgctgagcgccaccatcctgtacgagatcctgctgggcaaggccaccctgtacgccgtgctggtgtctgccctggtgctgatggctatggtcaagcggaaggacagccggggaagggccaagcgatctggatctggagcaacaaacttctcactactcaaacaagcaggtgacgtggaggagaatcccgggcctactagtatggactggatttggcgcatccttttccttgtcggcgctgctaccggcgcgcattccgggccccagctccagctgcaagagtctggacctggcctggtcaagcctagcgagacactgagcctgacctgtaccgtgtccggcgatagcatcagcagcggcgattactactggggctggatcagacagcctcctggcaaaggactggaatggatcggccacatctactacagcggcgtgacctactacaaccccagcctgaagtccagagtgaccatcagcgtggacaccagccggaaccagttctccctgaagctgtctagcgtgacagccgccgataccgccgtgtactactgcaccagagaggacagcagcaactggcggagtagaggccagggaacactggtcacagttagctctggatccggcggaggcggaagtggaggcggaggatctggcggcggaggctctttcgaacaggtgcagctccaggaatctggccctggcctcgtgaagcctagccagaccctgagcctgacctgtaccgtgtctggcggcagcatcagcacaagcggcatgggcgtgggctggatcagacagcaccctggcaagggcctggaatggatcggccacatttggtgggacgacgacaagcggtacaaccccgccctgaagtccagagtgaccatcagcgtggacaccagcaagaaccagttcagcctgaagctgagcagcgtgacagccgccgataccgccgtgtattattgcgcccggatggaactgtggtcctactacttcgactactggggccagggaaccctcgtgaccgtgtctagtacgcgtatccagaaccctgatcctgccgtgtaccagctgcgggatagcaagagcagcgacaagagcgtgtgtctgttcaccgacttcgacagccagaccaacgtgtcccagagcaaggactccgacgtgtacatcaccgataagtgcgtgctggacatgcggagcatggacttcaagagcaactccgccgtggcctggtccaacaagtccgatttcgcctgcgccaacgccttcaacaacagcattatccccgaggacacattcttcccaagccccgagagcagctgcgacgtgaagctggtggaaaagagcttcgagacagacaccaacctgaacttccagaacctgagcgtgatcggcttcagaatcctgctgctgaaagtggccggctttaacctgctgatgaccctgcggctgtggtccagc

SEQ ID NO: 2347 - DNA, 2673 bp, Artificial Sequence
  Synthetic Polynucloetide
atggccttaccagtgaccgccttgctcctgccgctggccttgctgctccacgccgccaggccggaagtgcagctggttgaatctggcggaggactggttcagcctggcggatctctgagactgtcttgtgccgccagcggcttcagcttcagcgacttttggatgagctgggtccgacaggcccctggcaaaggacttgaatgggtcgccacaatcagccaggccggcagcgagaaggactacgtggactctgtgaagggcagattcaccatcagccgggacaacgccaagaagtccctgtacctccagatgaacagcctgagagccgaggacaccgccgtgtactattgtgcctctggcgtgtacagcttcgactacagaggccagggcaccctggtcacagtctcttctggtaccggcggaggcggatctggcggcggaggtagcggtggcggaggatctgaattcgactacatccacgtgacacagagccctagcagcctgtccgtgtccatcggcgatagagtgaccatcaactgccagacctctcaaggcgtgggcagcgacctgcactggtatcagcacaaacctggcagagcccctaagctgctgatccaccatgccagctctgtggaagatggcgtgcccagcagattttccggcaccggatttcacaccagcttcaacctgacaatcaacgacctccaggccgacgacatcggcacctactactgtcaagtgctccagagcttcggcagaggcagcagactggatacaaaactcgaggacctgaagaacgtgttcccacctgaggtggccgtgttcgagcctagcgaggccgagatcagccacacccagaaagccaccctcgtgtgcctggctaccggcttctaccccgaccatgtggaactgtcttggtgggtcaacggcaaagaggtgcacagcggcgtgtgtaccgacccccagccactgaaagaacagcccgccctgaacgacagccggtactgcctgagcagcagactgagagtgtccgccaccttctggcagaacccccggaaccacttcagatgccaggtgcagttctacggcctgagcgagaacgacgagtggacccaggacagagccaagcccgtgacccagatcgtgtctgccgaagcctggggcagagccgattgcggctttaccagcgagagctaccagcagggcgtgctgagcgccaccatcctgtacgagatcctgctgggcaaggccaccctgtacgccgtgctggtgtctgccctggtgctgatggctatggtcaagcggaaggacagccggggaagggccaagcgatctggatctggagcaacaaacttctcactactcaaacaagcaggtgacgtggaggagaatcccgggcctactagtatggactggatttggcgcatccttttccttgtcggcgctgctaccggcgcgcattccgggccccagctccagctgcaagagtctggacctggcctggtcaagcctagcgagacactgagcctgacctgtaccgtgtccggcgatagcatcagcagcggcgattactactggggctggatcagacagcctcctggcaaaggactggaatggatcggccacatctactacagcggcgtgacctactacaaccccagcctgaagtccagagtgaccatcagcgtggacaccagccggaaccagttctccctgaagctgtctagcgtgacagccgccgataccgccgtgtactactgcaccagagaggacagcagcaactggcggagtagaggccagggaacactggtcacagttagctctggatccggcggaggcggaagtggaggcggaggatctggcggcggaggctctttcgaaagggcacacctggtgcagtctggcaccgccatgaagaaacctggcgcttccgtcagagtgtcctgtcagacaagcggctacaccttcacagcccacatcctgttctggttcagacaggccccaggcagaggactggaatgggtcggatggatcaagccccagtacggggccgtgaatttcggcggaggcttcagagacagagtgaccctgaccagggacgtgtaccgggaaatcgcctacatggacatccggggcctgaagcctgatgacaccgccgtgtactactgcgccagggatagaagctacggcgacagctcttgggctctcgatgcttggggacagggcacaacagtggtggtgtctgctacgcgtatccagaaccctgatcctgccgtgtaccagctgcgggatagcaagagcagcgacaagagcgtgtgtctgttcaccgacttcgacagccagaccaacgtgtcccagagcaaggactccgacgtgtacatcaccgataagtgcgtgctggacatgcggagcatggacttcaagagcaactccgccgtggcctggtccaacaagtccgatttcgcctgcgccaacgccttcaacaacagcattatccccgaggacacattcttcccaagccccgagagcagctgcgacgtgaagctggtggaaaagagcttcgagacagacaccaacctgaacttccagaacctgagcgtgatcggcttcagaatcctgctgctgaaagtggccggctttaacctgctgatgaccctgcggctgtggtccagc

SEQ ID NO: 2348 - DNA, 2703 bp, Artificial Sequence
  Synthetic Polynucloetide
atggccttaccagtgaccgccttgctcctgccgctggccttgctgctccacgccgccaggccggaagtgcagctggttgaatctggcggaggactggttcagcctggcggatctctgagactgtcttgtgccgccagcggcttcagcttcagcgacttttggatgagctgggtccgacaggcccctggcaaaggacttgaatgggtcgccacaatcagccaggccggcagcgagaaggactacgtggactctgtgaagggcagattcaccatcagccgggacaacgccaagaagtccctgtacctccagatgaacagcctgagagccgaggacaccgccgtgtactattgtgcctctggcgtgtacagcttcgactacagaggccagggcaccctggtcacagtctcttctggtaccggcggaggcggatctggcggcggaggtagcggtggcggaggatctgaattcgacgtgcagatgatccagacccccgatagcctggccgtgtccctgggacagagagccaccatctcttgcagagccagcgagagcgtggacaactacggcatcagcttcatgcactggtatcagcagaagcccggccagagccccaagctgctgatctacagagcctccaacctggaaagcggcatccccgccagattttccggcagcggcagcagaaccgacttcaccctgaccatcaaccccgtggaaaccgacgacgtggcaacctactactgccagcagaacaacaaggacccccccacctttggcggaggcaccaagctggaaatcaagctcgaggacctgaagaacgtgttcccacctgaggtggccgtgttcgagcctagcgaggccgagatcagccacacccagaaagccaccctcgtgtgcctggctaccggcttctaccccgaccatgtggaactgtcttggtgggtcaacggcaaagaggtgcacagcggcgtgtgtaccgacccccagccactgaaagaacagcccgccctgaacgacagccggtactgcctgagcagcagactgagagtgtccgccaccttctggcagaacccccggaaccacttcagatgccaggtgcagttctacggcctgagcgagaacgacgagtggacccaggacagagccaagcccgtgacccagatcgtgtctgccgaagcctggggcagagccgattgcggctttaccagcgagagctaccagcagggcgtgctgagcgccaccatcctgtacgagatcctgctgggcaaggccaccctgtacgccgtgctggtgtctgccctggtgctgatggctatggtcaagcggaaggacagccggggaagggccaagcgatctggatctggagcaacaaacttctcactactcaaacaagcaggtgacgtggaggagaatcccgggcctactagtatggactggatttggcgcatccttttccttgtcggcgctgctaccggcgcgcattccgggccccagctccagctgcaagagtctggacctggcctggtcaagcctagcgagacactgagcctgacctgtaccgtgtccggcgatagcatcagcagcggcgattactactggggctggatcagacagcctcctggcaaaggactggaatggatcggccacatctactacagcggcgtgacctactacaaccccagcctgaagtccagagtgaccatcagcgtggacaccagccggaaccagttctccctgaagctgtctagcgtgacagccgccgataccgccgtgtactactgcaccagagaggacagcagcaactggcggagtagaggccagggaacactggtcacagttagctctggatccggcggaggcggaagtggaggcggaggatctggcggcggaggctctttcgaagggggaggcggctctcaggtgcaactccagcagtctggcgctgagcttgtgaagcctggggccagcgtgaagattagctgcaaggccagcggctacgccttcagcagctactggatgaactgggtcaagcagcggcctggcaagggcctggaatggatcggccaaatctaccccggcgacggcgacaccacctacaacggcaagttcaagggcaaggccaccctgacagccgacaagagcagcagcaccgtgtacatgcaactgaacagcctgaccagcgaggacagcgccgtgtacttctgcgtgcggtactactacggcagctccggctacttcgactattggggccagggcaccacactgaccgtgtcctctacgcgtatccagaaccctgatcctgccgtgtaccagctgcgggatagcaagagcagcgacaagagcgtgtgtctgttcaccgacttcgacagccagaccaacgtgtcccagagcaaggactccgacgtgtacatcaccgataagtgcgtgctggacatgcggagcatggacttcaagagcaactccgccgtggcctggtccaacaagtccgatttcgcctgcgccaacgccttcaacaacagcattatccccgaggacacattcttcccaagccccgagagcagctgcgacgtgaagctggtggaaaagagcttcgagacagacaccaacctgaacttccagaacctgagcgtgatcggcttcagaatcctgctgctgaaagtggccggctttaacctgctgatgaccctgcggctgtggtccagc

SEQ ID NO: 2349 - DNA, 2676 bp, Artificial Sequence
  Synthetic Polynucloetide
atggccttaccagtgaccgccttgctcctgccgctggccttgctgctccacgccgccaggccggaagtgcagctggttgaatctggcggaggactggttcagcctggcggatctctgagactgtcttgtgccgccagcggcttcagcttcagcgacttttggatgagctgggtccgacaggcccctggcaaaggacttgaatgggtcgccacaatcagccaggccggcagcgagaaggactacgtggactctgtgaagggcagattcaccatcagccgggacaacgccaagaagtccctgtacctccagatgaacagcctgagagccgaggacaccgccgtgtactattgtgcctctggcgtgtacagcttcgactacagaggccagggcaccctggtcacagtctcttctggtaccggcggaggcggatctggcggcggaggtagcggtggcggaggatctgaattcgacgtgcagatgatccagacccccagcagcctgtctgccagcctgggcgatagagtgaccatcagctgtcgggccagccaggacatcggcaactacctgaactggtatcagcagaaacccgacggcaccgtgaagctgctgatctactacaccagcagactgcacagcggcgtgcccagcagattttctggcagcggctctggcaccgagtacagcctgaccatctccaacctggaacaggaagatattgctacctacttctgtcagcaaggcagcgccctgccccctacatttggcggcggaacaaagctggaaatcaacctcgaggacctgaagaacgtgttcccacctgaggtggccgtgttcgagcctagcgaggccgagatcagccacacccagaaagccaccctcgtgtgcctggctaccggcttctaccccgaccatgtggaactgtcttggtgggtcaacggcaaagaggtgcacagcggcgtgtgtaccgacccccagccactgaaagaacagcccgccctgaacgacagccggtactgcctgagcagcagactgagagtgtccgccaccttctggcagaacccccggaaccacttcagatgccaggtgcagttctacggcctgagcgagaacgacgagtggacccaggacagagccaagcccgtgacccagatcgtgtctgccgaagcctggggcagagccgattgcggctttaccagcgagagctaccagcagggcgtgctgagcgccaccatcctgtacgagatcctgctgggcaaggccaccctgtacgccgtgctggtgtctgccctggtgctgatggctatggtcaagcggaaggacagccggggaagggccaagcgatctggatctggagcaacaaacttctcactactcaaacaagcaggtgacgtggaggagaatcccgggcctactagtatggactggatttggcgcatccttttccttgtcggcgctgctaccggcgcgcattccgggccccagctccagctgcaagagtctggacctggcctggtcaagcctagcgagacactgagcctgacctgtaccgtgtccggcgatagcatcagcagcggcgattactactggggctggatcagacagcctcctggcaaaggactggaatggatcggccacatctactacagcggcgtgacctactacaaccccagcctgaagtccagagtgaccatcagcgtggacaccagccggaaccagttctccctgaagctgtctagcgtgacagccgccgataccgccgtgtactactgcaccagagaggacagcagcaactggcggagtagaggccagggaacactggtcacagttagctctggatccggcggaggcggaagtggaggcggaggatctggcggcggaggctctttcgaagctctccagctccagcagtctggcgcagaactcgtgcggcctggcgcttctgtgaccctgagctgtaaagccagcggctacaccttcaccgactacgagatgcactgggtcaagcagacccctgtgcacggcctggaatggatcggagccatcgaccctgagacaggcggcaccgcctacaaccagaagttcgagggcaaggccatcctgaccgccgacaagagcagcagcacagcctacatggaactgcggagcctgacctccgaggacagccccgtgtactactgtgccagacggcggtactacggcagcagctccttcgactattggggccagggcaccaccctgaccgtgtctagtacgcgtatccagaaccctgatcctgccgtgtaccagctgcgggatagcaagagcagcgacaagagcgtgtgtctgttcaccgacttcgacagccagaccaacgtgtcccagagcaaggactccgacgtgtacatcaccgataagtgcgtgctggacatgcggagcatggacttcaagagcaactccgccgtggcctggtccaacaagtccgatttcgcctgcgccaacgccttcaacaacagcattatccccgaggacacattcttcccaagccccgagagcagctgcgacgtgaagctggtggaaaagagcttcgagacagacaccaacctgaacttccagaacctgagcgtgatcggcttcagaatcctgctgctgaaagtggccggctttaacctgctgatgaccctgcggctgtggtccagc

SEQ ID NO: 2350 - DNA, 2688 bp, Artificial Sequence
  Synthetic Polynucloetide
atggccttaccagtgaccgccttgctcctgccgctggccttgctgctccacgccgccaggccggaagtgcagctggttgaatctggcggaggactggttcagcctggcggatctctgagactgtcttgtgccgccagcggcttcagcttcagcgacttttggatgagctgggtccgacaggcccctggcaaaggacttgaatgggtcgccacaatcagccaggccggcagcgagaaggactacgtggactctgtgaagggcagattcaccatcagccgggacaacgccaagaagtccctgtacctccagatgaacagcctgagagccgaggacaccgccgtgtactattgtgcctctggcgtgtacagcttcgactacagaggccagggcaccctggtcacagtctcttctggtaccggcggaggcggatctggcggcggaggtagcggtggcggaggatctgaattcgacatcgtcctgacccagtccccagccagcctggcggtgtccctgggtcaacgagctaccatttcctgcagagcctctaagtccgtatccacttccggctatagttacctgcattggtaccaacagaaaccagggcagccacccaagctgctcatctatctggcctcaaacctggagtccggcgtgcccgccagattctccggaagtgggagcggcaccgactttacattgaacatccacccagtcgaagaggaagatgctgccacttattactgtcagcactccagggagctgccatttacatttggctctggcacaaaactggagatcaaactcgaggacctgaagaacgtgttcccacctgaggtggccgtgttcgagcctagcgaggccgagatcagccacacccagaaagccaccctcgtgtgcctggctaccggcttctaccccgaccatgtggaactgtcttggtgggtcaacggcaaagaggtgcacagcggcgtgtgtaccgacccccagccactgaaagaacagcccgccctgaacgacagccggtactgcctgagcagcagactgagagtgtccgccaccttctggcagaacccccggaaccacttcagatgccaggtgcagttctacggcctgagcgagaacgacgagtggacccaggacagagccaagcccgtgacccagatcgtgtctgccgaagcctggggcagagccgattgcggctttaccagcgagagctaccagcagggcgtgctgagcgccaccatcctgtacgagatcctgctgggcaaggccaccctgtacgccgtgctggtgtctgccctggtgctgatggctatggtcaagcggaaggacagccggggaagggccaagcgatctggatctggagcaacaaacttctcactactcaaacaagcaggtgacgtggaggagaatcccgggcctactagtatggactggatttggcgcatccttttccttgtcggcgctgctaccggcgcgcattccgggccccagctccagctgcaagagtctggacctggcctggtcaagcctagcgagacactgagcctgacctgtaccgtgtccggcgatagcatcagcagcggcgattactactggggctggatcagacagcctcctggcaaaggactggaatggatcggccacatctactacagcggcgtgacctactacaaccccagcctgaagtccagagtgaccatcagcgtggacaccagccggaaccagttctccctgaagctgtctagcgtgacagccgccgataccgccgtgtactactgcaccagagaggacagcagcaactggcggagtagaggccagggaacactggtcacagttagctctggatccggcggaggcggaagtggaggcggaggatctggcggcggaggctctttcgaacaggttcagctggtcgagtccgggggaggtctggtacagccgggtggcagcctcaagctgtcatgtgccgcatctggttttgactttagcaggtattggatgagctgggtccgccaggccccgggcaagggacttgagtggattggagaaataaaccctacttccagcacaatcaacttcacaccttctttgaaagataaggtttttatctctcgggataacgctaaaaacacactgtacttgcagatgtctaaggtgcgaagcgaagacaccgccctctattattgcgcccggggtaattactaccgctatggggatgcgatggactattgggggcaaggtacctccgtcacggtctcaacgcgtatccagaaccctgatcctgccgtgtaccagctgcgggatagcaagagcagcgacaagagcgtgtgtctgttcaccgacttcgacagccagaccaacgtgtcccagagcaaggactccgacgtgtacatcaccgataagtgcgtgctggacatgcggagcatggacttcaagagcaactccgccgtggcctggtccaacaagtccgatttcgcctgcgccaacgccttcaacaacagcattatccccgaggacacattcttcccaagccccgagagcagctgcgacgtgaagctggtggaaaagagcttcgagacagacaccaacctgaacttccagaacctgagcgtgatcggcttcagaatcctgctgctgaaagtggccggctttaacctgctgatgaccctgcggctgtggtccagc

SEQ ID NO: 2351 - DNA, 2682 bp, Artificial Sequence
  Synthetic Polynucloetide
atggccttaccagtgaccgccttgctcctgccgctggccttgctgctccacgccgccaggccggaagtgcagctggttgaatctggcggaggactggttcagcctggcggatctctgagactgtcttgtgccgccagcggcttcagcttcagcgacttttggatgagctgggtccgacaggcccctggcaaaggacttgaatgggtcgccacaatcagccaggccggcagcgagaaggactacgtggactctgtgaagggcagattcaccatcagccgggacaacgccaagaagtccctgtacctccagatgaacagcctgagagccgaggacaccgccgtgtactattgtgcctctggcgtgtacagcttcgactacagaggccagggcaccctggtcacagtctcttctggtaccggcggaggcggatctggcggcggaggtagcggtggcggaggatctgaattcgacatccagatgacccagagccctagctcactgagcgccagcgtgggcgacagggtgaccattacctgctccgccagccaggacatcagcaactacctgaactggtaccagcagaagcccggcaaggcccccaagctgctgatctactacacctccaacctgcactccggcgtgcccagcaggttcagcggaagcggcagcggcaccgatttcaccctgaccatctccagcctgcagcccgaggacttcgccacctactactgccagcagtacaggaagctcccctggactttcggccagggcaccaaactggagatcaagcgtctcgaggacctgaagaacgtgttcccacctgaggtggccgtgttcgagcctagcgaggccgagatcagccacacccagaaagccaccctcgtgtgcctggctaccggcttctaccccgaccatgtggaactgtcttggtgggtcaacggcaaagaggtgcacagcggcgtgtgtaccgacccccagccactgaaagaacagcccgccctgaacgacagccggtactgcctgagcagcagactgagagtgtccgccaccttctggcagaacccccggaaccacttcagatgccaggtgcagttctacggcctgagcgagaacgacgagtggacccaggacagagccaagcccgtgacccagatcgtgtctgccgaagcctggggcagagccgattgcggctttaccagcgagagctaccagcagggcgtgctgagcgccaccatcctgtacgagatcctgctgggcaaggccaccctgtacgccgtgctggtgtctgccctggtgctgatggctatggtcaagcggaaggacagccggggaagggccaagcgatctggatctggagcaacaaacttctcactactcaaacaagcaggtgacgtggaggagaatcccgggcctactagtatggactggatttggcgcatccttttccttgtcggcgctgctaccggcgcgcattccgggccccagctccagctgcaagagtctggacctggcctggtcaagcctagcgagacactgagcctgacctgtaccgtgtccggcgatagcatcagcagcggcgattactactggggctggatcagacagcctcctggcaaaggactggaatggatcggccacatctactacagcggcgtgacctactacaaccccagcctgaagtccagagtgaccatcagcgtggacaccagccggaaccagttctccctgaagctgtctagcgtgacagccgccgataccgccgtgtactactgcaccagagaggacagcagcaactggcggagtagaggccagggaacactggtcacagttagctctggatccggcggaggcggaagtggaggcggaggatctggcggcggaggctctttcgaacaggtgcagctggtccagagcggcgccgaagtgaagaagcccggcagctccgtgaaagtgagctgcaaggccagcggcggcaccttcagcaactactggatgcactgggtgaggcaggcccccggacagggcctggagtggatgggcgccacctacaggggccacagcgacacctactacaaccagaagttcaagggccgggtgaccatcaccgccgacaagagcaccagcaccgcctacatggaactgagcagcctcaggagcgaggacaccgctgtgtattactgcgccaggggcgccatctacgacggctacgacgtgctggacaactggggccagggcacactggtgaccgtgtccagcacgcgtatccagaaccctgatcctgccgtgtaccagctgcgggatagcaagagcagcgacaagagcgtgtgtctgttcaccgacttcgacagccagaccaacgtgtcccagagcaaggactccgacgtgtacatcaccgataagtgcgtgctggacatgcggagcatggacttcaagagcaactccgccgtggcctggtccaacaagtccgatttcgcctgcgccaacgccttcaacaacagcattatccccgaggacacattcttcccaagccccgagagcagctgcgacgtgaagctggtggaaaagagcttcgagacagacaccaacctgaacttccagaacctgagcgtgatcggcttcagaatcctgctgctgaaagtggccggctttaacctgctgatgaccctgcggctgtggtccagc

SEQ ID NO: 2352 - DNA, 2682 bp, Artificial Sequence
  Synthetic Polynucloetide
atggccttaccagtgaccgccttgctcctgccgctggccttgctgctccacgccgccaggccggaagtgcagctggttgaatctggcggaggactggttcagcctggcggatctctgagactgtcttgtgccgccagcggcttcagcttcagcgacttttggatgagctgggtccgacaggcccctggcaaaggacttgaatgggtcgccacaatcagccaggccggcagcgagaaggactacgtggactctgtgaagggcagattcaccatcagccgggacaacgccaagaagtccctgtacctccagatgaacagcctgagagccgaggacaccgccgtgtactattgtgcctctggcgtgtacagcttcgactacagaggccagggcaccctggtcacagtctcttctggtaccggcggaggcggatctggcggcggaggtagcggtggcggaggatctgaattcgacatcgtgctgacacagagccctgccaccctgtctctgagccctggcgatagagccaccatcagctgtagagccagcgagagcgtgaccatcctgggcagccacctgatctactggtatcagcagaagcccggccagccccccagactgctgattcagctggcctccaatgtgcagaccggcgtgccagccagattttccggcagcggcagcagaaccgacttcaccctgaccatcagcagcgtggaacccgaggacttcgccgtgtactactgcctccagagccggaccatccccagaacattcggccagggcaccaagctggaaatcaagagactcgaggacctgaagaacgtgttcccacctgaggtggccgtgttcgagcctagcgaggccgagatcagccacacccagaaagccaccctcgtgtgcctggctaccggcttctaccccgaccatgtggaactgtcttggtgggtcaacggcaaagaggtgcacagcggcgtgtgtaccgacccccagccactgaaagaacagcccgccctgaacgacagccggtactgcctgagcagcagactgagagtgtccgccaccttctggcagaacccccggaaccacttcagatgccaggtgcagttctacggcctgagcgagaacgacgagtggacccaggacagagccaagcccgtgacccagatcgtgtctgccgaagcctggggcagagccgattgcggctttaccagcgagagctaccagcagggcgtgctgagcgccaccatcctgtacgagatcctgctgggcaaggccaccctgtacgccgtgctggtgtctgccctggtgctgatggctatggtcaagcggaaggacagccggggaagggccaagcgatctggatctggagcaacaaacttctcactactcaaacaagcaggtgacgtggaggagaatcccgggcctactagtatggactggatttggcgcatccttttccttgtcggcgctgctaccggcgcgcattccgggccccagctccagctgcaagagtctggacctggcctggtcaagcctagcgagacactgagcctgacctgtaccgtgtccggcgatagcatcagcagcggcgattactactggggctggatcagacagcctcctggcaaaggactggaatggatcggccacatctactacagcggcgtgacctactacaaccccagcctgaagtccagagtgaccatcagcgtggacaccagccggaaccagttctccctgaagctgtctagcgtgacagccgccgataccgccgtgtactactgcaccagagaggacagcagcaactggcggagtagaggccagggaacactggtcacagttagctctggatccggcggaggcggaagtggaggcggaggatctggcggcggaggctctttcgaacaggtgcagctggtgcagtctggccccgaagtgaagaaacccggcgagtccgtgaagatcagctgcaaggccagcggctacaccttccggcactacagcatgaactgggtcaagcaggccccaggccagggcctgaagtggatgggcagaatcaacaccgagagcggcgtgcccatctacgccgacgacttcaagggccggttcagcttcaccgtggacaccagcgccagcaccgcctacctggaaatctccagcctgaccagcgaggataccgccgtgtatttctgctccaacgactacctgtacagcctggatttctggggccagggaaccaccctgacagtgtcctctacgcgtatccagaaccctgatcctgccgtgtaccagctgcgggatagcaagagcagcgacaagagcgtgtgtctgttcaccgacttcgacagccagaccaacgtgtcccagagcaaggactccgacgtgtacatcaccgataagtgcgtgctggacatgcggagcatggacttcaagagcaactccgccgtggcctggtccaacaagtccgatttcgcctgcgccaacgccttcaacaacagcattatccccgaggacacattcttcccaagccccgagagcagctgcgacgtgaagctggtggaaaagagcttcgagacagacaccaacctgaacttccagaacctgagcgtgatcggcttcagaatcctgctgctgaaagtggccggctttaacctgctgatgaccctgcggctgtggtccagc

SEQ ID NO: 2353 - DNA, 2685 bp, Artificial Sequence
  Synthetic Polynucloetide
atggccttaccagtgaccgccttgctcctgccgctggccttgctgctccacgccgccaggccggaagtgcagctggttgaatctggcggaggactggttcagcctggcggatctctgagactgtcttgtgccgccagcggcttcagcttcagcgacttttggatgagctgggtccgacaggcccctggcaaaggacttgaatgggtcgccacaatcagccaggccggcagcgagaaggactacgtggactctgtgaagggcagattcaccatcagccgggacaacgccaagaagtccctgtacctccagatgaacagcctgagagccgaggacaccgccgtgtactattgtgcctctggcgtgtacagcttcgactacagaggccagggcaccctggtcacagtctcttctggtaccggcggaggcggatctggcggcggaggtagcggtggcggaggatctgaattccagtctgtgctgacacagcctcctagtgtgtctggcgctcctggacagagagtgaccatcagctgtacaggcagcagcagcaatatcggagccggctttgacgtgcactggtatcagcagctgcctggcacagcccctaaactgctgatctacggcaacagcaacagacccagcggcgtgcccgatagattttccggctctaagagcggcacaagcgccagcctggctattactggactccaggccgaggacgaggccgactactactgtcagagctacgacagcagcctgagcggctacgttttcggcaccggcaccaaagtgacagtgcttggtctcgaggacctgaagaacgtgttcccacctgaggtggccgtgttcgagcctagcgaggccgagatcagccacacccagaaagccaccctcgtgtgcctggctaccggcttctaccccgaccatgtggaactgtcttggtgggtcaacggcaaagaggtgcacagcggcgtgtgtaccgacccccagccactgaaagaacagcccgccctgaacgacagccggtactgcctgagcagcagactgagagtgtccgccaccttctggcagaacccccggaaccacttcagatgccaggtgcagttctacggcctgagcgagaacgacgagtggacccaggacagagccaagcccgtgacccagatcgtgtctgccgaagcctggggcagagccgattgcggctttaccagcgagagctaccagcagggcgtgctgagcgccaccatcctgtacgagatcctgctgggcaaggccaccctgtacgccgtgctggtgtctgccctggtgctgatggctatggtcaagcggaaggacagccggggaagggccaagcgatctggatctggagcaacaaacttctcactactcaaacaagcaggtgacgtggaggagaatcccgggcctactagtatggactggatttggcgcatccttttccttgtcggcgctgctaccggcgcgcattccgggccccagctccagctgcaagagtctggacctggcctggtcaagcctagcgagacactgagcctgacctgtaccgtgtccggcgatagcatcagcagcggcgattactactggggctggatcagacagcctcctggcaaaggactggaatggatcggccacatctactacagcggcgtgacctactacaaccccagcctgaagtccagagtgaccatcagcgtggacaccagccggaaccagttctccctgaagctgtctagcgtgacagccgccgataccgccgtgtactactgcaccagagaggacagcagcaactggcggagtagaggccagggaacactggtcacagttagctctggatccggcggaggcggaagtggaggcggaggatctggcggcggaggctctttcgaacaagttcagctggttcagagcggagccgaagtgaagaaacctggggcctctgtgaaggtgtcctgcaaggcttccggctacacctttaccgattactacatgcactgggtccgacaggctcccggccaaagacttgaatggatgggctggatcaaccccaacagcggcggcacaaattacgcccagaagttccaggaccggatcaccgtgaccagagacaccagctccaacaccggctacatggaactgacccggctgagatccgatgacaccgccgtgtactactgcgctagaagcccttactccggcgtgctggataagtggggacagggcacactggtcaccgtgtcatctacgcgtatccagaaccctgatcctgccgtgtaccagctgcgggatagcaagagcagcgacaagagcgtgtgtctgttcaccgacttcgacagccagaccaacgtgtcccagagcaaggactccgacgtgtacatcaccgataagtgcgtgctggacatgcggagcatggacttcaagagcaactccgccgtggcctggtccaacaagtccgatttcgcctgcgccaacgccttcaacaacagcattatccccgaggacacattcttcccaagccccgagagcagctgcgacgtgaagctggtggaaaagagcttcgagacagacaccaacctgaacttccagaacctgagcgtgatcggcttcagaatcctgctgctgaaagtggccggctttaacctgctgatgaccctgcggctgtggtccagc

SEQ ID NO: 2354 - DNA, 2676 bp, Artificial Sequence
  Synthetic Polynucloetide
atggccttaccagtgaccgccttgctcctgccgctggccttgctgctccacgccgccaggccggaagtgcagctggttgaatctggcggaggactggttcagcctggcggatctctgagactgtcttgtgccgccagcggcttcagcttcagcgacttttggatgagctgggtccgacaggcccctggcaaaggacttgaatgggtcgccacaatcagccaggccggcagcgagaaggactacgtggactctgtgaagggcagattcaccatcagccgggacaacgccaagaagtccctgtacctccagatgaacagcctgagagccgaggacaccgccgtgtactattgtgcctctggcgtgtacagcttcgactacagaggccagggcaccctggtcacagtctcttctggtaccggcggaggcggatctggcggcggaggtagcggtggcggaggatctgaattccaggctgttctgacacagcctccatctgcctctggcacacctggacagagagtgaccatctcctgtagcggcagcagcagcaacatcggcagctacaccgtgtcctggtatcagcagctccctggaacagcccctaagttcctgatctacagcaacaaccagcggcctagcggcgtgcccgatagattttctggcagcaagagcggcacaagcgccagcctggctatttctggactccagtctgaggacgaggccgactactattgtgccgcctgggacgatagcctgaacggctatgtgtttggcaccggcaccaaagtgacagtgcttggtctcgaggacctgaagaacgtgttcccacctgaggtggccgtgttcgagcctagcgaggccgagatcagccacacccagaaagccaccctcgtgtgcctggctaccggcttctaccccgaccatgtggaactgtcttggtgggtcaacggcaaagaggtgcacagcggcgtgtgtaccgacccccagccactgaaagaacagcccgccctgaacgacagccggtactgcctgagcagcagactgagagtgtccgccaccttctggcagaacccccggaaccacttcagatgccaggtgcagttctacggcctgagcgagaacgacgagtggacccaggacagagccaagcccgtgacccagatcgtgtctgccgaagcctggggcagagccgattgcggctttaccagcgagagctaccagcagggcgtgctgagcgccaccatcctgtacgagatcctgctgggcaaggccaccctgtacgccgtgctggtgtctgccctggtgctgatggctatggtcaagcggaaggacagccggggaagggccaagcgatctggatctggagcaacaaacttctcactactcaaacaagcaggtgacgtggaggagaatcccgggcctactagtatggactggatttggcgcatccttttccttgtcggcgctgctaccggcgcgcattccgggccccagctccagctgcaagagtctggacctggcctggtcaagcctagcgagacactgagcctgacctgtaccgtgtccggcgatagcatcagcagcggcgattactactggggctggatcagacagcctcctggcaaaggactggaatggatcggccacatctactacagcggcgtgacctactacaaccccagcctgaagtccagagtgaccatcagcgtggacaccagccggaaccagttctccctgaagctgtctagcgtgacagccgccgataccgccgtgtactactgcaccagagaggacagcagcaactggcggagtagaggccagggaacactggtcacagttagctctggatccggcggaggcggaagtggaggcggaggatctggcggcggaggctctttcgaagttcaactggttcagagcggagccgaagtgaagaagcctggcgagagcctgaagattagctgcaaaggcagcggctacgacttcaccacctactggatcggctgggtccgacagatgcctggcaaaggactggaatggatgggcatcatctaccccggcgacagcgacaccagatacagccctagcgttagaggccgcgtgaccatcagcgccgacaagtctatcaacaccgcctacctccagtggtccagcctggaagcctctgacaccgccatgtactactgcgccagaatgtggaccttcagccaggatggatggggccagggaacactggtcacagtgtcatctacgcgtatccagaaccctgatcctgccgtgtaccagctgcgggatagcaagagcagcgacaagagcgtgtgtctgttcaccgacttcgacagccagaccaacgtgtcccagagcaaggactccgacgtgtacatcaccgataagtgcgtgctggacatgcggagcatggacttcaagagcaactccgccgtggcctggtccaacaagtccgatttcgcctgcgccaacgccttcaacaacagcattatccccgaggacacattcttcccaagccccgagagcagctgcgacgtgaagctggtggaaaagagcttcgagacagacaccaacctgaacttccagaacctgagcgtgatcggcttcagaatcctgctgctgaaagtggccggctttaacctgctgatgaccctgcggctgtggtccagc

SEQ ID NO: 2355 - DNA, 2685 bp, Artificial Sequence
  Synthetic Polynucloetide
atggccttaccagtgaccgccttgctcctgccgctggccttgctgctccacgccgccaggccggaagtgcagctggttgaatctggcggaggactggttcagcctggcggatctctgagactgtcttgtgccgccagcggcttcagcttcagcgacttttggatgagctgggtccgacaggcccctggcaaaggacttgaatgggtcgccacaatcagccaggccggcagcgagaaggactacgtggactctgtgaagggcagattcaccatcagccgggacaacgccaagaagtccctgtacctccagatgaacagcctgagagccgaggacaccgccgtgtactattgtgcctctggcgtgtacagcttcgactacagaggccagggcaccctggtcacagtctcttctggtaccggcggaggcggatctggcggcggaggtagcggtggcggaggatctgaattcgacatcgtgatgacccagagccccgatagcctggccgtgtctctgggagagagagccaccatcaactgcaagagcagccagagcatcctgtacagcagcaaccagaagaactacctggcctggtatcagcagaagcccggccagagccctaagctgctgatctactgggccagcaccagagaaagcggcgtgcccgatagattcagcggcagcggctctggcaccgacttcaccctgaccatcagttctcttcaggccgaggacgtggccgtgtactactgccaccagtacatcagctcctacaccttcggccagggcaccaagctggaaatcaagctcgaggacctgaagaacgtgttcccacctgaggtggccgtgttcgagcctagcgaggccgagatcagccacacccagaaagccaccctcgtgtgcctggctaccggcttctaccccgaccatgtggaactgtcttggtgggtcaacggcaaagaggtgcacagcggcgtgtgtaccgacccccagccactgaaagaacagcccgccctgaacgacagccggtactgcctgagcagcagactgagagtgtccgccaccttctggcagaacccccggaaccacttcagatgccaggtgcagttctacggcctgagcgagaacgacgagtggacccaggacagagccaagcccgtgacccagatcgtgtctgccgaagcctggggcagagccgattgcggctttaccagcgagagctaccagcagggcgtgctgagcgccaccatcctgtacgagatcctgctgggcaaggccaccctgtacgccgtgctggtgtctgccctggtgctgatggctatggtcaagcggaaggacagccggggaagggccaagcgatctggatctggagcaacaaacttctcactactcaaacaagcaggtgacgtggaggagaatcccgggcctactagtatggactggatttggcgcatccttttccttgtcggcgctgctaccggcgcgcattccgggccccagctccagctgcaagagtctggacctggcctggtcaagcctagcgagacactgagcctgacctgtaccgtgtccggcgatagcatcagcagcggcgattactactggggctggatcagacagcctcctggcaaaggactggaatggatcggccacatctactacagcggcgtgacctactacaaccccagcctgaagtccagagtgaccatcagcgtggacaccagccggaaccagttctccctgaagctgtctagcgtgacagccgccgataccgccgtgtactactgcaccagagaggacagcagcaactggcggagtagaggccagggaacactggtcacagttagctctggatccggcggaggcggaagtggaggcggaggatctggcggcggaggctctttcgaacaggtgcagctggtgcagtctggcgctgaagtgaagaaacctggggccagcgtgaaggtgtcctgcaaggccagcggctacacctttgccagccagtggatgcactggatgagacaggcccctggacagggcctggaatggatcggctggatcaaccccggcaacgtgaacaccaagtacaacgagaagttcaagggcagagccaccctgacagtggacaccagcaccaacaccgcctacatggaactgagcagcctgcggagcgaggacaccgccgtgtattattgcgccagaagcacctggtacagacccctggattattggggccagggaacccttgtgaccgtgtcctctacgcgtatccagaaccctgatcctgccgtgtaccagctgcgggatagcaagagcagcgacaagagcgtgtgtctgttcaccgacttcgacagccagaccaacgtgtcccagagcaaggactccgacgtgtacatcaccgataagtgcgtgctggacatgcggagcatggacttcaagagcaactccgccgtggcctggtccaacaagtccgatttcgcctgcgccaacgccttcaacaacagcattatccccgaggacacattcttcccaagccccgagagcagctgcgacgtgaagctggtggaaaagagcttcgagacagacaccaacctgaacttccagaacctgagcgtgatcggcttcagaatcctgctgctgaaagtggccggctttaacctgctgatgaccctgcggctgtggtccagc

SEQ ID NO: 2356 - DNA, 2685 bp, Artificial Sequence
  Synthetic Polynucloetide
atggccttaccagtgaccgccttgctcctgccgctggccttgctgctccacgccgccaggccggaagtgcagctggttgaatctggcggaggactggttcagcctggcggatctctgagactgtcttgtgccgccagcggcttcagcttcagcgacttttggatgagctgggtccgacaggcccctggcaaaggacttgaatgggtcgccacaatcagccaggccggcagcgagaaggactacgtggactctgtgaagggcagattcaccatcagccgggacaacgccaagaagtccctgtacctccagatgaacagcctgagagccgaggacaccgccgtgtactattgtgcctctggcgtgtacagcttcgactacagaggccagggcaccctggtcacagtctcttctggtaccggcggaggcggatctggcggcggaggtagcggtggcggaggatctgaattcgaccacatcgtgctgacccagagccctagcagcctgtctgccagcctgggcgacagagtgaccatcagctgtagagccagccaggacatcagcacctacctgaactggtatcagcagaaacccgacggcaccgtgaagctgctgatcttctacaccagcagactgcacgccggggtgcccagcagattttctggcagcggctctggcacccaccacagcctgaccatctccaacctggaacaggaagatattgctacctacttctgtcagcaaggcaacagcctgcccttcaccttcggcagcggcaccaagctggaaatcaagagactcgaggacctgaagaacgtgttcccacctgaggtggccgtgttcgagcctagcgaggccgagatcagccacacccagaaagccaccctcgtgtgcctggctaccggcttctaccccgaccatgtggaactgtcttggtgggtcaacggcaaagaggtgcacagcggcgtgtgtaccgacccccagccactgaaagaacagcccgccctgaacgacagccggtactgcctgagcagcagactgagagtgtccgccaccttctggcagaacccccggaaccacttcagatgccaggtgcagttctacggcctgagcgagaacgacgagtggacccaggacagagccaagcccgtgacccagatcgtgtctgccgaagcctggggcagagccgattgcggctttaccagcgagagctaccagcagggcgtgctgagcgccaccatcctgtacgagatcctgctgggcaaggccaccctgtacgccgtgctggtgtctgccctggtgctgatggctatggtcaagcggaaggacagccggggaagggccaagcgatctggatctggagcaacaaacttctcactactcaaacaagcaggtgacgtggaggagaatcccgggcctactagtatggactggatttggcgcatccttttccttgtcggcgctgctaccggcgcgcattccgggccccagctccagctgcaagagtctggacctggcctggtcaagcctagcgagacactgagcctgacctgtaccgtgtccggcgatagcatcagcagcggcgattactactggggctggatcagacagcctcctggcaaaggactggaatggatcggccacatctactacagcggcgtgacctactacaaccccagcctgaagtccagagtgaccatcagcgtggacaccagccggaaccagttctccctgaagctgtctagcgtgacagccgccgataccgccgtgtactactgcaccagagaggacagcagcaactggcggagtagaggccagggaacactggtcacagttagctctggatccggcggaggcggaagtggaggcggaggatctggcggcggaggctctttcgaacaggtgcagctgaaagagagcggccctgagctggaaaagcctggggccagcgtgaagattagctgcaaggccagcggctacagcttcaccgcctacagcatgaactgggtcaagcagaacaacggcatgagcctggaatggatcggcagcatcgacccctactacggcgacaccaaatacgcccagaagttcaagggcaaggccaccctgaccgtggataaggccagcagcaccgcctacctccagctgaagtctctgaccagcgaggacagcgccgtgtactactgcgccagacggatgattaccaccggcgactggtacttcgacgtgtggggagccggaaccaccgtgacagtgtctagcacgcgtatccagaaccctgatcctgccgtgtaccagctgcgggatagcaagagcagcgacaagagcgtgtgtctgttcaccgacttcgacagccagaccaacgtgtcccagagcaaggactccgacgtgtacatcaccgataagtgcgtgctggacatgcggagcatggacttcaagagcaactccgccgtggcctggtccaacaagtccgatttcgcctgcgccaacgccttcaacaacagcattatccccgaggacacattcttcccaagccccgagagcagctgcgacgtgaagctggtggaaaagagcttcgagacagacaccaacctgaacttccagaacctgagcgtgatcggcttcagaatcctgctgctgaaagtggccggctttaacctgctgatgaccctgcggctgtggtccagc

SEQ ID NO: 2357 - DNA, 2685 bp, Artificial Sequence; identical to SEQ ID NO: 2356
  Synthetic Polynucloetide

SEQ ID NO: 2358 - DNA, 2685 bp, Artificial Sequence
  Synthetic Polynucloetide
atggccttaccagtgaccgccttgctcctgccgctggccttgctgctccacgccgccaggccggaagtgcagctggttgaatctggcggaggactggttcagcctggcggatctctgagactgtcttgtgccgccagcggcttcagcttcagcgacttttggatgagctgggtccgacaggcccctggcaaaggacttgaatgggtcgccacaatcagccaggccggcagcgagaaggactacgtggactctgtgaagggcagattcaccatcagccgggacaacgccaagaagtccctgtacctccagatgaacagcctgagagccgaggacaccgccgtgtactattgtgcctctggcgtgtacagcttcgactacagaggccagggcaccctggtcacagtctcttctggtaccggcggaggcggatctggcggcggaggtagcggtggcggaggatctgaattcgacgagatcgtgctgacacagagccctgccaccctgtctctgagccctggcgaaagagccaccctgagctgtagagccagccagagcgtgtccagctacctggcctggtatcagcagaagcccggccaggctccccggctgctgatctacgatgccagcaatagagccaccggcatccccgccagattttccggctctggcagcggcaccgacttcaccctgaccatcagctccctggaacccgaggacttcgccgtgtactactgccagcagcggagcaactggcccatcacattcggccagggcacccggctggaaatcaaactcgaggacctgaagaacgtgttcccacctgaggtggccgtgttcgagcctagcgaggccgagatcagccacacccagaaagccaccctcgtgtgcctggctaccggcttctaccccgaccatgtggaactgtcttggtgggtcaacggcaaagaggtgcacagcggcgtgtgtaccgacccccagccactgaaagaacagcccgccctgaacgacagccggtactgcctgagcagcagactgagagtgtccgccaccttctggcagaacccccggaaccacttcagatgccaggtgcagttctacggcctgagcgagaacgacgagtggacccaggacagagccaagcccgtgacccagatcgtgtctgccgaagcctggggcagagccgattgcggctttaccagcgagagctaccagcagggcgtgctgagcgccaccatcctgtacgagatcctgctgggcaaggccaccctgtacgccgtgctggtgtctgccctggtgctgatggctatggtcaagcggaaggacagccggggaagggccaagcgatctggatctggagcaacaaacttctcactactcaaacaagcaggtgacgtggaggagaatcccgggcctactagtatggactggatttggcgcatccttttccttgtcggcgctgctaccggcgcgcattccgggccccagctccagctgcaagagtctggacctggcctggtcaagcctagcgagacactgagcctgacctgtaccgtgtccggcgatagcatcagcagcggcgattactactggggctggatcagacagcctcctggcaaaggactggaatggatcggccacatctactacagcggcgtgacctactacaaccccagcctgaagtccagagtgaccatcagcgtggacaccagccggaaccagttctccctgaagctgtctagcgtgacagccgccgataccgccgtgtactactgcaccagagaggacagcagcaactggcggagtagaggccagggaacactggtcacagttagctctggatccggcggaggcggaagtggaggcggaggatctggcggcggaggctctttcgaagaagtgcagctggtggaatcaggcggcggactggtgcagcctggcagaagcctgagactgagctgtgccgccagcggcttcaccttcaacgactacgccatgcactgggtgcgccaggcccctggaaaaggactggaatgggtgtccacaatcagctggaacagcggcagcatcggctacgccgatagcgtgaagggccggttcaccatcagccgggacaacgccaagaagtccctgtacctccagatgaacagcctgcgggccgaggacacagccctgtactattgcgccaaggacatccagtacggcaactactactacggcatggacgtgtggggccagggaaccaccgtgaccgtgtcatctacgcgtatccagaaccctgatcctgccgtgtaccagctgcgggatagcaagagcagcgacaagagcgtgtgtctgttcaccgacttcgacagccagaccaacgtgtcccagagcaaggactccgacgtgtacatcaccgataagtgcgtgctggacatgcggagcatggacttcaagagcaactccgccgtggcctggtccaacaagtccgatttcgcctgcgccaacgccttcaacaacagcattatccccgaggacacattcttcccaagccccgagagcagctgcgacgtgaagctggtggaaaagagcttcgagacagacaccaacctgaacttccagaacctgagcgtgatcggcttcagaatcctgctgctgaaagtggccggctttaacctgctgatgaccctgcggctgtggtccagc

SEQ ID NO: 2359 - DNA, 2691 bp, Artificial Sequence
  Synthetic Polynucloetide
atggccttaccagtgaccgccttgctcctgccgctggccttgctgctccacgccgccaggccggaagtgcagctggttgaatctggcggaggactggttcagcctggcggatctctgagactgtcttgtgccgccagcggcttcagcttcagcgacttttggatgagctgggtccgacaggcccctggcaaaggacttgaatgggtcgccacaatcagccaggccggcagcgagaaggactacgtggactctgtgaagggcagattcaccatcagccgggacaacgccaagaagtccctgtacctccagatgaacagcctgagagccgaggacaccgccgtgtactattgtgcctctggcgtgtacagcttcgactacagaggccagggcaccctggtcacagtctcttctggtaccggcggaggcggatctggcggcggaggtagcggtggcggaggatctgaattcgacatcgtgatgacccagacccccctgagcctgcctgtgacacctggcgagcctgccagcatctcctgcagaagcagcaagagcctgctgcacagcaacggcatcacctacctgtactggtatctgcagaaacccggccagagcccccaactgctgatctaccagatgagcaacctggtgtccggcgtgcccgacagattttctggcagcggctccggcaccgacttcaccctgaagatcagccgggtggaagccgaggacgtgggcgtgtactactgcgcccagaacctggaactgccctacacctttggcggcggaacaaaggtggaaatcaagcggctcgaggacctgaagaacgtgttcccacctgaggtggccgtgttcgagcctagcgaggccgagatcagccacacccagaaagccaccctcgtgtgcctggctaccggcttctaccccgaccatgtggaactgtcttggtgggtcaacggcaaagaggtgcacagcggcgtgtgtaccgacccccagccactgaaagaacagcccgccctgaacgacagccggtactgcctgagcagcagactgagagtgtccgccaccttctggcagaacccccggaaccacttcagatgccaggtgcagttctacggcctgagcgagaacgacgagtggacccaggacagagccaagcccgtgacccagatcgtgtctgccgaagcctggggcagagccgattgcggctttaccagcgagagctaccagcagggcgtgctgagcgccaccatcctgtacgagatcctgctgggcaaggccaccctgtacgccgtgctggtgtctgccctggtgctgatggctatggtcaagcggaaggacagccggggaagggccaagcgatctggatctggagcaacaaacttctcactactcaaacaagcaggtgacgtggaggagaatcccgggcctactagtatggactggatttggcgcatccttttccttgtcggcgctgctaccggcgcgcattccgggccccagctccagctgcaagagtctggacctggcctggtcaagcctagcgagacactgagcctgacctgtaccgtgtccggcgatagcatcagcagcggcgattactactggggctggatcagacagcctcctggcaaaggactggaatggatcggccacatctactacagcggcgtgacctactacaaccccagcctgaagtccagagtgaccatcagcgtggacaccagccggaaccagttctccctgaagctgtctagcgtgacagccgccgataccgccgtgtactactgcaccagagaggacagcagcaactggcggagtagaggccagggaacactggtcacagttagctctggatccggcggaggcggaagtggaggcggaggatctggcggcggaggctctttcgaacaggtgcaactggtgcagagcggagccgaagtgaaaaagcccggcagcagcgtgaaggtgtcctgcaaggccagcggctacgccttcagctactcctggatcaactgggtgcgccaggcccctggacagggcctggaatggatgggcagaatcttccccggcgacggcgacaccgactacaacggcaagttcaagggcagagtgaccatcaccgccgacaagagcaccagcaccgcctacatggaactgagcagcctgcggagcgaggataccgccgtgtactattgtgccagaaacgtgttcgacggctactggctggtgtactggggccagggaacacttgtgaccgtgtccagcacgcgtatccagaaccctgatcctgccgtgtaccagctgcgggatagcaagagcagcgacaagagcgtgtgtctgttcaccgacttcgacagccagaccaacgtgtcccagagcaaggactccgacgtgtacatcaccgataagtgcgtgctggacatgcggagcatggacttcaagagcaactccgccgtggcctggtccaacaagtccgatttcgcctgcgccaacgccttcaacaacagcattatccccgaggacacattcttcccaagccccgagagcagctgcgacgtgaagctggtggaaaagagcttcgagacagacaccaacctgaacttccagaacctgagcgtgatcggcttcagaatcctgctgctgaaagtggccggctttaacctgctgatgaccctgcggctgtggtccagc

SEQ ID NO: 2360 - DNA, 2694 bp, Artificial Sequence
  Synthetic Polynucloetide
atggccttaccagtgaccgccttgctcctgccgctggccttgctgctccacgccgccaggccggaagtgcagctggttgaatctggcggaggactggttcagcctggcggatctctgagactgtcttgtgccgccagcggcttcagcttcagcgacttttggatgagctgggtccgacaggcccctggcaaaggacttgaatgggtcgccacaatcagccaggccggcagcgagaaggactacgtggactctgtgaagggcagattcaccatcagccgggacaacgccaagaagtccctgtacctccagatgaacagcctgagagccgaggacaccgccgtgtactattgtgcctctggcgtgtacagcttcgactacagaggccagggcaccctggtcacagtctcttctggtaccggcggaggcggatctggcggcggaggtagcggtggcggaggatctgaattcgacatccagatgacccagagccccagcagcctgtctgccagcgtgggcgacagagtgaccatcacctgtcggagcagccagagcatcgtgcactccgtgggcaacaccttcctggaatggtatcagcagaagcccggcaaggcccccaagctgctgatctacaaggtgtccaacagattcagcggcgtgcccagcaggtttagcggctctggcagcggcaccgacttcaccctgaccatctctagcctccagcccgaggacttcgccacctactactgttttcaaggcagccagttcccctacaccttcggccagggaacaaaggtggaaatcaagcggctcgaggacctgaagaacgtgttcccacctgaggtggccgtgttcgagcctagcgaggccgagatcagccacacccagaaagccaccctcgtgtgcctggctaccggcttctaccccgaccatgtggaactgtcttggtgggtcaacggcaaagaggtgcacagcggcgtgtgtaccgacccccagccactgaaagaacagcccgccctgaacgacagccggtactgcctgagcagcagactgagagtgtccgccaccttctggcagaacccccggaaccacttcagatgccaggtgcagttctacggcctgagcgagaacgacgagtggacccaggacagagccaagcccgtgacccagatcgtgtctgccgaagcctggggcagagccgattgcggctttaccagcgagagctaccagcagggcgtgctgagcgccaccatcctgtacgagatcctgctgggcaaggccaccctgtacgccgtgctggtgtctgccctggtgctgatggctatggtcaagcggaaggacagccggggaagggccaagcgatctggatctggagcaacaaacttctcactactcaaacaagcaggtgacgtggaggagaatcccgggcctactagtatggactggatttggcgcatccttttccttgtcggcgctgctaccggcgcgcattccgggccccagctccagctgcaagagtctggacctggcctggtcaagcctagcgagacactgagcctgacctgtaccgtgtccggcgatagcatcagcagcggcgattactactggggctggatcagacagcctcctggcaaaggactggaatggatcggccacatctactacagcggcgtgacctactacaaccccagcctgaagtccagagtgaccatcagcgtggacaccagccggaaccagttctccctgaagctgtctagcgtgacagccgccgataccgccgtgtactactgcaccagagaggacagcagcaactggcggagtagaggccagggaacactggtcacagttagctctggatccggcggaggcggaagtggaggcggaggatctggcggcggaggctctttcgaagaagtgcaactggtggaaagcggaggcggcctggtgcagcctggcggatctctgagactgagctgtgccgccagcggctacgagttcagccggtcctggatgaactgggtgcgccaggcccctggcaagggactggaatgggtgggaagaatctaccccggcgacggcgacaccaactacagcggcaagttcaagggccggttcaccatcagcgccgacaccagcaagaacaccgcctacctccagatgaacagcctgcgggccgaggataccgccgtgtactactgtgccagagatggcagctcctgggactggtacttcgacgtgtggggacagggaacccttgtgaccgtgtccagcacgcgtatccagaaccctgatcctgccgtgtaccagctgcgggatagcaagagcagcgacaagagcgtgtgtctgttcaccgacttcgacagccagaccaacgtgtcccagagcaaggactccgacgtgtacatcaccgataagtgcgtgctggacatgcggagcatggacttcaagagcaactccgccgtggcctggtccaacaagtccgatttcgcctgcgccaacgccttcaacaacagcattatccccgaggacacattcttcccaagccccgagagcagctgcgacgtgaagctggtggaaaagagcttcgagacagacaccaacctgaacttccagaacctgagcgtgatcggcttcagaatcctgctgctgaaagtggccggctttaacctgctgatgaccctgcggctgtggtccagc

SEQ ID NO: 2361 - DNA, 2688 bp, Artificial Sequence
  Synthetic Polynucloetide
atggccttaccagtgaccgccttgctcctgccgctggccttgctgctccacgccgccaggccggaagtgcagctggttgaatctggcggaggactggttcagcctggcggatctctgagactgtcttgtgccgccagcggcttcagcttcagcgacttttggatgagctgggtccgacaggcccctggcaaaggacttgaatgggtcgccacaatcagccaggccggcagcgagaaggactacgtggactctgtgaagggcagattcaccatcagccgggacaacgccaagaagtccctgtacctccagatgaacagcctgagagccgaggacaccgccgtgtactattgtgcctctggcgtgtacagcttcgactacagaggccagggcaccctggtcacagtctcttctggtaccggcggaggcggatctggcggcggaggtagcggtggcggaggatctgaattcgacatccagatgacccagagccccagcagcctgtctgccagcgtgggcgacagagtgaccatcacctgtagagccagccagaccatctggtcctacctgaactggtatcagcagaggcccggcaaggcccccaacctgctgatctatgccgccagctctctccagagcggcgtgcccagcagattttccggcagaggcagcggcaccgacttcaccctgaccatcagttccttgcaggccgaggacttcgccacctactactgccagcagagctacagcatcccccagattttcggccagggcaccaagctggaaatcaagctcgaggacctgaagaacgtgttcccacctgaggtggccgtgttcgagcctagcgaggccgagatcagccacacccagaaagccaccctcgtgtgcctggctaccggcttctaccccgaccatgtggaactgtcttggtgggtcaacggcaaagaggtgcacagcggcgtgtgtaccgacccccagccactgaaagaacagcccgccctgaacgacagccggtactgcctgagcagcagactgagagtgtccgccaccttctggcagaacccccggaaccacttcagatgccaggtgcagttctacggcctgagcgagaacgacgagtggacccaggacagagccaagcccgtgacccagatcgtgtctgccgaagcctggggcagagccgattgcggctttaccagcgagagctaccagcagggcgtgctgagcgccaccatcctgtacgagatcctgctgggcaaggccaccctgtacgccgtgctggtgtctgccctggtgctgatggctatggtcaagcggaaggacagccggggaagggccaagcgatctggatctggagcaacaaacttctcactactcaaacaagcaggtgacgtggaggagaatcccgggcctactagtatggactggatttggcgcatccttttccttgtcggcgctgctaccggcgcgcattccgggccccagctccagctgcaagagtctggacctggcctggtcaagcctagcgagacactgagcctgacctgtaccgtgtccggcgatagcatcagcagcggcgattactactggggctggatcagacagcctcctggcaaaggactggaatggatcggccacatctactacagcggcgtgacctactacaaccccagcctgaagtccagagtgaccatcagcgtggacaccagccggaaccagttctccctgaagctgtctagcgtgacagccgccgataccgccgtgtactactgcaccagagaggacagcagcaactggcggagtagaggccagggaacactggtcacagttagctctggatccggcggaggcggaagtggaggcggaggatctggcggcggaggctctttcgaacaggtgcagctccagcagtctggacccggcctcgtgaagcctagccagacactgagcctgacctgcgccatcagcggcgatagcgtgtccagcaatagcgccgcctggaactggatcagacagtccccctctcggggcctggaatggctgggccggacctactaccgcagcaagtggtacaacgactacgccgtgtccgtgaagtcccggatcaccatcaaccccgacaccagcaagaaccagttctccttgcaactgaacagcgtgacccccgaggacaccgccgtgtactactgcgccagagaagtgaccggcgacctggaagatgccttcgacatctggggccagggaacaatggtcacagtgtccagcacgcgtatccagaaccctgatcctgccgtgtaccagctgcgggatagcaagagcagcgacaagagcgtgtgtctgttcaccgacttcgacagccagaccaacgtgtcccagagcaaggactccgacgtgtacatcaccgataagtgcgtgctggacatgcggagcatggacttcaagagcaactccgccgtggcctggtccaacaagtccgatttcgcctgcgccaacgccttcaacaacagcattatccccgaggacacattcttcccaagccccgagagcagctgcgacgtgaagctggtggaaaagagcttcgagacagacaccaacctgaacttccagaacctgagcgtgatcggcttcagaatcctgctgctgaaagtggccggctttaacctgctgatgaccctgcggctgtggtccagc

SEQ ID NO: 2362 - DNA, 2667 bp, Artificial Sequence
  Synthetic Polynucloetide
atggccttaccagtgaccgccttgctcctgccgctggccttgctgctccacgccgccaggccggaagtgcagctggttgaatctggcggaggactggttcagcctggcggatctctgagactgtcttgtgccgccagcggcttcagcttcagcgacttttggatgagctgggtccgacaggcccctggcaaaggacttgaatgggtcgccacaatcagccaggccggcagcgagaaggactacgtggactctgtgaagggcagattcaccatcagccgggacaacgccaagaagtccctgtacctccagatgaacagcctgagagccgaggacaccgccgtgtactattgtgcctctggcgtgtacagcttcgactacagaggccagggcaccctggtcacagtctcttctggtaccggcggaggcggatctggcggcggaggtagcggtggcggaggatctgaattcgacatccagatgacccagagccccgccaccatcgagaacacaagcctgtctgccagcgtgggcgacagagtgaccatcacctgtagagccagccagggcatcagctcttggctgacctggtatcagcagaagcccgagaaggcccccaagagcctgatctacgccgccagctctctgcagtctggcgtgcccagcagattttccggcagcggctctggcaccgacttcaccctgacaatcagcagcctgcagcccgaggacttcgccacctactactgccagcagtacgacagctaccccatcaccttcggccagggcacccggctggaaatcaagctcgaggacctgaagaacgtgttcccacctgaggtggccgtgttcgagcctagcgaggccgagatcagccacacccagaaagccaccctcgtgtgcctggctaccggcttctaccccgaccatgtggaactgtcttggtgggtcaacggcaaagaggtgcacagcggcgtgtgtaccgacccccagccactgaaagaacagcccgccctgaacgacagccggtactgcctgagcagcagactgagagtgtccgccaccttctggcagaacccccggaaccacttcagatgccaggtgcagttctacggcctgagcgagaacgacgagtggacccaggacagagccaagcccgtgacccagatcgtgtctgccgaagcctggggcagagccgattgcggctttaccagcgagagctaccagcagggcgtgctgagcgccaccatcctgtacgagatcctgctgggcaaggccaccctgtacgccgtgctggtgtctgccctggtgctgatggctatggtcaagcggaaggacagccggggaagggccaagcgatctggatctggagcaacaaacttctcactactcaaacaagcaggtgacgtggaggagaatcccgggcctactagtatggactggatttggcgcatccttttccttgtcggcgctgctaccggcgcgcattccgggccccagctccagctgcaagagtctggacctggcctggtcaagcctagcgagacactgagcctgacctgtaccgtgtccggcgatagcatcagcagcggcgattactactggggctggatcagacagcctcctggcaaaggactggaatggatcggccacatctactacagcggcgtgacctactacaaccccagcctgaagtccagagtgaccatcagcgtggacaccagccggaaccagttctccctgaagctgtctagcgtgacagccgccgataccgccgtgtactactgcaccagagaggacagcagcaactggcggagtagaggccagggaacactggtcacagttagctctggatccggcggaggcggaagtggaggcggaggatctggcggcggaggctctttcgaacaggtgcaactgcagcagtggggagccggactgctgaagcctagcgagacactgagcctgacctgcgccgtgtacggcggcagcttcagcgcctactattggagctggatcagacagccccctggcaagggcctggaatggatcggcgacatcaatcacggcggaggcaccaactacaaccccagcctgaagtcccgcgtgaccatctccgtggacaccagcaagaaccagttctccctgaagctgaacagcgtgacagccgccgacacagccgtgtactactgtgccagcctgaccgcctattggggccagggatctcttgtgaccgtgtccagcacgcgtatccagaaccctgatcctgccgtgtaccagctgcgggatagcaagagcagcgacaagagcgtgtgtctgttcaccgacttcgacagccagaccaacgtgtcccagagcaaggactccgacgtgtacatcaccgataagtgcgtgctggacatgcggagcatggacttcaagagcaactccgccgtggcctggtccaacaagtccgatttcgcctgcgccaacgccttcaacaacagcattatccccgaggacacattcttcccaagccccgagagcagctgcgacgtgaagctggtggaaaagagcttcgagacagacaccaacctgaacttccagaacctgagcgtgatcggcttcagaatcctgctgctgaaagtggccggctttaacctgctgatgaccctgcggctgtggtccagc

SEQ ID NO: 2363 - DNA, 2682 bp, Artificial Sequence
  Synthetic Polynucloetide
atggccttaccagtgaccgccttgctcctgccgctggccttgctgctccacgccgccaggccggaagtgcagctggttgaatctggcggaggactggttcagcctggcggatctctgagactgtcttgtgccgccagcggcttcagcttcagcgacttttggatgagctgggtccgacaggcccctggcaaaggacttgaatgggtcgccacaatcagccaggccggcagcgagaaggactacgtggactctgtgaagggcagattcaccatcagccgggacaacgccaagaagtccctgtacctccagatgaacagcctgagagccgaggacaccgccgtgtactattgtgcctctggcgtgtacagcttcgactacagaggccagggcaccctggtcacagtctcttctggtaccggcggaggcggatctggcggcggaggtagcggtggcggaggatctgaattcgacgagatcgtgctgacccagagccctgatagcctggccgtgtctctgggcgagagagccaccatcaactgcaaggccagccagagcgtggacttcgacggcgacagctacctgaactggtatcagcagaagcccggccagccccccaaggtgctgatctatgccgccagcacactgcagagcggcgtgcccagcagattttctggcagcggctccggcaccgacttcaccctgaccatcaacagcctggaagccgaggacgccgccacctactactgccagcagagcaacgaggacccctggacctttggcggcggaacaaaggtggaaatcaagctcgaggacctgaagaacgtgttcccacctgaggtggccgtgttcgagcctagcgaggccgagatcagccacacccagaaagccaccctcgtgtgcctggctaccggcttctaccccgaccatgtggaactgtcttggtgggtcaacggcaaagaggtgcacagcggcgtgtgtaccgacccccagccactgaaagaacagcccgccctgaacgacagccggtactgcctgagcagcagactgagagtgtccgccaccttctggcagaacccccggaaccacttcagatgccaggtgcagttctacggcctgagcgagaacgacgagtggacccaggacagagccaagcccgtgacccagatcgtgtctgccgaagcctggggcagagccgattgcggctttaccagcgagagctaccagcagggcgtgctgagcgccaccatcctgtacgagatcctgctgggcaaggccaccctgtacgccgtgctggtgtctgccctggtgctgatggctatggtcaagcggaaggacagccggggaagggccaagcgatctggatctggagcaacaaacttctcactactcaaacaagcaggtgacgtggaggagaatcccgggcctactagtatggactggatttggcgcatccttttccttgtcggcgctgctaccggcgcgcattccgggccccagctccagctgcaagagtctggacctggcctggtcaagcctagcgagacactgagcctgacctgtaccgtgtccggcgatagcatcagcagcggcgattactactggggctggatcagacagcctcctggcaaaggactggaatggatcggccacatctactacagcggcgtgacctactacaaccccagcctgaagtccagagtgaccatcagcgtggacaccagccggaaccagttctccctgaagctgtctagcgtgacagccgccgataccgccgtgtactactgcaccagagaggacagcagcaactggcggagtagaggccagggaacactggtcacagttagctctggatccggcggaggcggaagtggaggcggaggatctggcggcggaggctctttcgaacaggtgcaactggtgcagtccggcgctgaagtgaagaaacctggggccagcgtgaaggtgtcctgcaaggtgtccggctacacctttaccgactactacattacctgggtgcgccaggcccctggacaggccctggaatggatgggctggatctaccccggcagcggcaacaccaagtacagccagaagttccagggcagattcgtgttcagcgtggacaccagcgccagcaccgcctacctgcaactgtctagcctgaaggccgaagataccgccgtgtactactgcgccaactacggcaactattggttcgcctattggggccagggaacccttgtgaccgtgtcctctacgcgtatccagaaccctgatcctgccgtgtaccagctgcgggatagcaagagcagcgacaagagcgtgtgtctgttcaccgacttcgacagccagaccaacgtgtcccagagcaaggactccgacgtgtacatcaccgataagtgcgtgctggacatgcggagcatggacttcaagagcaactccgccgtggcctggtccaacaagtccgatttcgcctgcgccaacgccttcaacaacagcattatccccgaggacacattcttcccaagccccgagagcagctgcgacgtgaagctggtggaaaagagcttcgagacagacaccaacctgaacttccagaacctgagcgtgatcggcttcagaatcctgctgctgaaagtggccggctttaacctgctgatgaccctgcggctgtggtccagc

SEQ ID NO: 2364 - DNA, 2673 bp, Artificial Sequence
  Synthetic Polynucloetide
atggccttaccagtgaccgccttgctcctgccgctggccttgctgctccacgccgccaggccggaagtgcagctggttgaatctggcggaggactggttcagcctggcggatctctgagactgtcttgtgccgccagcggcttcagcttcagcgacttttggatgagctgggtccgacaggcccctggcaaaggacttgaatgggtcgccacaatcagccaggccggcagcgagaaggactacgtggactctgtgaagggcagattcaccatcagccgggacaacgccaagaagtccctgtacctccagatgaacagcctgagagccgaggacaccgccgtgtactattgtgcctctggcgtgtacagcttcgactacagaggccagggcaccctggtcacagtctcttctggtaccggcggaggcggatctggcggcggaggtagcggtggcggaggatctgaattcgacatccagatgacccagagccccagcagcctgtctgccagcgtgggcgacagagtgaccatcacctgtagagccagccagggcatcagctcttggctggcctggtatcagcagaagcccgagaaggcccccaagagcctgatctacgccgcctctagtctccagagcggcgtgcccagcagattttctggcagcggctccggcaccgacttcaccctgacaatcagctccctccagcccgaggacttcgccacctactactgccagcagtacaacagctaccctcccacctttggcggaggcaccaaggtggaaatcaagctcgaggacctgaagaacgtgttcccacctgaggtggccgtgttcgagcctagcgaggccgagatcagccacacccagaaagccaccctcgtgtgcctggctaccggcttctaccccgaccatgtggaactgtcttggtgggtcaacggcaaagaggtgcacagcggcgtgtgtaccgacccccagccactgaaagaacagcccgccctgaacgacagccggtactgcctgagcagcagactgagagtgtccgccaccttctggcagaacccccggaaccacttcagatgccaggtgcagttctacggcctgagcgagaacgacgagtggacccaggacagagccaagcccgtgacccagatcgtgtctgccgaagcctggggcagagccgattgcggctttaccagcgagagctaccagcagggcgtgctgagcgccaccatcctgtacgagatcctgctgggcaaggccaccctgtacgccgtgctggtgtctgccctggtgctgatggctatggtcaagcggaaggacagccggggaagggccaagcgatctggatctggagcaacaaacttctcactactcaaacaagcaggtgacgtggaggagaatcccgggcctactagtatggactggatttggcgcatccttttccttgtcggcgctgctaccggcgcgcattccgggccccagctccagctgcaagagtctggacctggcctggtcaagcctagcgagacactgagcctgacctgtaccgtgtccggcgatagcatcagcagcggcgattactactggggctggatcagacagcctcctggcaaaggactggaatggatcggccacatctactacagcggcgtgacctactacaaccccagcctgaagtccagagtgaccatcagcgtggacaccagccggaaccagttctccctgaagctgtctagcgtgacagccgccgataccgccgtgtactactgcaccagagaggacagcagcaactggcggagtagaggccagggaacactggtcacagttagctctggatccggcggaggcggaagtggaggcggaggatctggcggcggaggctctttcgaagaagtgcaactggtgcagtctggcggagggctggtgcatcctgggggaagcctgagactgagctgtgccggctctggcttcgccttcagcagcagcaccatgcactggatcagacaggcccctggcaagggcctggaatggatcagcctgatcggaagcggagggggcatctactacggcgacagcgtgaagggccggttcaccatcagccgggacaacgccaagaacagcctgtacctccagatgaactccctgcgggccgaggacatggccgtgtactattgtgtgcggggctacttcgactgggtggactacttcgattactggggccagggcaccctcgtgaccgtgtcatctacgcgtatccagaaccctgatcctgccgtgtaccagctgcgggatagcaagagcagcgacaagagcgtgtgtctgttcaccgacttcgacagccagaccaacgtgtcccagagcaaggactccgacgtgtacatcaccgataagtgcgtgctggacatgcggagcatggacttcaagagcaactccgccgtggcctggtccaacaagtccgatttcgcctgcgccaacgccttcaacaacagcattatccccgaggacacattcttcccaagccccgagagcagctgcgacgtgaagctggtggaaaagagcttcgagacagacaccaacctgaacttccagaacctgagcgtgatcggcttcagaatcctgctgctgaaagtggccggctttaacctgctgatgaccctgcggctgtggtccagc

SEQ ID NO: 2365 - DNA, 2703 bp, Artificial Sequence
  Synthetic Polynucloetide
atggccttaccagtgaccgccttgctcctgccgctggccttgctgctccacgccgccaggccggaagtgcagctggttgaatctggcggaggactggttcagcctggcggatctctgagactgtcttgtgccgccagcggcttcagcttcagcgacttttggatgagctgggtccgacaggcccctggcaaaggacttgaatgggtcgccacaatcagccaggccggcagcgagaaggactacgtggactctgtgaagggcagattcaccatcagccgggacaacgccaagaagtccctgtacctccagatgaacagcctgagagccgaggacaccgccgtgtactattgtgcctctggcgtgtacagcttcgactacagaggccagggcaccctggtcacagtctcttctggtaccggcggaggcggatctggcggcggaggtagcggtggcggaggatctgaattcgacgacatcgtgatgacacagtcaccagatagcctcaccgtctccctgggggagcggaccaccattaattgtaaatccagccaaagcgtgctggactcaagcaagaacaagaatagcctcgcctggtatcagcagaagcccggtcagcctccaaagctgctgctttcttgggcctccaccagagagtccgggattcctgataggtttagtggttcaggctccggcacagattttactctgaccattgattctctccagccagaggattctgcaacttattactgccagcaaagcgcccactttcctataacttttggccagggaacccgacttgaaatcaagctcgaggacctgaagaacgtgttcccacctgaggtggccgtgttcgagcctagcgaggccgagatcagccacacccagaaagccaccctcgtgtgcctggctaccggcttctaccccgaccatgtggaactgtcttggtgggtcaacggcaaagaggtgcacagcggcgtgtgtaccgacccccagccactgaaagaacagcccgccctgaacgacagccggtactgcctgagcagcagactgagagtgtccgccaccttctggcagaacccccggaaccacttcagatgccaggtgcagttctacggcctgagcgagaacgacgagtggacccaggacagagccaagcccgtgacccagatcgtgtctgccgaagcctggggcagagccgattgcggctttaccagcgagagctaccagcagggcgtgctgagcgccaccatcctgtacgagatcctgctgggcaaggccaccctgtacgccgtgctggtgtctgccctggtgctgatggctatggtcaagcggaaggacagccggggaagggccaagcgatctggatctggagcaacaaacttctcactactcaaacaagcaggtgacgtggaggagaatcccgggcctactagtatggactggatttggcgcatccttttccttgtcggcgctgctaccggcgcgcattccgggccccagctccagctgcaagagtctggacctggcctggtcaagcctagcgagacactgagcctgacctgtaccgtgtccggcgatagcatcagcagcggcgattactactggggctggatcagacagcctcctggcaaaggactggaatggatcggccacatctactacagcggcgtgacctactacaaccccagcctgaagtccagagtgaccatcagcgtggacaccagccggaaccagttctccctgaagctgtctagcgtgacagccgccgataccgccgtgtactactgcaccagagaggacagcagcaactggcggagtagaggccagggaacactggtcacagttagctctggatccggcggaggcggaagtggaggcggaggatctggcggcggaggctctttcgaacaggtgcagctggtgcagagcggtgccgaagtgaagaaaccaggtgcatccgttaaagtttcatgtaaggctagtggatataccttcaccaattacggaatgaactgggtgaaacaggcccctggccagggactgaagtggatggggtggattaacacctacaccggggagccgacttatgcagacgactttaaggggcgggtcacgatgacctccgacacctccaccagtaccgcctacctggagctgcacaaccttaggtcagacgataccgccgtgtattactgtgcccgatggtcttggtccgacggatactatgtctacttcgactattggggccaggggaccacagttaccgtgtcctctacgcgtatccagaaccctgatcctgccgtgtaccagctgcgggatagcaagagcagcgacaagagcgtgtgtctgttcaccgacttcgacagccagaccaacgtgtcccagagcaaggactccgacgtgtacatcaccgataagtgcgtgctggacatgcggagcatggacttcaagagcaactccgccgtggcctggtccaacaagtccgatttcgcctgcgccaacgccttcaacaacagcattatccccgaggacacattcttcccaagccccgagagcagctgcgacgtgaagctggtggaaaagagcttcgagacagacaccaacctgaacttccagaacctgagcgtgatcggcttcagaatcctgctgctgaaagtggccggctttaacctgctgatgaccctgcggctgtggtccagc

SEQ ID NO: 2366 - DNA, 2691 bp, Artificial Sequence
  Synthetic Polynucloetide
atggccttaccagtgaccgccttgctcctgccgctggccttgctgctccacgccgccaggccggaagtgcagctggttgaatctggcggaggactggttcagcctggcggatctctgagactgtcttgtgccgccagcggcttcagcttcagcgacttttggatgagctgggtccgacaggcccctggcaaaggacttgaatgggtcgccacaatcagccaggccggcagcgagaaggactacgtggactctgtgaagggcagattcaccatcagccgggacaacgccaagaagtccctgtacctccagatgaacagcctgagagccgaggacaccgccgtgtactattgtgcctctggcgtgtacagcttcgactacagaggccagggcaccctggtcacagtctcttctggtaccggcggaggcggatctggcggcggaggtagcggtggcggaggatctgaattcgacgagatcgtgctgacacagagccctggaagcctggccgtgtctcctggcgagcgcgtgacaatgagctgcaagagcagccagagcgtgttcttcagcagctcccagaagaactacctggcctggtatcagcagatccccggccagagccccagactgctgatctactgggccagcaccagagaaagcggcgtgcccgatagattcaccggcagcggctctggcaccgacttcaccctgacaatcagcagcgtgcagcccgaggacctggctatctactactgccaccagtacctgagcagccggaccttcggccagggcaccaagctggaaatcaagagactcgaggacctgaagaacgtgttcccacctgaggtggccgtgttcgagcctagcgaggccgagatcagccacacccagaaagccaccctcgtgtgcctggctaccggcttctaccccgaccatgtggaactgtcttggtgggtcaacggcaaagaggtgcacagcggcgtgtgtaccgacccccagccactgaaagaacagcccgccctgaacgacagccggtactgcctgagcagcagactgagagtgtccgccaccttctggcagaacccccggaaccacttcagatgccaggtgcagttctacggcctgagcgagaacgacgagtggacccaggacagagccaagcccgtgacccagatcgtgtctgccgaagcctggggcagagccgattgcggctttaccagcgagagctaccagcagggcgtgctgagcgccaccatcctgtacgagatcctgctgggcaaggccaccctgtacgccgtgctggtgtctgccctggtgctgatggctatggtcaagcggaaggacagccggggaagggccaagcgatctggatctggagcaacaaacttctcactactcaaacaagcaggtgacgtggaggagaatcccgggcctactagtatggactggatttggcgcatccttttccttgtcggcgctgctaccggcgcgcattccgggccccagctccagctgcaagagtctggacctggcctggtcaagcctagcgagacactgagcctgacctgtaccgtgtccggcgatagcatcagcagcggcgattactactggggctggatcagacagcctcctggcaaaggactggaatggatcggccacatctactacagcggcgtgacctactacaaccccagcctgaagtccagagtgaccatcagcgtggacaccagccggaaccagttctccctgaagctgtctagcgtgacagccgccgataccgccgtgtactactgcaccagagaggacagcagcaactggcggagtagaggccagggaacactggtcacagttagctctggatccggcggaggcggaagtggaggcggaggatctggcggcggaggctctttcgaacaggtgcaactgcagcagcctggcgctgaggtcgtgaagccaggcgcttccgtgaagatgtcctgcaaggccagcggctacaccttcaccagctactacatccactggatcaagcagacccctggacagggcctggaatgggtgggagtgatctaccccggcaacgacgacatcagctacaaccagaagttccagggcaaggccaccctgaccgccgacaagtctagcaccaccgcctacatgcaactgtccagcctgaccagcgaggacagcgccgtgtactactgcgccagagaagtgcggctgcggtacttcgatgtgtggggccagggaaccaccgtgaccgtgtcatctacgcgtatccagaaccctgatcctgccgtgtaccagctgcgggatagcaagagcagcgacaagagcgtgtgtctgttcaccgacttcgacagccagaccaacgtgtcccagagcaaggactccgacgtgtacatcaccgataagtgcgtgctggacatgcggagcatggacttcaagagcaactccgccgtggcctggtccaacaagtccgatttcgcctgcgccaacgccttcaacaacagcattatccccgaggacacattcttcccaagccccgagagcagctgcgacgtgaagctggtggaaaagagcttcgagacagacaccaacctgaacttccagaacctgagcgtgatcggcttcagaatcctgctgctgaaagtggccggctttaacctgctgatgaccctgcggctgtggtccagc

SEQ ID NO: 2367 - DNA, 2703 bp, Artificial Sequence
  Synthetic Polynucloetide
atggccttaccagtgaccgccttgctcctgccgctggccttgctgctccacgccgccaggccggaagtgcagctggttgaatctggcggaggactggttcagcctggcggatctctgagactgtcttgtgccgccagcggcttcagcttcagcgacttttggatgagctgggtccgacaggcccctggcaaaggacttgaatgggtcgccacaatcagccaggccggcagcgagaaggactacgtggactctgtgaagggcagattcaccatcagccgggacaacgccaagaagtccctgtacctccagatgaacagcctgagagccgaggacaccgccgtgtactattgtgcctctggcgtgtacagcttcgactacagaggccagggcaccctggtcacagtctcttctggtaccggcggaggcggatctggcggcggaggtagcggtggcggaggatctgaattcgatgtgctgctgacccagagccctctgagcctgcctgtgacactgggacagcctgccagcatctcctgtcggagcagccagaccatcgtgcacagcaacggcaacacctacctggaatggttccagcagcggccaggccagagccccagactgctgatctaccaggtgtccaacagattcagcggcgtgcccgacagattctccggcagcggctctggcaccgacttcaccctgaagatcagccgggtggaagccgaggacgtgggcgtgtactactgttttcaaggcagccacgtgccccggacctttggcggaggaacaaaggtggaaatcaagagagccctcgaggacctgaagaacgtgttcccacctgaggtggccgtgttcgagcctagcgaggccgagatcagccacacccagaaagccaccctcgtgtgcctggctaccggcttctaccccgaccatgtggaactgtcttggtgggtcaacggcaaagaggtgcacagcggcgtgtgtaccgacccccagccactgaaagaacagcccgccctgaacgacagccggtactgcctgagcagcagactgagagtgtccgccaccttctggcagaacccccggaaccacttcagatgccaggtgcagttctacggcctgagcgagaacgacgagtggacccaggacagagccaagcccgtgacccagatcgtgtctgccgaagcctggggcagagccgattgcggctttaccagcgagagctaccagcagggcgtgctgagcgccaccatcctgtacgagatcctgctgggcaaggccaccctgtacgccgtgctggtgtctgccctggtgctgatggctatggtcaagcggaaggacagccggggaagggccaagcgatctggatctggagcaacaaacttctcactactcaaacaagcaggtgacgtggaggagaatcccgggcctactagtatggactggatttggcgcatccttttccttgtcggcgctgctaccggcgcgcattccgggccccagctccagctgcaagagtctggacctggcctggtcaagcctagcgagacactgagcctgacctgtaccgtgtccggcgatagcatcagcagcggcgattactactggggctggatcagacagcctcctggcaaaggactggaatggatcggccacatctactacagcggcgtgacctactacaaccccagcctgaagtccagagtgaccatcagcgtggacaccagccggaaccagttctccctgaagctgtctagcgtgacagccgccgataccgccgtgtactactgcaccagagaggacagcagcaactggcggagtagaggccagggaacactggtcacagttagctctggatccggcggaggcggaagtggaggcggaggatctggcggcggaggctctttcgaacagatccaactggtgcagagcggcagcgagctgaagaaacctggggccagcgtgaaggtgtcctgcaaggccagcggctacacctttaccaactacggcatgaactgggtgcgccaggcccctggacagggcctgaaatggatgggctggatcaacaccaacaccggcgagcctaagtacgccgaagagttcaagggcagattcgccctgagcctggacaccagcgtgtccacagcctacctccagatcaacagcctgaaggccgaggataccgccgtgtacttctgcgccagaggctacggcaactacgccagaggggcttggctggcctattggggccagggaacactcgtgaccgtgtcctctacgcgtatccagaaccctgatcctgccgtgtaccagctgcgggatagcaagagcagcgacaagagcgtgtgtctgttcaccgacttcgacagccagaccaacgtgtcccagagcaaggactccgacgtgtacatcaccgataagtgcgtgctggacatgcggagcatggacttcaagagcaactccgccgtggcctggtccaacaagtccgatttcgcctgcgccaacgccttcaacaacagcattatccccgaggacacattcttcccaagccccgagagcagctgcgacgtgaagctggtggaaaagagcttcgagacagacaccaacctgaacttccagaacctgagcgtgatcggcttcagaatcctgctgctgaaagtggccggctttaacctgctgatgaccctgcggctgtggtccagc

SEQ ID NO: 2368 - DNA, 2658 bp, Artificial Sequence
  Synthetic Polynucloetide
atggccttaccagtgaccgccttgctcctgccgctggccttgctgctccacgccgccaggccggaagtgcagctggttgaatctggcggaggactggttcagcctggcggatctctgagactgtcttgtgccgccagcggcttcagcttcagcgacttttggatgagctgggtccgacaggcccctggcaaaggacttgaatgggtcgccacaatcagccaggccggcagcgagaaggactacgtggactctgtgaagggcagattcaccatcagccgggacaacgccaagaagtccctgtacctccagatgaacagcctgagagccgaggacaccgccgtgtactattgtgcctctggcgtgtacagcttcgactacagaggccagggcaccctggtcacagtctcttctggtaccggcggaggcggatctggcggcggaggtagcggtggcggaggatctgaattcgacgagatcgtgctgacacagagccctgccacactctctctgagccctggcgaaagagccaccctgagctgtagcgccagcagcagcatcaactacatctactggctccagcagaagcccggccaggcccccagaatcctgatctacctgaccagcaacctggcctccggcgtgccagccagattttctggcagcggctccggcaccgacttcaccctgacaatcagcagcctggaacccgaggacttcgccgtgtactactgcctccagtggtccagcaaccccctgacctttggcggaggcaccaaggtggaaatcaagctcgaggacctgaagaacgtgttcccacctgaggtggccgtgttcgagcctagcgaggccgagatcagccacacccagaaagccaccctcgtgtgcctggctaccggcttctaccccgaccatgtggaactgtcttggtgggtcaacggcaaagaggtgcacagcggcgtgtgtaccgacccccagccactgaaagaacagcccgccctgaacgacagccggtactgcctgagcagcagactgagagtgtccgccaccttctggcagaacccccggaaccacttcagatgccaggtgcagttctacggcctgagcgagaacgacgagtggacccaggacagagccaagcccgtgacccagatcgtgtctgccgaagcctggggcagagccgattgcggctttaccagcgagagctaccagcagggcgtgctgagcgccaccatcctgtacgagatcctgctgggcaaggccaccctgtacgccgtgctggtgtctgccctggtgctgatggctatggtcaagcggaaggacagccggggaagggccaagcgatctggatctggagcaacaaacttctcactactcaaacaagcaggtgacgtggaggagaatcccgggcctactagtatggactggatttggcgcatccttttccttgtcggcgctgctaccggcgcgcattccgggccccagctccagctgcaagagtctggacctggcctggtcaagcctagcgagacactgagcctgacctgtaccgtgtccggcgatagcatcagcagcggcgattactactggggctggatcagacagcctcctggcaaaggactggaatggatcggccacatctactacagcggcgtgacctactacaaccccagcctgaagtccagagtgaccatcagcgtggacaccagccggaaccagttctccctgaagctgtctagcgtgacagccgccgataccgccgtgtactactgcaccagagaggacagcagcaactggcggagtagaggccagggaacactggtcacagttagctctggatccggcggaggcggaagtggaggcggaggatctggcggcggaggctctttcgaagaagtgcaactggtggaaagcgggggaggacttgtgaagcctggcggctctctgagactgagctgtgccgcctctggcttcaccttcagcagctacgacatgagctgggtgcgccaggctcctggcaagggactggaatgggtgtccaccatcagcagcggcggcagctacacctactacctggacagcatcaagggccggttcaccatctccagagacaacgccaagaacagcctgtacctccagatgaactccctgcgggccgaggacacagccgtgtattattgcgccagacagggcctggattactggggcagaggcacccttgtgaccgtgtcctctacgcgtatccagaaccctgatcctgccgtgtaccagctgcgggatagcaagagcagcgacaagagcgtgtgtctgttcaccgacttcgacagccagaccaacgtgtcccagagcaaggactccgacgtgtacatcaccgataagtgcgtgctggacatgcggagcatggacttcaagagcaactccgccgtggcctggtccaacaagtccgatttcgcctgcgccaacgccttcaacaacagcattatccccgaggacacattcttcccaagccccgagagcagctgcgacgtgaagctggtggaaaagagcttcgagacagacaccaacctgaacttccagaacctgagcgtgatcggcttcagaatcctgctgctgaaagtggccggctttaacctgctgatgaccctgcggctgtggtccagc

SEQ ID NO: 2369 - DNA, 2685 bp, Artificial Sequence
  Synthetic Polynucloetide
atggccttaccagtgaccgccttgctcctgccgctggccttgctgctccacgccgccaggccggaagtgcagctggttgaatctggcggaggactggttcagcctggcggatctctgagactgtcttgtgccgccagcggcttcagcttcagcgacttttggatgagctgggtccgacaggcccctggcaaaggacttgaatgggtcgccacaatcagccaggccggcagcgagaaggactacgtggactctgtgaagggcagattcaccatcagccgggacaacgccaagaagtccctgtacctccagatgaacagcctgagagccgaggacaccgccgtgtactattgtgcctctggcgtgtacagcttcgactacagaggccagggcaccctggtcacagtctcttctggtaccggcggaggcggatctggcggcggaggtagcggtggcggaggatctgaattcgacatcgtgatgacccagagccccgatagcctggccgtgtctctgggagagagagccaccatcaactgccgggccagcaagagcgtgtccaccagcggctacagcttcatgcactggtatcagcagaagcccggccagccccccaagctgctgatctacctggcctccaacctggaaagcggcgtgcccgatagattcagcggcagcggctctggcaccgacttcaccctgaccatcagttctcttcaggccgaggacgtggccgtgtactactgccagcacagcagagaggtgccctggacattcggccagggcacaaaggtggaaatcaagcggctcgaggacctgaagaacgtgttcccacctgaggtggccgtgttcgagcctagcgaggccgagatcagccacacccagaaagccaccctcgtgtgcctggctaccggcttctaccccgaccatgtggaactgtcttggtgggtcaacggcaaagaggtgcacagcggcgtgtgtaccgacccccagccactgaaagaacagcccgccctgaacgacagccggtactgcctgagcagcagactgagagtgtccgccaccttctggcagaacccccggaaccacttcagatgccaggtgcagttctacggcctgagcgagaacgacgagtggacccaggacagagccaagcccgtgacccagatcgtgtctgccgaagcctggggcagagccgattgcggctttaccagcgagagctaccagcagggcgtgctgagcgccaccatcctgtacgagatcctgctgggcaaggccaccctgtacgccgtgctggtgtctgccctggtgctgatggctatggtcaagcggaaggacagccggggaagggccaagcgatctggatctggagcaacaaacttctcactactcaaacaagcaggtgacgtggaggagaatcccgggcctactagtatggactggatttggcgcatccttttccttgtcggcgctgctaccggcgcgcattccgggccccagctccagctgcaagagtctggacctggcctggtcaagcctagcgagacactgagcctgacctgtaccgtgtccggcgatagcatcagcagcggcgattactactggggctggatcagacagcctcctggcaaaggactggaatggatcggccacatctactacagcggcgtgacctactacaaccccagcctgaagtccagagtgaccatcagcgtggacaccagccggaaccagttctccctgaagctgtctagcgtgacagccgccgataccgccgtgtactactgcaccagagaggacagcagcaactggcggagtagaggccagggaacactggtcacagttagctctggatccggcggaggcggaagtggaggcggaggatctggcggcggaggctctttcgaacaggtgcagctggtgcagtctggggccgaagtgaagaaacctggggccagcgtgaaggtgtcctgcaaggccagcggatacacctttaccaactacggcatgaactgggtgcgccaggcccctggacagggcctggaatggatgggctggatcaacacctacaccggcgagcccacatacgccgacgccttcaagggcagattcgccttcagcctggacaccagcacctccaccgcctacctccagatcaacagcctgcggagcgacgacaccgccgtgtattattgcgccagagattacggcgactacgggatggactattggggccagggaaccaccgtgaccgtgtcctctacgcgtatccagaaccctgatcctgccgtgtaccagctgcgggatagcaagagcagcgacaagagcgtgtgtctgttcaccgacttcgacagccagaccaacgtgtcccagagcaaggactccgacgtgtacatcaccgataagtgcgtgctggacatgcggagcatggacttcaagagcaactccgccgtggcctggtccaacaagtccgatttcgcctgcgccaacgccttcaacaacagcattatccccgaggacacattcttcccaagccccgagagcagctgcgacgtgaagctggtggaaaagagcttcgagacagacaccaacctgaacttccagaacctgagcgtgatcggcttcagaatcctgctgctgaaagtggccggctttaacctgctgatgaccctgcggctgtggtccagc

SEQ ID NO: 2370 - DNA, 2673 bp, Artificial Sequence
  Synthetic Polynucloetide
atggccttaccagtgaccgccttgctcctgccgctggccttgctgctccacgccgccaggccggaagtgcagctggttgaatctggcggaggactggttcagcctggcggatctctgagactgtcttgtgccgccagcggcttcagcttcagcgacttttggatgagctgggtccgacaggcccctggcaaaggacttgaatgggtcgccacaatcagccaggccggcagcgagaaggactacgtggactctgtgaagggcagattcaccatcagccgggacaacgccaagaagtccctgtacctccagatgaacagcctgagagccgaggacaccgccgtgtactattgtgcctctggcgtgtacagcttcgactacagaggccagggcaccctggtcacagtctcttctggtaccggcggaggcggatctggcggcggaggtagcggtggcggaggatctgaattcgacatcgtgatgacccagacccccctgaccctgagcgtgacaatcggacagcctgccagcatctcctgcaagagcagccagagcctgctggacagcgacggcaagacctacctgaactggctgctgcagaggccaggccagagccccgagagactgatctacctggtgtccaagctggactccggcgtgcccgatagattcacaggcagcggctccggcaccgacttcaccctgaagatcagccgggtggaagccgaggacctgggcgtgtactgttgttggcagggcacccacttcccttacaccttcggcggagggaccaaggtggaaatcaagggcctcgaggacctgaagaacgtgttcccacctgaggtggccgtgttcgagcctagcgaggccgagatcagccacacccagaaagccaccctcgtgtgcctggctaccggcttctaccccgaccatgtggaactgtcttggtgggtcaacggcaaagaggtgcacagcggcgtgtgtaccgacccccagccactgaaagaacagcccgccctgaacgacagccggtactgcctgagcagcagactgagagtgtccgccaccttctggcagaacccccggaaccacttcagatgccaggtgcagttctacggcctgagcgagaacgacgagtggacccaggacagagccaagcccgtgacccagatcgtgtctgccgaagcctggggcagagccgattgcggctttaccagcgagagctaccagcagggcgtgctgagcgccaccatcctgtacgagatcctgctgggcaaggccaccctgtacgccgtgctggtgtctgccctggtgctgatggctatggtcaagcggaaggacagccggggaagggccaagcgatctggatctggagcaacaaacttctcactactcaaacaagcaggtgacgtggaggagaatcccgggcctactagtatggactggatttggcgcatccttttccttgtcggcgctgctaccggcgcgcattccgggccccagctccagctgcaagagtctggacctggcctggtcaagcctagcgagacactgagcctgacctgtaccgtgtccggcgatagcatcagcagcggcgattactactggggctggatcagacagcctcctggcaaaggactggaatggatcggccacatctactacagcggcgtgacctactacaaccccagcctgaagtccagagtgaccatcagcgtggacaccagccggaaccagttctccctgaagctgtctagcgtgacagccgccgataccgccgtgtactactgcaccagagaggacagcagcaactggcggagtagaggccagggaacactggtcacagttagctctggatccggcggaggcggaagtggaggcggaggatctggcggcggaggctctttcgaacaggtgcaactgcagcagcctggcgctgaacttgtgcggccaggcgcctctgtgaagctgagctgtaaagccagcggctacaccttcaccagctactggatgaactgggtcaagcagcgcccaggccagggcctggaatggatcggaatgatcgaccccagcgacagcgagacacactacaaccacatcttcaaggacaaggccaccctgaccgtggacaagtccagcagcacagcctacctgcaactgtccagcctgaccagcgaggacagcgccgtgtactactgcgcccggaacctgtatctgtggggccagggaacaagcgtgaccgtgtctagcacgcgtatccagaaccctgatcctgccgtgtaccagctgcgggatagcaagagcagcgacaagagcgtgtgtctgttcaccgacttcgacagccagaccaacgtgtcccagagcaaggactccgacgtgtacatcaccgataagtgcgtgctggacatgcggagcatggacttcaagagcaactccgccgtggcctggtccaacaagtccgatttcgcctgcgccaacgccttcaacaacagcattatccccgaggacacattcttcccaagccccgagagcagctgcgacgtgaagctggtggaaaagagcttcgagacagacaccaacctgaacttccagaacctgagcgtgatcggcttcagaatcctgctgctgaaagtggccggctttaacctgctgatgaccctgcggctgtggtccagc

SEQ ID NO: 2371 - DNA, 2697 bp, Artificial Sequence
  Synthetic Polynucloetide
atggccttaccagtgaccgccttgctcctgccgctggccttgctgctccacgccgccaggccggaagtgcagctggttgaatctggcggaggactggttcagcctggcggatctctgagactgtcttgtgccgccagcggcttcagcttcagcgacttttggatgagctgggtccgacaggcccctggcaaaggacttgaatgggtcgccacaatcagccaggccggcagcgagaaggactacgtggactctgtgaagggcagattcaccatcagccgggacaacgccaagaagtccctgtacctccagatgaacagcctgagagccgaggacaccgccgtgtactattgtgcctctggcgtgtacagcttcgactacagaggccagggcaccctggtcacagtctcttctggtaccggcggaggcggatctggcggcggaggtagcggtggcggaggatctgaattcgacatcgtgatgacccagagccccgatagcctggccgtgtctctgggagagagagccaccatcaactgcgagagcagccagagcctgctgaacagcggcaaccagaagaactacctgacctggtatcagcagaagcccggccagccccccaagcccctgatctattgggccagcaccagagaaagcggcgtgcccgatagattcagcggcagcggaagcggcaccgacttcaccctgaccatcagttctcttcaggccgaggacgtggccgtgtactactgccagaacgactacagctacccctacaccttcggccagggcaccaagctggaaatcaagagactcgaggacctgaagaacgtgttcccacctgaggtggccgtgttcgagcctagcgaggccgagatcagccacacccagaaagccaccctcgtgtgcctggctaccggcttctaccccgaccatgtggaactgtcttggtgggtcaacggcaaagaggtgcacagcggcgtgtgtaccgacccccagccactgaaagaacagcccgccctgaacgacagccggtactgcctgagcagcagactgagagtgtccgccaccttctggcagaacccccggaaccacttcagatgccaggtgcagttctacggcctgagcgagaacgacgagtggacccaggacagagccaagcccgtgacccagatcgtgtctgccgaagcctggggcagagccgattgcggctttaccagcgagagctaccagcagggcgtgctgagcgccaccatcctgtacgagatcctgctgggcaaggccaccctgtacgccgtgctggtgtctgccctggtgctgatggctatggtcaagcggaaggacagccggggaagggccaagcgatctggatctggagcaacaaacttctcactactcaaacaagcaggtgacgtggaggagaatcccgggcctactagtatggactggatttggcgcatccttttccttgtcggcgctgctaccggcgcgcattccgggccccagctccagctgcaagagtctggacctggcctggtcaagcctagcgagacactgagcctgacctgtaccgtgtccggcgatagcatcagcagcggcgattactactggggctggatcagacagcctcctggcaaaggactggaatggatcggccacatctactacagcggcgtgacctactacaaccccagcctgaagtccagagtgaccatcagcgtggacaccagccggaaccagttctccctgaagctgtctagcgtgacagccgccgataccgccgtgtactactgcaccagagaggacagcagcaactggcggagtagaggccagggaacactggtcacagttagctctggatccggcggaggcggaagtggaggcggaggatctggcggcggaggctctttcgaagaagtgcagctggtgcagtctggggccgaagtgaagaagcctggcgagagcctgaagatcagctgcaagggcagcggctacagcttcaccgactactacatgaagtgggccagacagatgcccggcaagggcctggaatggatgggcgacatcatccccagcaacggggccaccttctacaaccagaaattcaagggccaagtgaccatctccgccgacaagagcatcagcaccacctacctccagtggtccagcctgaaggccagcgacaccgccatgtactattgcgccagaagccatctgctgcgggccagttggttcgcctattggggccagggaacaatggtcacagtgtccagcacgcgtatccagaaccctgatcctgccgtgtaccagctgcgggatagcaagagcagcgacaagagcgtgtgtctgttcaccgacttcgacagccagaccaacgtgtcccagagcaaggactccgacgtgtacatcaccgataagtgcgtgctggacatgcggagcatggacttcaagagcaactccgccgtggcctggtccaacaagtccgatttcgcctgcgccaacgccttcaacaacagcattatccccgaggacacattcttcccaagccccgagagcagctgcgacgtgaagctggtggaaaagagcttcgagacagacaccaacctgaacttccagaacctgagcgtgatcggcttcagaatcctgctgctgaaagtggccggctttaacctgctgatgaccctgcggctgtggtccagc

SEQ ID NO: 2372 - DNA, 2682 bp, Artificial Sequence
  Synthetic Polynucloetide
atggccttaccagtgaccgccttgctcctgccgctggccttgctgctccacgccgccaggccggaagtgcagctggttgaatctggcggaggactggttcagcctggcggatctctgagactgtcttgtgccgccagcggcttcagcttcagcgacttttggatgagctgggtccgacaggcccctggcaaaggacttgaatgggtcgccacaatcagccaggccggcagcgagaaggactacgtggactctgtgaagggcagattcaccatcagccgggacaacgccaagaagtccctgtacctccagatgaacagcctgagagccgaggacaccgccgtgtactattgtgcctctggcgtgtacagcttcgactacagaggccagggcaccctggtcacagtctcttctggtaccggcggaggcggatctggcggcggaggtagcggtggcggaggatctgaattcgacatccagatgacccagtctaccagttccctgagtgcatccctcggagacagggtgacgatcagttgcagcgcaagccaagggatcaataactatctgaactggtatcagcagaaaccggacggaacagtcgaactcctgatttattacaccagcacccttcagagtggcgtcccttcccggttcagtggctccggaagcgggaccgattactccctgaccatttctaatctggagccagaggacataggaacgtattattgccagcagtatagtaaactgccacgaacttttggaggggggacgaaactggagatcaaactcgaggacctgaagaacgtgttcccacctgaggtggccgtgttcgagcctagcgaggccgagatcagccacacccagaaagccaccctcgtgtgcctggctaccggcttctaccccgaccatgtggaactgtcttggtgggtcaacggcaaagaggtgcacagcggcgtgtgtaccgacccccagccactgaaagaacagcccgccctgaacgacagccggtactgcctgagcagcagactgagagtgtccgccaccttctggcagaacccccggaaccacttcagatgccaggtgcagttctacggcctgagcgagaacgacgagtggacccaggacagagccaagcccgtgacccagatcgtgtctgccgaagcctggggcagagccgattgcggctttaccagcgagagctaccagcagggcgtgctgagcgccaccatcctgtacgagatcctgctgggcaaggccaccctgtacgccgtgctggtgtctgccctggtgctgatggctatggtcaagcggaaggacagccggggaagggccaagcgatctggatctggagcaacaaacttctcactactcaaacaagcaggtgacgtggaggagaatcccgggcctactagtatggactggatttggcgcatccttttccttgtcggcgctgctaccggcgcgcattccgggccccagctccagctgcaagagtctggacctggcctggtcaagcctagcgagacactgagcctgacctgtaccgtgtccggcgatagcatcagcagcggcgattactactggggctggatcagacagcctcctggcaaaggactggaatggatcggccacatctactacagcggcgtgacctactacaaccccagcctgaagtccagagtgaccatcagcgtggacaccagccggaaccagttctccctgaagctgtctagcgtgacagccgccgataccgccgtgtactactgcaccagagaggacagcagcaactggcggagtagaggccagggaacactggtcacagttagctctggatccggcggaggcggaagtggaggcggaggatctggcggcggaggctctttcgaacaggtgcaactccagcagtccggaagcgagcttatgatgccaggggcatcagtgaagatcagctgcaaggctactggctacaccttctctaattactggatagagtgggttaaacaaaggccagggcacggcctggaatggatcggcgagatcctgcctgggacaggccgaaccatttataacgagaagttcaaaggcaaggctactttcaccgcagatataagctctaatacagtgcaaatgcagctctcttccctgacaagtgaggatagtgccgtgtattattgcgcacgaagagattactatggaaatttttattacgctatggattattggggtcaaggaacaagtgtgaccgttagcagcacgcgtatccagaaccctgatcctgccgtgtaccagctgcgggatagcaagagcagcgacaagagcgtgtgtctgttcaccgacttcgacagccagaccaacgtgtcccagagcaaggactccgacgtgtacatcaccgataagtgcgtgctggacatgcggagcatggacttcaagagcaactccgccgtggcctggtccaacaagtccgatttcgcctgcgccaacgccttcaacaacagcattatccccgaggacacattcttcccaagccccgagagcagctgcgacgtgaagctggtggaaaagagcttcgagacagacaccaacctgaacttccagaacctgagcgtgatcggcttcagaatcctgctgctgaaagtggccggctttaacctgctgatgaccctgcggctgtggtccagc

SEQ ID NO: 2373 - DNA, 2667 bp, Artificial Sequence
  Synthetic Polynucloetide
atggccttaccagtgaccgccttgctcctgccgctggccttgctgctccacgccgccaggccggaagtgcagctggttgaatctggcggaggactggttcagcctggcggatctctgagactgtcttgtgccgccagcggcttcagcttcagcgacttttggatgagctgggtccgacaggcccctggcaaaggacttgaatgggtcgccacaatcagccaggccggcagcgagaaggactacgtggactctgtgaagggcagattcaccatcagccgggacaacgccaagaagtccctgtacctccagatgaacagcctgagagccgaggacaccgccgtgtactattgtgcctctggcgtgtacagcttcgactacagaggccagggcaccctggtcacagtctcttctggtaccggcggaggcggatctggcggcggaggtagcggtggcggaggatctgaattcgacatccagatgacccagagccctgccagcctgtccgtgtctgtgggcgagacagtgaccatcacctgtcgggccagcgagaacatctacagcaacctggcctggtatcagcagaagcagggcaagagcccccaactgctggtgtacgccgccaccaatctggccgatggcgtgcccagcagattttccggctctggcagcggcacccagtacagcctgaagatcaacagcctccagagcgaggacttcggcagctactactgccagcacttctggggcacctggacctttggaggaggcaccaccctggaaatcaagctcgaggacctgaagaacgtgttcccacctgaggtggccgtgttcgagcctagcgaggccgagatcagccacacccagaaagccaccctcgtgtgcctggctaccggcttctaccccgaccatgtggaactgtcttggtgggtcaacggcaaagaggtgcacagcggcgtgtgtaccgacccccagccactgaaagaacagcccgccctgaacgacagccggtactgcctgagcagcagactgagagtgtccgccaccttctggcagaacccccggaaccacttcagatgccaggtgcagttctacggcctgagcgagaacgacgagtggacccaggacagagccaagcccgtgacccagatcgtgtctgccgaagcctggggcagagccgattgcggctttaccagcgagagctaccagcagggcgtgctgagcgccaccatcctgtacgagatcctgctgggcaaggccaccctgtacgccgtgctggtgtctgccctggtgctgatggctatggtcaagcggaaggacagccggggaagggccaagcgatctggatctggagcaacaaacttctcactactcaaacaagcaggtgacgtggaggagaatcccgggcctactagtatggactggatttggcgcatccttttccttgtcggcgctgctaccggcgcgcattccgggccccagctccagctgcaagagtctggacctggcctggtcaagcctagcgagacactgagcctgacctgtaccgtgtccggcgatagcatcagcagcggcgattactactggggctggatcagacagcctcctggcaaaggactggaatggatcggccacatctactacagcggcgtgacctactacaaccccagcctgaagtccagagtgaccatcagcgtggacaccagccggaaccagttctccctgaagctgtctagcgtgacagccgccgataccgccgtgtactactgcaccagagaggacagcagcaactggcggagtagaggccagggaacactggtcacagttagctctggatccggcggaggcggaagtggaggcggaggatctggcggcggaggctctttcgaagaagtgcaactccagcagagcggccctgagcttgtgaagcctggcgcttccgtgaagatgagctgcaaggccagcggctacaccttcaccgactactacatgaagtggatgaagcagagccacggcaagtccctggaatggatcggcgacatcaaccccaacaacggcggcaccacctacaaccagaagttcaagggcaaggccaccctgaccgtggacaagagcagcagcaccgcctacatgcaactgaacagcctgaccagcgaggacagcgccgtgtactactgcgccagagactacggctacggctatttcgactactggggccagggcacaaccctgacagtgtcctctacgcgtatccagaaccctgatcctgccgtgtaccagctgcgggatagcaagagcagcgacaagagcgtgtgtctgttcaccgacttcgacagccagaccaacgtgtcccagagcaaggactccgacgtgtacatcaccgataagtgcgtgctggacatgcggagcatggacttcaagagcaactccgccgtggcctggtccaacaagtccgatttcgcctgcgccaacgccttcaacaacagcattatccccgaggacacattcttcccaagccccgagagcagctgcgacgtgaagctggtggaaaagagcttcgagacagacaccaacctgaacttccagaacctgagcgtgatcggcttcagaatcctgctgctgaaagtggccggctttaacctgctgatgaccctgcggctgtggtccagc

SEQ ID NO: 2374 - DNA, 2676 bp, Artificial Sequence
  Synthetic Polynucloetide
atggccttaccagtgaccgccttgctcctgccgctggccttgctgctccacgccgccaggccggaagtgcagctggttgaatctggcggaggactggttcagcctggcggatctctgagactgtcttgtgccgccagcggcttcagcttcagcgacttttggatgagctgggtccgacaggcccctggcaaaggacttgaatgggtcgccacaatcagccaggccggcagcgagaaggactacgtggactctgtgaagggcagattcaccatcagccgggacaacgccaagaagtccctgtacctccagatgaacagcctgagagccgaggacaccgccgtgtactattgtgcctctggcgtgtacagcttcgactacagaggccagggcaccctggtcacagtctcttctggtaccggcggaggcggatctggcggcggaggtagcggtggcggaggatctgaattcgagatcgtgctgacacagagccctggcaccctgagcctgtctccaggcgaaagagccacactgagctgtcgggcctctcagagcgtgggaggctacctggcttggtatcagcagaagccaggccaggcccccagactgctgatctacgacgccagcaatcgggccacaggcatccccgccagattttctggcagcggctccggcaccgacttcaccctgacaatcagcagcctggaacccgaggacttcgccgtgtactactgccagcagcggaacaactggccccccatgtacacattcggccagggcaccaagctggaaatcaagagactcgaggacctgaagaacgtgttcccacctgaggtggccgtgttcgagcctagcgaggccgagatcagccacacccagaaagccaccctcgtgtgcctggctaccggcttctaccccgaccatgtggaactgtcttggtgggtcaacggcaaagaggtgcacagcggcgtgtgtaccgacccccagccactgaaagaacagcccgccctgaacgacagccggtactgcctgagcagcagactgagagtgtccgccaccttctggcagaacccccggaaccacttcagatgccaggtgcagttctacggcctgagcgagaacgacgagtggacccaggacagagccaagcccgtgacccagatcgtgtctgccgaagcctggggcagagccgattgcggctttaccagcgagagctaccagcagggcgtgctgagcgccaccatcctgtacgagatcctgctgggcaaggccaccctgtacgccgtgctggtgtctgccctggtgctgatggctatggtcaagcggaaggacagccggggaagggccaagcgatctggatctggagcaacaaacttctcactactcaaacaagcaggtgacgtggaggagaatcccgggcctactagtatggactggatttggcgcatccttttccttgtcggcgctgctaccggcgcgcattccgggccccagctccagctgcaagagtctggacctggcctggtcaagcctagcgagacactgagcctgacctgtaccgtgtccggcgatagcatcagcagcggcgattactactggggctggatcagacagcctcctggcaaaggactggaatggatcggccacatctactacagcggcgtgacctactacaaccccagcctgaagtccagagtgaccatcagcgtggacaccagccggaaccagttctccctgaagctgtctagcgtgacagccgccgataccgccgtgtactactgcaccagagaggacagcagcaactggcggagtagaggccagggaacactggtcacagttagctctggatccggcggaggcggaagtggaggcggaggatctggcggcggaggctctttcgaacaggtgcaactggtgcagagcggagccgaagtgaagaaacccggcagcagcgtgaaggtgtcctgcaaggcttccggcggcaccttcagcagctacgccatttcttgggtgcgccaggctcctggacagggcctggaatggatgggcggcatcatccctatcctgggcaccgccaactacgcccagaaattccagggcagagtgaccatcaccgccgacgagagcaccagcaccgcctacatggaactgagcagcctgcggagcgaggacacagccgtgtattattgcgccagatggggcggaggggccttcgacatttggggccagggaacaatggtcaccgtgtccagcacgcgtatccagaaccctgatcctgccgtgtaccagctgcgggatagcaagagcagcgacaagagcgtgtgtctgttcaccgacttcgacagccagaccaacgtgtcccagagcaaggactccgacgtgtacatcaccgataagtgcgtgctggacatgcggagcatggacttcaagagcaactccgccgtggcctggtccaacaagtccgatttcgcctgcgccaacgccttcaacaacagcattatccccgaggacacattcttcccaagccccgagagcagctgcgacgtgaagctggtggaaaagagcttcgagacagacaccaacctgaacttccagaacctgagcgtgatcggcttcagaatcctgctgctgaaagtggccggctttaacctgctgatgaccctgcggctgtggtccagc

SEQ ID NO: 2375 - DNA, 2661 bp, Artificial Sequence
  Synthetic Polynucloetide
atggccttaccagtgaccgccttgctcctgccgctggccttgctgctccacgccgccaggccggaagtgcagctggttgaatctggcggaggactggttcagcctggcggatctctgagactgtcttgtgccgccagcggcttcagcttcagcgacttttggatgagctgggtccgacaggcccctggcaaaggacttgaatgggtcgccacaatcagccaggccggcagcgagaaggactacgtggactctgtgaagggcagattcaccatcagccgggacaacgccaagaagtccctgtacctccagatgaacagcctgagagccgaggacaccgccgtgtactattgtgcctctggcgtgtacagcttcgactacagaggccagggcaccctggtcacagtctcttctggtaccggcggaggcggatctggcggcggaggtagcggtggcggaggatctgaattccagatcgtgctgacacagagccctgccctgatgagcgccagccctggcgagaaagtgaccatgacctgtagcgccagcagcagcgtgcgctacatgtactggtatcagcagaagcccagaagcagccccaagccctggattcacctgaccagcaatctggcctctggcgtgcccgctagattttccggctctggcagcggcaccagctacagcctgaccatcagcagcatggaagccgaggacgccgccacctactactgccagcagtggtccagccaccccttcacatttggctccggcaccaagctggaaatcaagctcgaggacctgaagaacgtgttcccacctgaggtggccgtgttcgagcctagcgaggccgagatcagccacacccagaaagccaccctcgtgtgcctggctaccggcttctaccccgaccatgtggaactgtcttggtgggtcaacggcaaagaggtgcacagcggcgtgtgtaccgacccccagccactgaaagaacagcccgccctgaacgacagccggtactgcctgagcagcagactgagagtgtccgccaccttctggcagaacccccggaaccacttcagatgccaggtgcagttctacggcctgagcgagaacgacgagtggacccaggacagagccaagcccgtgacccagatcgtgtctgccgaagcctggggcagagccgattgcggctttaccagcgagagctaccagcagggcgtgctgagcgccaccatcctgtacgagatcctgctgggcaaggccaccctgtacgccgtgctggtgtctgccctggtgctgatggctatggtcaagcggaaggacagccggggaagggccaagcgatctggatctggagcaacaaacttctcactactcaaacaagcaggtgacgtggaggagaatcccgggcctactagtatggactggatttggcgcatccttttccttgtcggcgctgctaccggcgcgcattccgggccccagctccagctgcaagagtctggacctggcctggtcaagcctagcgagacactgagcctgacctgtaccgtgtccggcgatagcatcagcagcggcgattactactggggctggatcagacagcctcctggcaaaggactggaatggatcggccacatctactacagcggcgtgacctactacaaccccagcctgaagtccagagtgaccatcagcgtggacaccagccggaaccagttctccctgaagctgtctagcgtgacagccgccgataccgccgtgtactactgcaccagagaggacagcagcaactggcggagtagaggccagggaacactggtcacagttagctctggatccggcggaggcggaagtggaggcggaggatctggcggcggaggctctttcgaagatgtgcaactccaggaaagcggccctggccttgtgaagcctagccagagcctgtccctgacctgtaccgtgaccggcttcagcatcaccagcgactactcttggaactggatcagacagttccctggcaacaaactggaatggatgggctacatcagctactccggccacacctcctacaaccccagcctggaaagccggatctccatcaccagagacaccagcaagaaccagttcttcttgcaactgaacagcgtgaccaccgaggataccgccacatattactgtaccagaggcaactgggacgtggtgtactggggccagggcacacttgtgaccgtgtctgctacgcgtatccagaaccctgatcctgccgtgtaccagctgcgggatagcaagagcagcgacaagagcgtgtgtctgttcaccgacttcgacagccagaccaacgtgtcccagagcaaggactccgacgtgtacatcaccgataagtgcgtgctggacatgcggagcatggacttcaagagcaactccgccgtggcctggtccaacaagtccgatttcgcctgcgccaacgccttcaacaacagcattatccccgaggacacattcttcccaagccccgagagcagctgcgacgtgaagctggtggaaaagagcttcgagacagacaccaacctgaacttccagaacctgagcgtgatcggcttcagaatcctgctgctgaaagtggccggctttaacctgctgatgaccctgcggctgtggtccagc

SEQ ID NO: 2376 - DNA, 2691 bp, Artificial Sequence
  Synthetic Polynucloetide
atggccttaccagtgaccgccttgctcctgccgctggccttgctgctccacgccgccaggccggaagtgcagctggttgaatctggcggaggactggttcagcctggcggatctctgagactgtcttgtgccgccagcggcttcagcttcagcgacttttggatgagctgggtccgacaggcccctggcaaaggacttgaatgggtcgccacaatcagccaggccggcagcgagaaggactacgtggactctgtgaagggcagattcaccatcagccgggacaacgccaagaagtccctgtacctccagatgaacagcctgagagccgaggacaccgccgtgtactattgtgcctctggcgtgtacagcttcgactacagaggccagggcaccctggtcacagtctcttctggtaccggcggaggcggatctggcggcggaggtagcggtggcggaggatctgaattcgacgtcgtgatgacccagagccctctgagcctgcctgtgacactgggacagcctgccagcatctcctgtcggagcagccagagcatcgtgcacagcgacggcaacacctacctggaatggtatcagcagcggccaggccagagccccagacggctgatctacaaggtgtccaacagattcagcggcgtgcccgacagattctccggcagcggctctggcaccgacttcaccctgaagatcagcagagtggaagccgaggacgtgggcgtgtactactgttttcaaggcagccacgccccctggacctttggcggaggaacaaaggtggaaatcaagctcgaggacctgaagaacgtgttcccacctgaggtggccgtgttcgagcctagcgaggccgagatcagccacacccagaaagccaccctcgtgtgcctggctaccggcttctaccccgaccatgtggaactgtcttggtgggtcaacggcaaagaggtgcacagcggcgtgtgtaccgacccccagccactgaaagaacagcccgccctgaacgacagccggtactgcctgagcagcagactgagagtgtccgccaccttctggcagaacccccggaaccacttcagatgccaggtgcagttctacggcctgagcgagaacgacgagtggacccaggacagagccaagcccgtgacccagatcgtgtctgccgaagcctggggcagagccgattgcggctttaccagcgagagctaccagcagggcgtgctgagcgccaccatcctgtacgagatcctgctgggcaaggccaccctgtacgccgtgctggtgtctgccctggtgctgatggctatggtcaagcggaaggacagccggggaagggccaagcgatctggatctggagcaacaaacttctcactactcaaacaagcaggtgacgtggaggagaatcccgggcctactagtatggactggatttggcgcatccttttccttgtcggcgctgctaccggcgcgcattccgggccccagctccagctgcaagagtctggacctggcctggtcaagcctagcgagacactgagcctgacctgtaccgtgtccggcgatagcatcagcagcggcgattactactggggctggatcagacagcctcctggcaaaggactggaatggatcggccacatctactacagcggcgtgacctactacaaccccagcctgaagtccagagtgaccatcagcgtggacaccagccggaaccagttctccctgaagctgtctagcgtgacagccgccgataccgccgtgtactactgcaccagagaggacagcagcaactggcggagtagaggccagggaacactggtcacagttagctctggatccggcggaggcggaagtggaggcggaggatctggcggcggaggctctttcgaagaagtgcaactggtggaatcaggcggcggactggtgcagcctggcggatctctgagactgagctgtgccgccagcggcttcaccttcagcagctacggaatgcactgggtgcgccaggcccctggcaaaggactggaatgggtggcctacatcaccaccagaagcagcaccatctactacgccgacagcgtgaagggccggttcaccatctccagagacaacgccaagaacagcctgtacctccagatgaactccctgcgggccgaggacaccgccgtgtactattgcaccagagagcccctgaccggctactacgctatggactattggggccagggcaccagcgtgaccgtgtctagtacgcgtatccagaaccctgatcctgccgtgtaccagctgcgggatagcaagagcagcgacaagagcgtgtgtctgttcaccgacttcgacagccagaccaacgtgtcccagagcaaggactccgacgtgtacatcaccgataagtgcgtgctggacatgcggagcatggacttcaagagcaactccgccgtggcctggtccaacaagtccgatttcgcctgcgccaacgccttcaacaacagcattatccccgaggacacattcttcccaagccccgagagcagctgcgacgtgaagctggtggaaaagagcttcgagacagacaccaacctgaacttccagaacctgagcgtgatcggcttcagaatcctgctgctgaaagtggccggctttaacctgctgatgaccctgcggctgtggtccagc

SEQ ID NO: 2377 - DNA, 2667 bp, Artificial Sequence
  Synthetic Polynucloetide
atggccttaccagtgaccgccttgctcctgccgctggccttgctgctccacgccgccaggccggaagtgcagctggttgaatctggcggaggactggttcagcctggcggatctctgagactgtcttgtgccgccagcggcttcagcttcagcgacttttggatgagctgggtccgacaggcccctggcaaaggacttgaatgggtcgccacaatcagccaggccggcagcgagaaggactacgtggactctgtgaagggcagattcaccatcagccgggacaacgccaagaagtccctgtacctccagatgaacagcctgagagccgaggacaccgccgtgtactattgtgcctctggcgtgtacagcttcgactacagaggccagggcaccctggtcacagtctcttctggtaccggcggaggcggatctggcggcggaggtagcggtggcggaggatctgaattcgacatccagatgacccagagccccagcagcctgtctgccagcgtgggcgacagagtgaccatcacctgtagagccagccagagcatcagcctgtggctgaactggtatcagcagaagcccggcaaggcccccaagctgctgatctacgccgccagcacactccagagcggcgtgccaagcagattttccggcagcggctccggcaccgacttcaccctgacaatcagctccctccagcccgaggacttcgccacctactactgccagcagtactacaccagcccctacaccttcggccagggcaccaaggtggaaatcaagagactcgaggacctgaagaacgtgttcccacctgaggtggccgtgttcgagcctagcgaggccgagatcagccacacccagaaagccaccctcgtgtgcctggctaccggcttctaccccgaccatgtggaactgtcttggtgggtcaacggcaaagaggtgcacagcggcgtgtgtaccgacccccagccactgaaagaacagcccgccctgaacgacagccggtactgcctgagcagcagactgagagtgtccgccaccttctggcagaacccccggaaccacttcagatgccaggtgcagttctacggcctgagcgagaacgacgagtggacccaggacagagccaagcccgtgacccagatcgtgtctgccgaagcctggggcagagccgattgcggctttaccagcgagagctaccagcagggcgtgctgagcgccaccatcctgtacgagatcctgctgggcaaggccaccctgtacgccgtgctggtgtctgccctggtgctgatggctatggtcaagcggaaggacagccggggaagggccaagcgatctggatctggagcaacaaacttctcactactcaaacaagcaggtgacgtggaggagaatcccgggcctactagtatggactggatttggcgcatccttttccttgtcggcgctgctaccggcgcgcattccgggccccagctccagctgcaagagtctggacctggcctggtcaagcctagcgagacactgagcctgacctgtaccgtgtccggcgatagcatcagcagcggcgattactactggggctggatcagacagcctcctggcaaaggactggaatggatcggccacatctactacagcggcgtgacctactacaaccccagcctgaagtccagagtgaccatcagcgtggacaccagccggaaccagttctccctgaagctgtctagcgtgacagccgccgataccgccgtgtactactgcaccagagaggacagcagcaactggcggagtagaggccagggaacactggtcacagttagctctggatccggcggaggcggaagtggaggcggaggatctggcggcggaggctctttcgaacaggtgcaactgctggaatctggcggcggactggtgcagcctggcggatctctgagactgagctgtgccgccagcggcttcaccttcagcagctacgccatgagctgggtgcgccaggcccctggaaaaggactggaatgggtgtccgtgatccggtccagcggcagcagcacctattacgccgatagcgtgaagggccggttcaccatcagccgggacaacagcaagaacaccctgtacctccagatgaacagcctgcgggccgaggacaccgccgtgtactattgtgctaggggaggcggctacttcgactactggggccagggaacactcgtgaccgtgtcctctacgcgtatccagaaccctgatcctgccgtgtaccagctgcgggatagcaagagcagcgacaagagcgtgtgtctgttcaccgacttcgacagccagaccaacgtgtcccagagcaaggactccgacgtgtacatcaccgataagtgcgtgctggacatgcggagcatggacttcaagagcaactccgccgtggcctggtccaacaagtccgatttcgcctgcgccaacgccttcaacaacagcattatccccgaggacacattcttcccaagccccgagagcagctgcgacgtgaagctggtggaaaagagcttcgagacagacaccaacctgaacttccagaacctgagcgtgatcggcttcagaatcctgctgctgaaagtggccggctttaacctgctgatgaccctgcggctgtggtccagc

SEQ ID NO: 2378 - DNA, 2676 bp, Artificial Sequence
  Synthetic Polynucloetide
atggccttaccagtgaccgccttgctcctgccgctggccttgctgctccacgccgccaggccggaagtgcagctggttgaatctggcggaggactggttcagcctggcggatctctgagactgtcttgtgccgccagcggcttcagcttcagcgacttttggatgagctgggtccgacaggcccctggcaaaggacttgaatgggtcgccacaatcagccaggccggcagcgagaaggactacgtggactctgtgaagggcagattcaccatcagccgggacaacgccaagaagtccctgtacctccagatgaacagcctgagagccgaggacaccgccgtgtactattgtgcctctggcgtgtacagcttcgactacagaggccagggcaccctggtcacagtctcttctggtaccggcggaggcggatctggcggcggaggtagcggtggcggaggatctgaattcgacatccagatgacccagagccccagcagcctgtctgccagcgtgggcgacagagtgaccatcacctgtagagccagccagagcatcagcagctacctgaactggtatcagcagaagcccggcaaggcccccaaactgctgatctacgccgtgtccacactccagagcggcgtgcccagcagattttctggcagcggctccggcaccgacttcaccctgacaatcagctccctccagcccgaggacttcgccacctactactgtcagcagagcggcaccttccctcccaccacatttggacagggcaccaaggtggaaatcaagagactcgaggacctgaagaacgtgttcccacctgaggtggccgtgttcgagcctagcgaggccgagatcagccacacccagaaagccaccctcgtgtgcctggctaccggcttctaccccgaccatgtggaactgtcttggtgggtcaacggcaaagaggtgcacagcggcgtgtgtaccgacccccagccactgaaagaacagcccgccctgaacgacagccggtactgcctgagcagcagactgagagtgtccgccaccttctggcagaacccccggaaccacttcagatgccaggtgcagttctacggcctgagcgagaacgacgagtggacccaggacagagccaagcccgtgacccagatcgtgtctgccgaagcctggggcagagccgattgcggctttaccagcgagagctaccagcagggcgtgctgagcgccaccatcctgtacgagatcctgctgggcaaggccaccctgtacgccgtgctggtgtctgccctggtgctgatggctatggtcaagcggaaggacagccggggaagggccaagcgatctggatctggagcaacaaacttctcactactcaaacaagcaggtgacgtggaggagaatcccgggcctactagtatggactggatttggcgcatccttttccttgtcggcgctgctaccggcgcgcattccgggccccagctccagctgcaagagtctggacctggcctggtcaagcctagcgagacactgagcctgacctgtaccgtgtccggcgatagcatcagcagcggcgattactactggggctggatcagacagcctcctggcaaaggactggaatggatcggccacatctactacagcggcgtgacctactacaaccccagcctgaagtccagagtgaccatcagcgtggacaccagccggaaccagttctccctgaagctgtctagcgtgacagccgccgataccgccgtgtactactgcaccagagaggacagcagcaactggcggagtagaggccagggaacactggtcacagttagctctggatccggcggaggcggaagtggaggcggaggatctggcggcggaggctctttcgaacaggtgcaactgctggaatctggcggcggactggtgcagcctggcggatctctgagactgagctgtgccgccagcggcttcaccttcagcagccacggaatgcactgggtgcgccaggcccctggaaagggactggaatgggtgtccgtgatctccggcagcggcagcaataccggctacgccgatagcgtgaagggccggttcaccatcagccgggacaacagcaagaacaccctgtacctccagatgaacagcctgcgggccgaggacaccgccgtgtactattgtgccagacagtggggcagctacgccttcgattcttggggccagggcaccctcgtgaccgtgtcatctacgcgtatccagaaccctgatcctgccgtgtaccagctgcgggatagcaagagcagcgacaagagcgtgtgtctgttcaccgacttcgacagccagaccaacgtgtcccagagcaaggactccgacgtgtacatcaccgataagtgcgtgctggacatgcggagcatggacttcaagagcaactccgccgtggcctggtccaacaagtccgatttcgcctgcgccaacgccttcaacaacagcattatccccgaggacacattcttcccaagccccgagagcagctgcgacgtgaagctggtggaaaagagcttcgagacagacaccaacctgaacttccagaacctgagcgtgatcggcttcagaatcctgctgctgaaagtggccggctttaacctgctgatgaccctgcggctgtggtccagc

SEQ ID NO: 2379 - DNA, 2706 bp, Artificial Sequence
  Synthetic Polynucloetide
atggccttaccagtgaccgccttgctcctgccgctggccttgctgctccacgccgccaggccggaagtgcagctggttgaatctggcggaggactggttcagcctggcggatctctgagactgtcttgtgccgccagcggcttcagcttcagcgacttttggatgagctgggtccgacaggcccctggcaaaggacttgaatgggtcgccacaatcagccaggccggcagcgagaaggactacgtggactctgtgaagggcagattcaccatcagccgggacaacgccaagaagtccctgtacctccagatgaacagcctgagagccgaggacaccgccgtgtactattgtgcctctggcgtgtacagcttcgactacagaggccagggcaccctggtcacagtctcttctggtaccggcggaggcggatctggcggcggaggtagcggtggcggaggatctgaattcgacatcgtgatgagccagagccctagcagcctggccgtgtccgtgggcgagaaagtgaccatgagctgcaagagcagccagtccctgctgcacagcagcaaccagaagaactacctggcctggtatcagcagaagcccggccagtcccccaaggtgctgatctactgggccagcaccagagaaagcggcgtgcccgatagattcaccggcagcggctctggcaccgacttcaccctgaccatcaccagcgtgaagtccgaggacctggctgtgtactactgccagcagtattacagctacccctggaccttcggcggaggcacccggctggaaatcaaaagactcgaggacctgaagaacgtgttcccacctgaggtggccgtgttcgagcctagcgaggccgagatcagccacacccagaaagccaccctcgtgtgcctggctaccggcttctaccccgaccatgtggaactgtcttggtgggtcaacggcaaagaggtgcacagcggcgtgtgtaccgacccccagccactgaaagaacagcccgccctgaacgacagccggtactgcctgagcagcagactgagagtgtccgccaccttctggcagaacccccggaaccacttcagatgccaggtgcagttctacggcctgagcgagaacgacgagtggacccaggacagagccaagcccgtgacccagatcgtgtctgccgaagcctggggcagagccgattgcggctttaccagcgagagctaccagcagggcgtgctgagcgccaccatcctgtacgagatcctgctgggcaaggccaccctgtacgccgtgctggtgtctgccctggtgctgatggctatggtcaagcggaaggacagccggggaagggccaagcgatctggatctggagcaacaaacttctcactactcaaacaagcaggtgacgtggaggagaatcccgggcctactagtatggactggatttggcgcatccttttccttgtcggcgctgctaccggcgcgcattccgggccccagctccagctgcaagagtctggacctggcctggtcaagcctagcgagacactgagcctgacctgtaccgtgtccggcgatagcatcagcagcggcgattactactggggctggatcagacagcctcctggcaaaggactggaatggatcggccacatctactacagcggcgtgacctactacaaccccagcctgaagtccagagtgaccatcagcgtggacaccagccggaaccagttctccctgaagctgtctagcgtgacagccgccgataccgccgtgtactactgcaccagagaggacagcagcaactggcggagtagaggccagggaacactggtcacagttagctctggatccggcggaggcggaagtggaggcggaggatctggcggcggaggctctttcgaagaagtgcaactccagcagagcgtggccgagcttgtgaagcctggcgcttccgtgaagatgtcctgcaaggtgtccggctacaccctgacagaccacaccatccactggatgaagcagcggcctgagcagggcctggaatggatcggctacatctaccccagggacggcatcaccggctacaacgagaagttcaagggcaaggccacactgaccgccgacaccagcagcagcacagcctacatgcaactgaacagcctgaccagcgaggacagcgccgtgtacttctgtgccagatggggctacagctacagaaactacgcctactactacgactactggggccagggcacaaccctgaccgtgtctagtacgcgtatccagaaccctgatcctgccgtgtaccagctgcgggatagcaagagcagcgacaagagcgtgtgtctgttcaccgacttcgacagccagaccaacgtgtcccagagcaaggactccgacgtgtacatcaccgataagtgcgtgctggacatgcggagcatggacttcaagagcaactccgccgtggcctggtccaacaagtccgatttcgcctgcgccaacgccttcaacaacagcattatccccgaggacacattcttcccaagccccgagagcagctgcgacgtgaagctggtggaaaagagcttcgagacagacaccaacctgaacttccagaacctgagcgtgatcggcttcagaatcctgctgctgaaagtggccggctttaacctgctgatgaccctgcggctgtggtccagc

SEQ ID NO: 2380 - DNA, 2697 bp, Artificial Sequence
  Synthetic Polynucloetide
atggccttaccagtgaccgccttgctcctgccgctggccttgctgctccacgccgccaggccggaagtgcagctggttgaatctggcggaggactggttcagcctggcggatctctgagactgtcttgtgccgccagcggcttcagcttcagcgacttttggatgagctgggtccgacaggcccctggcaaaggacttgaatgggtcgccacaatcagccaggccggcagcgagaaggactacgtggactctgtgaagggcagattcaccatcagccgggacaacgccaagaagtccctgtacctccagatgaacagcctgagagccgaggacaccgccgtgtactattgtgcctctggcgtgtacagcttcgactacagaggccagggcaccctggtcacagtctcttctggtaccggcggaggcggatctggcggcggaggtagcggtggcggaggatctgaattcgagatcgtgctgacacagagccctggcaccctgagcctgtctccaggcgaaagagccacactgagctgtcgggccagccagagcgtgtccagctcttacctggcctggtatcagcagaagcccggccaggctccccggctgctgatctacggaacaagcagcagagccaccggcatccccgacagattttctggcagcggctccggcaccgacttcaccctgacaatcagcagactggaacccgaggacttcgccgtgtactactgccagcagtacggcagcagccccttcacctttggcggaggcaccaaggtggaaatcaagagactcgaggacctgaagaacgtgttcccacctgaggtggccgtgttcgagcctagcgaggccgagatcagccacacccagaaagccaccctcgtgtgcctggctaccggcttctaccccgaccatgtggaactgtcttggtgggtcaacggcaaagaggtgcacagcggcgtgtgtaccgacccccagccactgaaagaacagcccgccctgaacgacagccggtactgcctgagcagcagactgagagtgtccgccaccttctggcagaacccccggaaccacttcagatgccaggtgcagttctacggcctgagcgagaacgacgagtggacccaggacagagccaagcccgtgacccagatcgtgtctgccgaagcctggggcagagccgattgcggctttaccagcgagagctaccagcagggcgtgctgagcgccaccatcctgtacgagatcctgctgggcaaggccaccctgtacgccgtgctggtgtctgccctggtgctgatggctatggtcaagcggaaggacagccggggaagggccaagcgatctggatctggagcaacaaacttctcactactcaaacaagcaggtgacgtggaggagaatcccgggcctactagtatggactggatttggcgcatccttttccttgtcggcgctgctaccggcgcgcattccgggccccagctccagctgcaagagtctggacctggcctggtcaagcctagcgagacactgagcctgacctgtaccgtgtccggcgatagcatcagcagcggcgattactactggggctggatcagacagcctcctggcaaaggactggaatggatcggccacatctactacagcggcgtgacctactacaaccccagcctgaagtccagagtgaccatcagcgtggacaccagccggaaccagttctccctgaagctgtctagcgtgacagccgccgataccgccgtgtactactgcaccagagaggacagcagcaactggcggagtagaggccagggaacactggtcacagttagctctggatccggcggaggcggaagtggaggcggaggatctggcggcggaggctctttcgaacaggtgcaactccaggaatctggccccggactggctaagcccagcgagacactgagcctgacctgtaccgtgtccggcgacagcatcaccagctactactggtcctggatcagacagccccctggcaagggcctggaatggatcggctacatctactacagcggcagcaccaactacaaccccagcctgaagtccagagtgaccatcagcgtggacaccagcaagaaccagttctccctgaagctgagcagcgtgacagccgccgacaccgccgtgtattattgcgccagagatcagcggagaatcgccgctgccggcacccacttttacggcatggatgtgtggggccagggcaccaccgtgaccgtgtcatctacgcgtatccagaaccctgatcctgccgtgtaccagctgcgggatagcaagagcagcgacaagagcgtgtgtctgttcaccgacttcgacagccagaccaacgtgtcccagagcaaggactccgacgtgtacatcaccgataagtgcgtgctggacatgcggagcatggacttcaagagcaactccgccgtggcctggtccaacaagtccgatttcgcctgcgccaacgccttcaacaacagcattatccccgaggacacattcttcccaagccccgagagcagctgcgacgtgaagctggtggaaaagagcttcgagacagacaccaacctgaacttccagaacctgagcgtgatcggcttcagaatcctgctgctgaaagtggccggctttaacctgctgatgaccctgcggctgtggtccagc

SEQ ID NO: 2381 - DNA, 2673 bp, Artificial Sequence
  Synthetic Polynucloetide
atggccttaccagtgaccgccttgctcctgccgctggccttgctgctccacgccgccaggccggaagtgcagctggttgaatctggcggaggactggttcagcctggcggatctctgagactgtcttgtgccgccagcggcttcagcttcagcgacttttggatgagctgggtccgacaggcccctggcaaaggacttgaatgggtcgccacaatcagccaggccggcagcgagaaggactacgtggactctgtgaagggcagattcaccatcagccgggacaacgccaagaagtccctgtacctccagatgaacagcctgagagccgaggacaccgccgtgtactattgtgcctctggcgtgtacagcttcgactacagaggccagggcaccctggtcacagtctcttctggtaccggcggaggcggatctggcggcggaggtagcggtggcggaggatctgaattcgacatcctgctgacccagagccccgtgatcctgtccgtgtctcctggcgagagagtgtccttcagctgtcgggccagccagagcatcggcaccaacatccactggtatcagcagcggaccaacggcagccccagactgctgattaagtacgccagcgagtccatcagcggcatccccagcagattttccggcagcggctccggcaccgacttcaccctgagcatcaacagcgtggaaagcgaggacattgccgactactactgccagcagaacaacaactggcccaccaccttcggagccggcaccaagctggaactgaagctcgaggacctgaagaacgtgttcccacctgaggtggccgtgttcgagcctagcgaggccgagatcagccacacccagaaagccaccctcgtgtgcctggctaccggcttctaccccgaccatgtggaactgtcttggtgggtcaacggcaaagaggtgcacagcggcgtgtgtaccgacccccagccactgaaagaacagcccgccctgaacgacagccggtactgcctgagcagcagactgagagtgtccgccaccttctggcagaacccccggaaccacttcagatgccaggtgcagttctacggcctgagcgagaacgacgagtggacccaggacagagccaagcccgtgacccagatcgtgtctgccgaagcctggggcagagccgattgcggctttaccagcgagagctaccagcagggcgtgctgagcgccaccatcctgtacgagatcctgctgggcaaggccaccctgtacgccgtgctggtgtctgccctggtgctgatggctatggtcaagcggaaggacagccggggaagggccaagcgatctggatctggagcaacaaacttctcactactcaaacaagcaggtgacgtggaggagaatcccgggcctactagtatggactggatttggcgcatccttttccttgtcggcgctgctaccggcgcgcattccgggccccagctccagctgcaagagtctggacctggcctggtcaagcctagcgagacactgagcctgacctgtaccgtgtccggcgatagcatcagcagcggcgattactactggggctggatcagacagcctcctggcaaaggactggaatggatcggccacatctactacagcggcgtgacctactacaaccccagcctgaagtccagagtgaccatcagcgtggacaccagccggaaccagttctccctgaagctgtctagcgtgacagccgccgataccgccgtgtactactgcaccagagaggacagcagcaactggcggagtagaggccagggaacactggtcacagttagctctggatccggcggaggcggaagtggaggcggaggatctggcggcggaggctctttcgaacaggtgcagctgaagcagagcggacctggcctggtgcagcctagccagagcctgtccatcacctgtaccgtgtccggcttcagcctgaccaactacggcgtgcactgggtgcgccagagccctggaaaaggactggaatggctgggagtgatttggagcggcggcaacaccgactacaacacccccttcaccagcagactgtctatcaacaaggacaacagcaagagccaggtgttcttcaagatgaacagcctccagagcaacgacaccgccatctactactgtgctagagccctgacctactatgactacgagttcgcctactggggccagggcacactcgtgacagtgtctgctacgcgtatccagaaccctgatcctgccgtgtaccagctgcgggatagcaagagcagcgacaagagcgtgtgtctgttcaccgacttcgacagccagaccaacgtgtcccagagcaaggactccgacgtgtacatcaccgataagtgcgtgctggacatgcggagcatggacttcaagagcaactccgccgtggcctggtccaacaagtccgatttcgcctgcgccaacgccttcaacaacagcattatccccgaggacacattcttcccaagccccgagagcagctgcgacgtgaagctggtggaaaagagcttcgagacagacaccaacctgaacttccagaacctgagcgtgatcggcttcagaatcctgctgctgaaagtggccggctttaacctgctgatgaccctgcggctgtggtccagc

SEQ ID NO: 2382 - DNA, 2652 bp, Artificial Sequence
  Synthetic Polynucloetide
atggccttaccagtgaccgccttgctcctgccgctggccttgctgctccacgccgccaggccggaagtgcagctggttgaatctggcggaggactggttcagcctggcggatctctgagactgtcttgtgccgccagcggcttcagcttcagcgacttttggatgagctgggtccgacaggcccctggcaaaggacttgaatgggtcgccacaatcagccaggccggcagcgagaaggactacgtggactctgtgaagggcagattcaccatcagccgggacaacgccaagaagtccctgtacctccagatgaacagcctgagagccgaggacaccgccgtgtactattgtgcctctggcgtgtacagcttcgactacagaggccagggcaccctggtcacagtctcttctggtaccggcggaggcggatctggcggcggaggtagcggtggcggaggatctgaattcatgacccagagccccaagttcctgctggtgtctgccggcgacagagtgaccctgacatgcaaggccagccagagcgtgaacaacgacgtgtactggtatcagcaggaacccggccagtcccccaagctgctgatctactgggccagcaccagagaaagcggcgtgcccgatagattcaccggcagcggctctggcaccgacttcaccctgacaatcagcagcgtgcaggccgaggacctggccgtgtactactgcaagcagagctacaacctgtacaccttcggcggaggcaccaagctggaaatcaagagactcgaggacctgaagaacgtgttcccacctgaggtggccgtgttcgagcctagcgaggccgagatcagccacacccagaaagccaccctcgtgtgcctggctaccggcttctaccccgaccatgtggaactgtcttggtgggtcaacggcaaagaggtgcacagcggcgtgtgtaccgacccccagccactgaaagaacagcccgccctgaacgacagccggtactgcctgagcagcagactgagagtgtccgccaccttctggcagaacccccggaaccacttcagatgccaggtgcagttctacggcctgagcgagaacgacgagtggacccaggacagagccaagcccgtgacccagatcgtgtctgccgaagcctggggcagagccgattgcggctttaccagcgagagctaccagcagggcgtgctgagcgccaccatcctgtacgagatcctgctgggcaaggccaccctgtacgccgtgctggtgtctgccctggtgctgatggctatggtcaagcggaaggacagccggggaagggccaagcgatctggatctggagcaacaaacttctcactactcaaacaagcaggtgacgtggaggagaatcccgggcctactagtatggactggatttggcgcatccttttccttgtcggcgctgctaccggcgcgcattccgggccccagctccagctgcaagagtctggacctggcctggtcaagcctagcgagacactgagcctgacctgtaccgtgtccggcgatagcatcagcagcggcgattactactggggctggatcagacagcctcctggcaaaggactggaatggatcggccacatctactacagcggcgtgacctactacaaccccagcctgaagtccagagtgaccatcagcgtggacaccagccggaaccagttctccctgaagctgtctagcgtgacagccgccgataccgccgtgtactactgcaccagagaggacagcagcaactggcggagtagaggccagggaacactggtcacagttagctctggatccggcggaggcggaagtggaggcggaggatctggcggcggaggctctttcgaagaatctggaagaggactggtgcagcctggcggcagcagaaagctgtcttgtgccgccagcggcttcaccttcagcaccagcggaatgcactgggtgcgccaggcccctgagaagggactggaatgggtggcctacatcagctccggcagcaccaccatctaccacgccgataccgtgaagggccggttcaccatcagccgggacaaccccaagaataccctgttcctccagatgaccagcctgcggagcgaggacaccgccatgtactattgctgcgccagaagcggccagttcggcaactacttcgactactggggccagggcaccaccctgaccgtgtcatctacgcgtatccagaaccctgatcctgccgtgtaccagctgcgggatagcaagagcagcgacaagagcgtgtgtctgttcaccgacttcgacagccagaccaacgtgtcccagagcaaggactccgacgtgtacatcaccgataagtgcgtgctggacatgcggagcatggacttcaagagcaactccgccgtggcctggtccaacaagtccgatttcgcctgcgccaacgccttcaacaacagcattatccccgaggacacattcttcccaagccccgagagcagctgcgacgtgaagctggtggaaaagagcttcgagacagacaccaacctgaacttccagaacctgagcgtgatcggcttcagaatcctgctgctgaaagtggccggctttaacctgctgatgaccctgcggctgtggtccagc

SEQ ID NO: 2383 - DNA, 2667 bp, Artificial Sequence
  Synthetic Polynucloetide
atggccttaccagtgaccgccttgctcctgccgctggccttgctgctccacgccgccaggccggaagtgcagctggttgaatctggcggaggactggttcagcctggcggatctctgagactgtcttgtgccgccagcggcttcagcttcagcgacttttggatgagctgggtccgacaggcccctggcaaaggacttgaatgggtcgccacaatcagccaggccggcagcgagaaggactacgtggactctgtgaagggcagattcaccatcagccgggacaacgccaagaagtccctgtacctccagatgaacagcctgagagccgaggacaccgccgtgtactattgtgcctctggcgtgtacagcttcgactacagaggccagggcaccctggtcacagtctcttctggtaccggcggaggcggatctggcggcggaggtagcggtggcggaggatctgaattccagagcccatctagcctggctgtgtctgccggcgagaaagtgaccatgagctgcaagagcagccagagcctgctgaacagccggacccggaagaactacctggcctggtatcagcagaagcccggccagagccccaagctgctgatctactgggccagcaccagagaaagcggcgtgcccgatagattcaccggctctggcagcggcaccgacttcaccctgacaatcagcagcgtgcaggccgaggacctggccgtgtactactgcaagcagagcaacctgtacaccttcggcggaggcaccaagctggaaatcaagctcgaggacctgaagaacgtgttcccacctgaggtggccgtgttcgagcctagcgaggccgagatcagccacacccagaaagccaccctcgtgtgcctggctaccggcttctaccccgaccatgtggaactgtcttggtgggtcaacggcaaagaggtgcacagcggcgtgtgtaccgacccccagccactgaaagaacagcccgccctgaacgacagccggtactgcctgagcagcagactgagagtgtccgccaccttctggcagaacccccggaaccacttcagatgccaggtgcagttctacggcctgagcgagaacgacgagtggacccaggacagagccaagcccgtgacccagatcgtgtctgccgaagcctggggcagagccgattgcggctttaccagcgagagctaccagcagggcgtgctgagcgccaccatcctgtacgagatcctgctgggcaaggccaccctgtacgccgtgctggtgtctgccctggtgctgatggctatggtcaagcggaaggacagccggggaagggccaagcgatctggatctggagcaacaaacttctcactactcaaacaagcaggtgacgtggaggagaatcccgggcctactagtatggactggatttggcgcatccttttccttgtcggcgctgctaccggcgcgcattccgggccccagctccagctgcaagagtctggacctggcctggtcaagcctagcgagacactgagcctgacctgtaccgtgtccggcgatagcatcagcagcggcgattactactggggctggatcagacagcctcctggcaaaggactggaatggatcggccacatctactacagcggcgtgacctactacaaccccagcctgaagtccagagtgaccatcagcgtggacaccagccggaaccagttctccctgaagctgtctagcgtgacagccgccgataccgccgtgtactactgcaccagagaggacagcagcaactggcggagtagaggccagggaacactggtcacagttagctctggatccggcggaggcggaagtggaggcggaggatctggcggcggaggctctttcgaacaggtgcagctggaagagtctggacccgagcttgtgaagcctggggccagcgtgaagctgtcctgtaaagccagcggctacaccttcaccgagtacatcatccactgggtcaagcagcggagcggccagggcctggaatggatcggctggttttaccctggctccggcagcatcaagtacaacgagaagttcaaggacaaggccaccctgaccgccgacaagtccagcagcaccgtgtacatggaactgagcggcctgaccagcgaggacagcgccgtgtatttctgcgccagacacgacggctacagctacttcgactattggggccagggcaccacactgaccgtgtcctctacgcgtatccagaaccctgatcctgccgtgtaccagctgcgggatagcaagagcagcgacaagagcgtgtgtctgttcaccgacttcgacagccagaccaacgtgtcccagagcaaggactccgacgtgtacatcaccgataagtgcgtgctggacatgcggagcatggacttcaagagcaactccgccgtggcctggtccaacaagtccgatttcgcctgcgccaacgccttcaacaacagcattatccccgaggacacattcttcccaagccccgagagcagctgcgacgtgaagctggtggaaaagagcttcgagacagacaccaacctgaacttccagaacctgagcgtgatcggcttcagaatcctgctgctgaaagtggccggctttaacctgctgatgaccctgcggctgtggtccagc

SEQ ID NO: 2384 - DNA, 2676 bp, Artificial Sequence
  Synthetic Polynucloetide
atggccttaccagtgaccgccttgctcctgccgctggccttgctgctccacgccgccaggccggaagtgcagctggttgaatctggcggaggactggttcagcctggcggatctctgagactgtcttgtgccgccagcggcttcagcttcagcgacttttggatgagctgggtccgacaggcccctggcaaaggacttgaatgggtcgccacaatcagccaggccggcagcgagaaggactacgtggactctgtgaagggcagattcaccatcagccgggacaacgccaagaagtccctgtacctccagatgaacagcctgagagccgaggacaccgccgtgtactattgtgcctctggcgtgtacagcttcgactacagaggccagggcaccctggtcacagtctcttctggtaccggcggaggcggatctggcggcggaggtagcggtggcggaggatctgaattcgacatccagatgacccagagccccagcagcctgtctgcctctctgggcgagagagtgtccctgacctgtcgggccacacaggaactgagcggctacctgtcttggctgcagcagaagcccgacggcaccatcaagcggctgatctacgccgccagcaccctggatagcggcgtgcccaagagattcagcggcaacagaagcggcagcgactacagcctgaccatcagctccctggaaagcgaggacttcgccgactactactgcctgcagtacgccatctacccctacaccttcggcggaggcaccaagctggaaatcaagctcgaggacctgaagaacgtgttcccacctgaggtggccgtgttcgagcctagcgaggccgagatcagccacacccagaaagccaccctcgtgtgcctggctaccggcttctaccccgaccatgtggaactgtcttggtgggtcaacggcaaagaggtgcacagcggcgtgtgtaccgacccccagccactgaaagaacagcccgccctgaacgacagccggtactgcctgagcagcagactgagagtgtccgccaccttctggcagaacccccggaaccacttcagatgccaggtgcagttctacggcctgagcgagaacgacgagtggacccaggacagagccaagcccgtgacccagatcgtgtctgccgaagcctggggcagagccgattgcggctttaccagcgagagctaccagcagggcgtgctgagcgccaccatcctgtacgagatcctgctgggcaaggccaccctgtacgccgtgctggtgtctgccctggtgctgatggctatggtcaagcggaaggacagccggggaagggccaagcgatctggatctggagcaacaaacttctcactactcaaacaagcaggtgacgtggaggagaatcccgggcctactagtatggactggatttggcgcatccttttccttgtcggcgctgctaccggcgcgcattccgggccccagctccagctgcaagagtctggacctggcctggtcaagcctagcgagacactgagcctgacctgtaccgtgtccggcgatagcatcagcagcggcgattactactggggctggatcagacagcctcctggcaaaggactggaatggatcggccacatctactacagcggcgtgacctactacaaccccagcctgaagtccagagtgaccatcagcgtggacaccagccggaaccagttctccctgaagctgtctagcgtgacagccgccgataccgccgtgtactactgcaccagagaggacagcagcaactggcggagtagaggccagggaacactggtcacagttagctctggatccggcggaggcggaagtggaggcggaggatctggcggcggaggctctttcgaagaggtgcaactgcagcagtctggccccgagcttgtgaagcctggcgcctccgtgaagatgagctgcaaggccagcggctacacctttaccagctacttcatccactgggtcaagcagaaacccggccagggcctggaatggatcggcttcatcaacccttacaacgacggcagcaagtacaacgagaagttcaagggcaaggccaccctgaccagcgacaagagcagcagcaccgcctacatggaactgtccagcctgacatccgaggacagcgccgtgtactactgcaccagggacgacggctactacggctacgccatggactactggggccagggaacaagcgtcaccgtgtcctctacgcgtatccagaaccctgatcctgccgtgtaccagctgcgggatagcaagagcagcgacaagagcgtgtgtctgttcaccgacttcgacagccagaccaacgtgtcccagagcaaggactccgacgtgtacatcaccgataagtgcgtgctggacatgcggagcatggacttcaagagcaactccgccgtggcctggtccaacaagtccgatttcgcctgcgccaacgccttcaacaacagcattatccccgaggacacattcttcccaagccccgagagcagctgcgacgtgaagctggtggaaaagagcttcgagacagacaccaacctgaacttccagaacctgagcgtgatcggcttcagaatcctgctgctgaaagtggccggctttaacctgctgatgaccctgcggctgtggtccagc

SEQ ID NO: 2385 - DNA, 2691 bp, Artificial Sequence
  Synthetic Polynucloetide
atggccttaccagtgaccgccttgctcctgccgctggccttgctgctccacgccgccaggccggaagtgcagctggttgaatctggcggaggactggttcagcctggcggatctctgagactgtcttgtgccgccagcggcttcagcttcagcgacttttggatgagctgggtccgacaggcccctggcaaaggacttgaatgggtcgccacaatcagccaggccggcagcgagaaggactacgtggactctgtgaagggcagattcaccatcagccgggacaacgccaagaagtccctgtacctccagatgaacagcctgagagccgaggacaccgccgtgtactattgtgcctctggcgtgtacagcttcgactacagaggccagggcaccctggtcacagtctcttctggtaccggcggaggcggatctggcggcggaggtagcggtggcggaggatctgaattcgacaccatcgtgctgacacagagccctgcttccctggccgtgtccctgggacagagagccaccatctcttgcagagccagcgagagcgtggacagctacggcaacagcttcatgcactggtatcagcagaagcccggccagccccccaagctgctgatctacctggcctccaacctggaaagcggcgtgcccgccagattttctggcagcggcagcagaaccgacttcaccctgaccatcgaccccgtggaagccgatgatgccgccacctactactgccagcagaacaactacgacccctggaccttcggcggaggcaccaagctggaaatcaagctcgaggacctgaagaacgtgttcccacctgaggtggccgtgttcgagcctagcgaggccgagatcagccacacccagaaagccaccctcgtgtgcctggctaccggcttctaccccgaccatgtggaactgtcttggtgggtcaacggcaaagaggtgcacagcggcgtgtgtaccgacccccagccactgaaagaacagcccgccctgaacgacagccggtactgcctgagcagcagactgagagtgtccgccaccttctggcagaacccccggaaccacttcagatgccaggtgcagttctacggcctgagcgagaacgacgagtggacccaggacagagccaagcccgtgacccagatcgtgtctgccgaagcctggggcagagccgattgcggctttaccagcgagagctaccagcagggcgtgctgagcgccaccatcctgtacgagatcctgctgggcaaggccaccctgtacgccgtgctggtgtctgccctggtgctgatggctatggtcaagcggaaggacagccggggaagggccaagcgatctggatctggagcaacaaacttctcactactcaaacaagcaggtgacgtggaggagaatcccgggcctactagtatggactggatttggcgcatccttttccttgtcggcgctgctaccggcgcgcattccgggccccagctccagctgcaagagtctggacctggcctggtcaagcctagcgagacactgagcctgacctgtaccgtgtccggcgatagcatcagcagcggcgattactactggggctggatcagacagcctcctggcaaaggactggaatggatcggccacatctactacagcggcgtgacctactacaaccccagcctgaagtccagagtgaccatcagcgtggacaccagccggaaccagttctccctgaagctgtctagcgtgacagccgccgataccgccgtgtactactgcaccagagaggacagcagcaactggcggagtagaggccagggaacactggtcacagttagctctggatccggcggaggcggaagtggaggcggaggatctggcggcggaggctctttcgaagaagtgcaactccagcagagcggccctgagcttgtgaagcctggcgcttccgtgaagatgagctgcaaggccagcggctacaccttcaccagctacgtgatgcactgggtcaagcagaaacctggacagggcctggaatggatcggctacatcaacccctacaacgacggcaccaagtacaacgagaagttcaagggcaaggccaccctgacaagcgacaccagcagcagcaccgcctacatggaactgaacagcctgaccagcgaggacagcgccgtgtacttctgcgccagacccatctacttcgacaacgactacttcgattactggggccagggcaccaccctgaaggtgtcctctacgcgtatccagaaccctgatcctgccgtgtaccagctgcgggatagcaagagcagcgacaagagcgtgtgtctgttcaccgacttcgacagccagaccaacgtgtcccagagcaaggactccgacgtgtacatcaccgataagtgcgtgctggacatgcggagcatggacttcaagagcaactccgccgtggcctggtccaacaagtccgatttcgcctgcgccaacgccttcaacaacagcattatccccgaggacacattcttcccaagccccgagagcagctgcgacgtgaagctggtggaaaagagcttcgagacagacaccaacctgaacttccagaacctgagcgtgatcggcttcagaatcctgctgctgaaagtggccggctttaacctgctgatgaccctgcggctgtggtccagc

SEQ ID NO: 2386 - DNA, 2676 bp, Artificial Sequence
  Synthetic Polynucloetide
atggccttaccagtgaccgccttgctcctgccgctggccttgctgctccacgccgccaggccggaagtgcagctggttgaatctggcggaggactggttcagcctggcggatctctgagactgtcttgtgccgccagcggcttcagcttcagcgacttttggatgagctgggtccgacaggcccctggcaaaggacttgaatgggtcgccacaatcagccaggccggcagcgagaaggactacgtggactctgtgaagggcagattcaccatcagccgggacaacgccaagaagtccctgtacctccagatgaacagcctgagagccgaggacaccgccgtgtactattgtgcctctggcgtgtacagcttcgactacagaggccagggcaccctggtcacagtctcttctggtaccggcggaggcggatctggcggcggaggtagcggtggcggaggatctgaattcgacatccagatgacccagagccccagcagcctgtctgccagcgtgggcgacagagtgaccatcacatgcaaggccagccaggacgtgggaatcgccgtggcctggtatcagcagaaacccggcaaggtgcccaagctgctgatctactgggccagcaccagacacaccggcgtgcccgatagattttccggcagcggctccggcaccgacttcaccctgacaatcagctccctccagcccgaggacgtggcaacctactactgccagcagtacagcagctacccctacaccttcggccagggcaccaaggtggaaatcaagagactcgaggacctgaagaacgtgttcccacctgaggtggccgtgttcgagcctagcgaggccgagatcagccacacccagaaagccaccctcgtgtgcctggctaccggcttctaccccgaccatgtggaactgtcttggtgggtcaacggcaaagaggtgcacagcggcgtgtgtaccgacccccagccactgaaagaacagcccgccctgaacgacagccggtactgcctgagcagcagactgagagtgtccgccaccttctggcagaacccccggaaccacttcagatgccaggtgcagttctacggcctgagcgagaacgacgagtggacccaggacagagccaagcccgtgacccagatcgtgtctgccgaagcctggggcagagccgattgcggctttaccagcgagagctaccagcagggcgtgctgagcgccaccatcctgtacgagatcctgctgggcaaggccaccctgtacgccgtgctggtgtctgccctggtgctgatggctatggtcaagcggaaggacagccggggaagggccaagcgatctggatctggagcaacaaacttctcactactcaaacaagcaggtgacgtggaggagaatcccgggcctactagtatggactggatttggcgcatccttttccttgtcggcgctgctaccggcgcgcattccgggccccagctccagctgcaagagtctggacctggcctggtcaagcctagcgagacactgagcctgacctgtaccgtgtccggcgatagcatcagcagcggcgattactactggggctggatcagacagcctcctggcaaaggactggaatggatcggccacatctactacagcggcgtgacctactacaaccccagcctgaagtccagagtgaccatcagcgtggacaccagccggaaccagttctccctgaagctgtctagcgtgacagccgccgataccgccgtgtactactgcaccagagaggacagcagcaactggcggagtagaggccagggaacactggtcacagttagctctggatccggcggaggcggaagtggaggcggaggatctggcggcggaggctctttcgaagaagtgcaactggtggaatcaggcggcggactggtgcagcctggcggatctctgagactgagctgtgccgccagcggcttcgacttcagccggtactggatgagctgggtgcgccaggcccctggcaaaggactggaatggatcggcgagatcaaccccgacagcagcaccatcaactacgcccccagcctgaaggacaagttcatcatcagccgggacaacgccaagaacagcctgtacctccagatgaactccctgcgggccgaggacaccgccgtgtactattgcgccagacccgacggcaactactggtacttcgacgtgtggggccagggaaccctcgtgaccgtgtcatctacgcgtatccagaaccctgatcctgccgtgtaccagctgcgggatagcaagagcagcgacaagagcgtgtgtctgttcaccgacttcgacagccagaccaacgtgtcccagagcaaggactccgacgtgtacatcaccgataagtgcgtgctggacatgcggagcatggacttcaagagcaactccgccgtggcctggtccaacaagtccgatttcgcctgcgccaacgccttcaacaacagcattatccccgaggacacattcttcccaagccccgagagcagctgcgacgtgaagctggtggaaaagagcttcgagacagacaccaacctgaacttccagaacctgagcgtgatcggcttcagaatcctgctgctgaaagtggccggctttaacctgctgatgaccctgcggctgtggtccagc

SEQ ID NO: 2387 - DNA, 2676 bp, Artificial Sequence
  Synthetic Polynucloetide
atggccttaccagtgaccgccttgctcctgccgctggccttgctgctccacgccgccaggccggaagtgcagctggttgaatctggcggaggactggttcagcctggcggatctctgagactgtcttgtgccgccagcggcttcagcttcagcgacttttggatgagctgggtccgacaggcccctggcaaaggacttgaatgggtcgccacaatcagccaggccggcagcgagaaggactacgtggactctgtgaagggcagattcaccatcagccgggacaacgccaagaagtccctgtacctccagatgaacagcctgagagccgaggacaccgccgtgtactattgtgcctctggcgtgtacagcttcgactacagaggccagggcaccctggtcacagtctcttctggtaccggcggaggcggatctggcggcggaggtagcggtggcggaggatctgaattcgacatcgtgatgacccagagccagaagagcatgagcaccagcgtgggcgacagagtgagcatcacctgcaaggccagccaggacgtgatcaccggcgtggcctggtaccagcagaagcccggccagagccccaagctgctgatctacagcgccagctacagatacaccggcgtgcccgacagattcaccggcagcggcagcggcaccgacttcaccttcaccatcagcaacgtgcaggccgaggacctggccgtgtactactgccagcagcactacagcacccccctgaccttcggcgccggcaccaagctggagctgaagctcgaggacctgaagaacgtgttcccacctgaggtggccgtgttcgagcctagcgaggccgagatcagccacacccagaaagccaccctcgtgtgcctggctaccggcttctaccccgaccatgtggaactgtcttggtgggtcaacggcaaagaggtgcacagcggcgtgtgtaccgacccccagccactgaaagaacagcccgccctgaacgacagccggtactgcctgagcagcagactgagagtgtccgccaccttctggcagaacccccggaaccacttcagatgccaggtgcagttctacggcctgagcgagaacgacgagtggacccaggacagagccaagcccgtgacccagatcgtgtctgccgaagcctggggcagagccgattgcggctttaccagcgagagctaccagcagggcgtgctgagcgccaccatcctgtacgagatcctgctgggcaaggccaccctgtacgccgtgctggtgtctgccctggtgctgatggctatggtcaagcggaaggacagccggggaagggccaagcgatctggatctggagcaacaaacttctcactactcaaacaagcaggtgacgtggaggagaatcccgggcctactagtatggactggatttggcgcatccttttccttgtcggcgctgctaccggcgcgcattccgggccccagctccagctgcaagagtctggacctggcctggtcaagcctagcgagacactgagcctgacctgtaccgtgtccggcgatagcatcagcagcggcgattactactggggctggatcagacagcctcctggcaaaggactggaatggatcggccacatctactacagcggcgtgacctactacaaccccagcctgaagtccagagtgaccatcagcgtggacaccagccggaaccagttctccctgaagctgtctagcgtgacagccgccgataccgccgtgtactactgcaccagagaggacagcagcaactggcggagtagaggccagggaacactggtcacagttagctctggatccggcggaggcggaagtggaggcggaggatctggcggcggaggctctttcgaacaggtgcagctgcagcagcccggcgccgagctggtgagacccggcgccagcgtgaagctgagctgcaaggccagcggctacagcttcaccacctactggatgaactgggtgaagcagagacccggccagggcctggagtggatcggcatgatccaccccagcgacagcgagaccagactgaaccagaagttcaaggacaaggccaccctgaccgtggacaagagcagcagcaccgcctacatgcagctgagcagccccaccagcgaggacagcgccgtgtactactgcgccagaagcaccatgatcgccaccagagccatggactactggggccagggcaccagcgtgaccgtgagcagcacgcgtatccagaaccctgatcctgccgtgtaccagctgcgggatagcaagagcagcgacaagagcgtgtgtctgttcaccgacttcgacagccagaccaacgtgtcccagagcaaggactccgacgtgtacatcaccgataagtgcgtgctggacatgcggagcatggacttcaagagcaactccgccgtggcctggtccaacaagtccgatttcgcctgcgccaacgccttcaacaacagcattatccccgaggacacattcttcccaagccccgagagcagctgcgacgtgaagctggtggaaaagagcttcgagacagacaccaacctgaacttccagaacctgagcgtgatcggcttcagaatcctgctgctgaaagtggccggctttaacctgctgatgaccctgcggctgtggtccagc

SEQ ID NO: 2388 - DNA, 2694 bp, Artificial Sequence
  Synthetic Polynucloetide
atggccttaccagtgaccgccttgctcctgccgctggccttgctgctccacgccgccaggccggaagtgcagctggttgaatctggcggaggactggttcagcctggcggatctctgagactgtcttgtgccgccagcggcttcagcttcagcgacttttggatgagctgggtccgacaggcccctggcaaaggacttgaatgggtcgccacaatcagccaggccggcagcgagaaggactacgtggactctgtgaagggcagattcaccatcagccgggacaacgccaagaagtccctgtacctccagatgaacagcctgagagccgaggacaccgccgtgtactattgtgcctctggcgtgtacagcttcgactacagaggccagggcaccctggtcacagtctcttctggtaccggcggaggcggatctggcggcggaggtagcggtggcggaggatctgaattccagagcgtgctgacacagcctccatccgtgtctggcgctccaggccagagagtgaccatctcctgtaccggcagcggcagcaacatcggagccccctacgacgtgtcctggtatcagcaactgcctggcaccgcccccaagctgctgatctaccacaacaacaagcggcccagcggcgtgcccgatagattcagcggctctaagagcggcaccagcgccagcctggctatcactggactccaggccgaggacgaggccgactactactgtgccacagtggaagccggcctgagcggctctgtgtttggcggcggaacaaagctgaccgtgctgggagctctcgaggacctgaagaacgtgttcccacctgaggtggccgtgttcgagcctagcgaggccgagatcagccacacccagaaagccaccctcgtgtgcctggctaccggcttctaccccgaccatgtggaactgtcttggtgggtcaacggcaaagaggtgcacagcggcgtgtgtaccgacccccagccactgaaagaacagcccgccctgaacgacagccggtactgcctgagcagcagactgagagtgtccgccaccttctggcagaacccccggaaccacttcagatgccaggtgcagttctacggcctgagcgagaacgacgagtggacccaggacagagccaagcccgtgacccagatcgtgtctgccgaagcctggggcagagccgattgcggctttaccagcgagagctaccagcagggcgtgctgagcgccaccatcctgtacgagatcctgctgggcaaggccaccctgtacgccgtgctggtgtctgccctggtgctgatggctatggtcaagcggaaggacagccggggaagggccaagcgatctggatctggagcaacaaacttctcactactcaaacaagcaggtgacgtggaggagaatcccgggcctactagtatggactggatttggcgcatccttttccttgtcggcgctgctaccggcgcgcattccgggccccagctccagctgcaagagtctggacctggcctggtcaagcctagcgagacactgagcctgacctgtaccgtgtccggcgatagcatcagcagcggcgattactactggggctggatcagacagcctcctggcaaaggactggaatggatcggccacatctactacagcggcgtgacctactacaaccccagcctgaagtccagagtgaccatcagcgtggacaccagccggaaccagttctccctgaagctgtctagcgtgacagccgccgataccgccgtgtactactgcaccagagaggacagcagcaactggcggagtagaggccagggaacactggtcacagttagctctggatccggcggaggcggaagtggaggcggaggatctggcggcggaggctctttcgaacaggtgcaactggtgcagagcggagccgaagtgaagaaacctggggccagcgtgaaggtgtcctgcaaggtgtccggctacaccctgaccgagctgagcattcactgggtgcgccaggcccctggcaagggactggaatggatgggcggcttcgaccccgaagagaacgagatcgtgtacgcccagcggttccagggcagagtgacaatgaccgaggacaccagcaccgacaccgcctacatggaactgagcagcctgcggagcgaggataccgccgtgtactactgcgccatcgtgggcagcttcagccctctgacactgggcctgtggggccagggaactatggtcaccgtgtccagcacgcgtatccagaaccctgatcctgccgtgtaccagctgcgggatagcaagagcagcgacaagagcgtgtgtctgttcaccgacttcgacagccagaccaacgtgtcccagagcaaggactccgacgtgtacatcaccgataagtgcgtgctggacatgcggagcatggacttcaagagcaactccgccgtggcctggtccaacaagtccgatttcgcctgcgccaacgccttcaacaacagcattatccccgaggacacattcttcccaagccccgagagcagctgcgacgtgaagctggtggaaaagagcttcgagacagacaccaacctgaacttccagaacctgagcgtgatcggcttcagaatcctgctgctgaaagtggccggctttaacctgctgatgaccctgcggctgtggtccagc

SEQ ID NO: 2389 - DNA, 2694 bp, Artificial Sequence
  Synthetic Polynucloetide
atggccttaccagtgaccgccttgctcctgccgctggccttgctgctccacgccgccaggccggaagtgcagctggttgaatctggcggaggactggttcagcctggcggatctctgagactgtcttgtgccgccagcggcttcagcttcagcgacttttggatgagctgggtccgacaggcccctggcaaaggacttgaatgggtcgccacaatcagccaggccggcagcgagaaggactacgtggactctgtgaagggcagattcaccatcagccgggacaacgccaagaagtccctgtacctccagatgaacagcctgagagccgaggacaccgccgtgtactattgtgcctctggcgtgtacagcttcgactacagaggccagggcaccctggtcacagtctcttctggtaccggcggaggcggatctggcggcggaggtagcggtggcggaggatctgaattccagagcgtgctgacacagcctccatccgtgtctggcgctccaggccagagagtgaccatctcctgtaccggcagcggcagcaacatcggagccccctacgacgtgtcctggtatcagcaactgcctggcaccgcccccaagctgctgatctaccacaacaacaagcggcccagcggcgtgcccgatagattcagcggctctaagagcggcaccagcgccagcctggctatcactggactccaggccgaggacgaggccgactactactgccagagctacgacagcagcagcatcagcaccatcttcggcggaggcaccaagctgacagtgctgggagctctcgaggacctgaagaacgtgttcccacctgaggtggccgtgttcgagcctagcgaggccgagatcagccacacccagaaagccaccctcgtgtgcctggctaccggcttctaccccgaccatgtggaactgtcttggtgggtcaacggcaaagaggtgcacagcggcgtgtgtaccgacccccagccactgaaagaacagcccgccctgaacgacagccggtactgcctgagcagcagactgagagtgtccgccaccttctggcagaacccccggaaccacttcagatgccaggtgcagttctacggcctgagcgagaacgacgagtggacccaggacagagccaagcccgtgacccagatcgtgtctgccgaagcctggggcagagccgattgcggctttaccagcgagagctaccagcagggcgtgctgagcgccaccatcctgtacgagatcctgctgggcaaggccaccctgtacgccgtgctggtgtctgccctggtgctgatggctatggtcaagcggaaggacagccggggaagggccaagcgatctggatctggagcaacaaacttctcactactcaaacaagcaggtgacgtggaggagaatcccgggcctactagtatggactggatttggcgcatccttttccttgtcggcgctgctaccggcgcgcattccgggccccagctccagctgcaagagtctggacctggcctggtcaagcctagcgagacactgagcctgacctgtaccgtgtccggcgatagcatcagcagcggcgattactactggggctggatcagacagcctcctggcaaaggactggaatggatcggccacatctactacagcggcgtgacctactacaaccccagcctgaagtccagagtgaccatcagcgtggacaccagccggaaccagttctccctgaagctgtctagcgtgacagccgccgataccgccgtgtactactgcaccagagaggacagcagcaactggcggagtagaggccagggaacactggtcacagttagctctggatccggcggaggcggaagtggaggcggaggatctggcggcggaggctctttcgaacaggtgcaactggtgcagagcggagccgaagtgaagaaacctggggccagcgtgaaggtgtcctgcaaggtgtccggctacaccctgaccgagctgagcattcactgggtgcgccaggcccctggcaagggactggaatggatgggcggcttcgaccccgaagagaacgagatcgtgtacgcccagcggttccagggcagagtgacaatgaccgaggacaccagcaccgacaccgcctacatggaactgagcagcctgcggagcgaggataccgccgtgtactactgtgccatcgtgggcagcttcagcggaatcgcctacagaccttggggccagggcacaatggtcaccgtgtctagcacgcgtatccagaaccctgatcctgccgtgtaccagctgcgggatagcaagagcagcgacaagagcgtgtgtctgttcaccgacttcgacagccagaccaacgtgtcccagagcaaggactccgacgtgtacatcaccgataagtgcgtgctggacatgcggagcatggacttcaagagcaactccgccgtggcctggtccaacaagtccgatttcgcctgcgccaacgccttcaacaacagcattatccccgaggacacattcttcccaagccccgagagcagctgcgacgtgaagctggtggaaaagagcttcgagacagacaccaacctgaacttccagaacctgagcgtgatcggcttcagaatcctgctgctgaaagtggccggctttaacctgctgatgaccctgcggctgtggtccagc

SEQ ID NO: 2390 - DNA, 2658 bp, Artificial Sequence
  Synthetic Polynucloetide
atggccttaccagtgaccgccttgctcctgccgctggccttgctgctccacgccgccaggccggaagtgcagctggttgaatctggcggaggactggttcagcctggcggatctctgagactgtcttgtgccgccagcggcttcagcttcagcgacttttggatgagctgggtccgacaggcccctggcaaaggacttgaatgggtcgccacaatcagccaggccggcagcgagaaggactacgtggactctgtgaagggcagattcaccatcagccgggacaacgccaagaagtccctgtacctccagatgaacagcctgagagccgaggacaccgccgtgtactattgtgcctctggcgtgtacagcttcgactacagaggccagggcaccctggtcacagtctcttctggtaccggcggaggcggatctggcggcggaggtagcggtggcggaggatctgaattcgacatccagatgacccagagccccagcagcctgtctgccagcgtgggcgacagagtgaccatcacctgtagagccagccagggcatcagaaacaacctggcctggtatcagcagaagcccggcaaggcccccaagcggctgatctacgccgccagcaatctccagagcggcgtgcccagcagattcacaggctctggcagcggcaccgagttcaccctgatcgtgtctagcctccagcccgaggacttcgccacctactactgcctccagcaccacagctaccccctgacatctggcggaggcaccaaggtggaactcgaggacctgaagaacgtgttcccacctgaggtggccgtgttcgagcctagcgaggccgagatcagccacacccagaaagccaccctcgtgtgcctggctaccggcttctaccccgaccatgtggaactgtcttggtgggtcaacggcaaagaggtgcacagcggcgtgtgtaccgacccccagccactgaaagaacagcccgccctgaacgacagccggtactgcctgagcagcagactgagagtgtccgccaccttctggcagaacccccggaaccacttcagatgccaggtgcagttctacggcctgagcgagaacgacgagtggacccaggacagagccaagcccgtgacccagatcgtgtctgccgaagcctggggcagagccgattgcggctttaccagcgagagctaccagcagggcgtgctgagcgccaccatcctgtacgagatcctgctgggcaaggccaccctgtacgccgtgctggtgtctgccctggtgctgatggctatggtcaagcggaaggacagccggggaagggccaagcgatctggatctggagcaacaaacttctcactactcaaacaagcaggtgacgtggaggagaatcccgggcctactagtatggactggatttggcgcatccttttccttgtcggcgctgctaccggcgcgcattccgggccccagctccagctgcaagagtctggacctggcctggtcaagcctagcgagacactgagcctgacctgtaccgtgtccggcgatagcatcagcagcggcgattactactggggctggatcagacagcctcctggcaaaggactggaatggatcggccacatctactacagcggcgtgacctactacaaccccagcctgaagtccagagtgaccatcagcgtggacaccagccggaaccagttctccctgaagctgtctagcgtgacagccgccgataccgccgtgtactactgcaccagagaggacagcagcaactggcggagtagaggccagggaacactggtcacagttagctctggatccggcggaggcggaagtggaggcggaggatctggcggcggaggctctttcgaagaggtgcaggtgctggaaagtggcggaggactggtgcagcctggcggctctctgagactgtcttgtgccgccagcggcttcaccttcagcagctacgccatgagctgggtgcgccaggcccctggaaaaggactggaatgggtgtccgccatcagcggctctggcgggtctaccaactacgccgatagcgtgaagggccggttcaccatcagccgggacaacagcaagaacaccctgtacctccagatgaacagcctgcgggccgaggacaccgccgtgtattattgtgccggcagcagcgggtggagcgagtattggggacagggcaccctcgtgaccgtgtcctctacgcgtatccagaaccctgatcctgccgtgtaccagctgcgggatagcaagagcagcgacaagagcgtgtgtctgttcaccgacttcgacagccagaccaacgtgtcccagagcaaggactccgacgtgtacatcaccgataagtgcgtgctggacatgcggagcatggacttcaagagcaactccgccgtggcctggtccaacaagtccgatttcgcctgcgccaacgccttcaacaacagcattatccccgaggacacattcttcccaagccccgagagcagctgcgacgtgaagctggtggaaaagagcttcgagacagacaccaacctgaacttccagaacctgagcgtgatcggcttcagaatcctgctgctgaaagtggccggctttaacctgctgatgaccctgcggctgtggtccagc

SEQ ID NO: 2391 - DNA, 2676 bp, Artificial Sequence
  Synthetic Polynucloetide
atggccttaccagtgaccgccttgctcctgccgctggccttgctgctccacgccgccaggccggaagtgcagctggttgaatctggcggaggactggttcagcctggcggatctctgagactgtcttgtgccgccagcggcttcagcttcagcgacttttggatgagctgggtccgacaggcccctggcaaaggacttgaatgggtcgccacaatcagccaggccggcagcgagaaggactacgtggactctgtgaagggcagattcaccatcagccgggacaacgccaagaagtccctgtacctccagatgaacagcctgagagccgaggacaccgccgtgtactattgtgcctctggcgtgtacagcttcgactacagaggccagggcaccctggtcacagtctcttctggtaccggcggaggcggatctggcggcggaggtagcggtggcggaggatctgaattcgacgagatccagctggtgcagagcggagccgaagtgaagaagcctggcgagagcctgcggatcagctgcaagggcagcggcttcaacatcgaggactactacatccactgggtgcgccagatgcccggcaagggcctggaatggatgggcagaatcgaccccgagaacgacgagactaagtacggccccatcttccagggccacgtgaccatcagcgccgacaccagcatcaacaccgtgtacctccagtggtccagcctgaaggccagcgacaccgccatgtactactgcgcctttagaggcggcgtgtactggggccagggcaccacagtgacagtgtctagcctcgaggacctgaagaacgtgttcccacctgaggtggccgtgttcgagcctagcgaggccgagatcagccacacccagaaagccaccctcgtgtgcctggctaccggcttctaccccgaccatgtggaactgtcttggtgggtcaacggcaaagaggtgcacagcggcgtgtgtaccgacccccagccactgaaagaacagcccgccctgaacgacagccggtactgcctgagcagcagactgagagtgtccgccaccttctggcagaacccccggaaccacttcagatgccaggtgcagttctacggcctgagcgagaacgacgagtggacccaggacagagccaagcccgtgacccagatcgtgtctgccgaagcctggggcagagccgattgcggctttaccagcgagagctaccagcagggcgtgctgagcgccaccatcctgtacgagatcctgctgggcaaggccaccctgtacgccgtgctggtgtctgccctggtgctgatggctatggtcaagcggaaggacagccggggaagggccaagcgatctggatctggagcaacaaacttctcactactcaaacaagcaggtgacgtggaggagaatcccgggcctactagtatggactggatttggcgcatccttttccttgtcggcgctgctaccggcgcgcattccgggccccagctccagctgcaagagtctggacctggcctggtcaagcctagcgagacactgagcctgacctgtaccgtgtccggcgatagcatcagcagcggcgattactactggggctggatcagacagcctcctggcaaaggactggaatggatcggccacatctactacagcggcgtgacctactacaaccccagcctgaagtccagagtgaccatcagcgtggacaccagccggaaccagttctccctgaagctgtctagcgtgacagccgccgataccgccgtgtactactgcaccagagaggacagcagcaactggcggagtagaggccagggaacactggtcacagttagctctggatccggcggaggcggaagtggaggcggaggatctggcggcggaggctctttcgaagatgtcgtgatgacccagagccccgacagcctggctgtgtctctgggagagagagccaccatcaactgcaagtccagccagtccctgctggacagcgacggcaagacctacctgaactggctccagcagaagcccggccagccccccaagagactgatctccctggtgtccaagctggactccggcgtgcccgatagattttccggctctggcagcggcaccgacttcaccctgacaatcagctcccttcaggccgaggacgtggccgtgtactattgctggcagggcacacacttccccggcacctttggcggaggcaccaaggtggaaatcaagacgcgtatccagaaccctgatcctgccgtgtaccagctgcgggatagcaagagcagcgacaagagcgtgtgtctgttcaccgacttcgacagccagaccaacgtgtcccagagcaaggactccgacgtgtacatcaccgataagtgcgtgctggacatgcggagcatggacttcaagagcaactccgccgtggcctggtccaacaagtccgatttcgcctgcgccaacgccttcaacaacagcattatccccgaggacacattcttcccaagccccgagagcagctgcgacgtgaagctggtggaaaagagcttcgagacagacaccaacctgaacttccagaacctgagcgtgatcggcttcagaatcctgctgctgaaagtggccggctttaacctgctgatgaccctgcggctgtggtccagc

SEQ ID NO: 2392 - DNA, 2697 bp, Artificial Sequence
  Synthetic Polynucloetide
atggccttaccagtgaccgccttgctcctgccgctggccttgctgctccacgccgccaggccggaagtgcagctggttgaatctggcggaggactggttcagcctggcggatctctgagactgtcttgtgccgccagcggcttcagcttcagcgacttttggatgagctgggtccgacaggcccctggcaaaggacttgaatgggtcgccacaatcagccaggccggcagcgagaaggactacgtggactctgtgaagggcagattcaccatcagccgggacaacgccaagaagtccctgtacctccagatgaacagcctgagagccgaggacaccgccgtgtactattgtgcctctggcgtgtacagcttcgactacagaggccagggcaccctggtcacagtctcttctggtaccggcggaggcggatctggcggcggaggtagcggtggcggaggatctgaattcgacgagcttgtgatgacccagagccccagcagcctgacagtgacagccggcgagaaagtgaccatgagctgcaagagcagccagagcctgctgaacagcggcaaccagaagaactacctgacctggtatcagcagaagcccggccagccccccaagctgctgatctactgggccagcaccagagaaagcggcgtgcccgatagattcaccggctctggcagcggcaccgacttcaccctgacaatcagcagcgtgcaggccgaggacctggccgtgtactactgccagaacgactacagctaccccctgaccttcggagccggcaccaagctggaaatcaagctcgaggacctgaagaacgtgttcccacctgaggtggccgtgttcgagcctagcgaggccgagatcagccacacccagaaagccaccctcgtgtgcctggctaccggcttctaccccgaccatgtggaactgtcttggtgggtcaacggcaaagaggtgcacagcggcgtgtgtaccgacccccagccactgaaagaacagcccgccctgaacgacagccggtactgcctgagcagcagactgagagtgtccgccaccttctggcagaacccccggaaccacttcagatgccaggtgcagttctacggcctgagcgagaacgacgagtggacccaggacagagccaagcccgtgacccagatcgtgtctgccgaagcctggggcagagccgattgcggctttaccagcgagagctaccagcagggcgtgctgagcgccaccatcctgtacgagatcctgctgggcaaggccaccctgtacgccgtgctggtgtctgccctggtgctgatggctatggtcaagcggaaggacagccggggaagggccaagcgatctggatctggagcaacaaacttctcactactcaaacaagcaggtgacgtggaggagaatcccgggcctactagtatggactggatttggcgcatccttttccttgtcggcgctgctaccggcgcgcattccgggccccagctccagctgcaagagtctggacctggcctggtcaagcctagcgagacactgagcctgacctgtaccgtgtccggcgatagcatcagcagcggcgattactactggggctggatcagacagcctcctggcaaaggactggaatggatcggccacatctactacagcggcgtgacctactacaaccccagcctgaagtccagagtgaccatcagcgtggacaccagccggaaccagttctccctgaagctgtctagcgtgacagccgccgataccgccgtgtactactgcaccagagaggacagcagcaactggcggagtagaggccagggaacactggtcacagttagctctggatccggcggaggcggaagtggaggcggaggatctggcggcggaggctctttcgaagaagtgcagctgctggaacagtctggcgccgaacttgtgcggcctggcaccagcgtgaagatcagctgtaaagccagcggctacgccttcaccaactactggctgggctgggtcaagcagaggcctggacacggcctggaatggatcggcgacatctttcccggctccggcaacatccactacaacgagaagttcaagggcaaggccaccctgaccgccgacaagtctagcagcaccgcctacatgcagctgtccagcctgacctttgaggacagcgccgtgtatttctgtgcccggctgcggaactgggacgagcccatggattattggggccagggcaccaccgtgaccgtgtctagtacgcgtatccagaaccctgatcctgccgtgtaccagctgcgggatagcaagagcagcgacaagagcgtgtgtctgttcaccgacttcgacagccagaccaacgtgtcccagagcaaggactccgacgtgtacatcaccgataagtgcgtgctggacatgcggagcatggacttcaagagcaactccgccgtggcctggtccaacaagtccgatttcgcctgcgccaacgccttcaacaacagcattatccccgaggacacattcttcccaagccccgagagcagctgcgacgtgaagctggtggaaaagagcttcgagacagacaccaacctgaacttccagaacctgagcgtgatcggcttcagaatcctgctgctgaaagtggccggctttaacctgctgatgaccctgcggctgtggtccagc

SEQ ID NO: 2393 - DNA, 2700 bp, Artificial Sequence
  Synthetic Polynucloetide
atggccttaccagtgaccgccttgctcctgccgctggccttgctgctccacgccgccaggccggaagtgcagctggttgaatctggcggaggactggttcagcctggcggatctctgagactgtcttgtgccgccagcggcttcagcttcagcgacttttggatgagctgggtccgacaggcccctggcaaaggacttgaatgggtcgccacaatcagccaggccggcagcgagaaggactacgtggactctgtgaagggcagattcaccatcagccgggacaacgccaagaagtccctgtacctccagatgaacagcctgagagccgaggacaccgccgtgtactattgtgcctctggcgtgtacagcttcgactacagaggccagggcaccctggtcacagtctcttctggtaccggcggaggcggatctggcggcggaggtagcggtggcggaggatctgaattcgacgagctgcagatgacccagagccctagcagcctgtctgccagcgtgggcgacagagtgaccatcacctgtagagccagccagagcatcagcagctacctgaactggtatcagcagaagcccggccagccccccaaactgctgatctactgggccagcaccagagaaagcggcgtgcccgatagattcagcggcagcgagagcggcaccaactacaccctgaccatcagctccctgcagcccgaggacttcgccacctacttttgccagcagagcgacagcctgcccatcacctttggacagggcacccggctggacattcagctcgaggacctgaagaacgtgttcccacctgaggtggccgtgttcgagcctagcgaggccgagatcagccacacccagaaagccaccctcgtgtgcctggctaccggcttctaccccgaccatgtggaactgtcttggtgggtcaacggcaaagaggtgcacagcggcgtgtgtaccgacccccagccactgaaagaacagcccgccctgaacgacagccggtactgcctgagcagcagactgagagtgtccgccaccttctggcagaacccccggaaccacttcagatgccaggtgcagttctacggcctgagcgagaacgacgagtggacccaggacagagccaagcccgtgacccagatcgtgtctgccgaagcctggggcagagccgattgcggctttaccagcgagagctaccagcagggcgtgctgagcgccaccatcctgtacgagatcctgctgggcaaggccaccctgtacgccgtgctggtgtctgccctggtgctgatggctatggtcaagcggaaggacagccggggaagggccaagcgatctggatctggagcaacaaacttctcactactcaaacaagcaggtgacgtggaggagaatcccgggcctactagtatggactggatttggcgcatccttttccttgtcggcgctgctaccggcgcgcattccgggccccagctccagctgcaagagtctggacctggcctggtcaagcctagcgagacactgagcctgacctgtaccgtgtccggcgatagcatcagcagcggcgattactactggggctggatcagacagcctcctggcaaaggactggaatggatcggccacatctactacagcggcgtgacctactacaaccccagcctgaagtccagagtgaccatcagcgtggacaccagccggaaccagttctccctgaagctgtctagcgtgacagccgccgataccgccgtgtactactgcaccagagaggacagcagcaactggcggagtagaggccagggaacactggtcacagttagctctggatccggcggaggcggaagtggaggcggaggatctggcggcggaggctctttcgaagaggtgcaactgctggaatctgggggcggagtggtgcagcctggcagaagcctgagactgagctgtgccgccagcggcttcaccttcagctcctacggaatgcactgggtgcgccaggcccctggcaaaggactggaatgggtggccgtgatctcctacgacggcagcaacaagtactacgccgacagcgtgaagggccggttcaccatcagccgggacaacagcaagaacaccctgtacctgcagatgaacagcctgcgggccgaggacaccgccgtgtactactgcgccaaggatatgggctggggcagcggctggcggccttactactactacggcatggacgtgtggggccagggcaccaccgtgacagtgtcatctacgcgtatccagaaccctgatcctgccgtgtaccagctgcgggatagcaagagcagcgacaagagcgtgtgtctgttcaccgacttcgacagccagaccaacgtgtcccagagcaaggactccgacgtgtacatcaccgataagtgcgtgctggacatgcggagcatggacttcaagagcaactccgccgtggcctggtccaacaagtccgatttcgcctgcgccaacgccttcaacaacagcattatccccgaggacacattcttcccaagccccgagagcagctgcgacgtgaagctggtggaaaagagcttcgagacagacaccaacctgaacttccagaacctgagcgtgatcggcttcagaatcctgctgctgaaagtggccggctttaacctgctgatgaccctgcggctgtggtccagc

SEQ ID NO: 2394 - DNA, 2691 bp, Artificial Sequence
  Synthetic Polynucloetide
atggccttaccagtgaccgccttgctcctgccgctggccttgctgctccacgccgccaggccggaagtgcagctggttgaatctggcggaggactggttcagcctggcggatctctgagactgtcttgtgccgccagcggcttcagcttcagcgacttttggatgagctgggtccgacaggcccctggcaaaggacttgaatgggtcgccacaatcagccaggccggcagcgagaaggactacgtggactctgtgaagggcagattcaccatcagccgggacaacgccaagaagtccctgtacctccagatgaacagcctgagagccgaggacaccgccgtgtactattgtgcctctggcgtgtacagcttcgactacagaggccagggcaccctggtcacagtctcttctggtaccggcggaggcggatctggcggcggaggtagcggtggcggaggatctgaattcgacgacatccaaatgacacagagtccttctagtttgagtgcgagcgtgggggacagggtgaccattacctgcagggccagccagagcataagctcataccttaattggtaccagcaaaaaccaggtaaggcccctaagctcctgatctacgcggcctcttcacttcaatctggggtcccttcccgcttcagtggctccggcagcggcaccgacttcacgctcactatatcaagtctgcagcctgaggatctcgccacctattactgtcaacaaagttattccacccctttcacctttggaccgggcacgaaagtggatattaagctcgaggacctgaagaacgtgttcccacctgaggtggccgtgttcgagcctagcgaggccgagatcagccacacccagaaagccaccctcgtgtgcctggctaccggcttctaccccgaccatgtggaactgtcttggtgggtcaacggcaaagaggtgcacagcggcgtgtgtaccgacccccagccactgaaagaacagcccgccctgaacgacagccggtactgcctgagcagcagactgagagtgtccgccaccttctggcagaacccccggaaccacttcagatgccaggtgcagttctacggcctgagcgagaacgacgagtggacccaggacagagccaagcccgtgacccagatcgtgtctgccgaagcctggggcagagccgattgcggctttaccagcgagagctaccagcagggcgtgctgagcgccaccatcctgtacgagatcctgctgggcaaggccaccctgtacgccgtgctggtgtctgccctggtgctgatggctatggtcaagcggaaggacagccggggaagggccaagcgatctggatctggagcaacaaacttctcactactcaaacaagcaggtgacgtggaggagaatcccgggcctactagtatggactggatttggcgcatccttttccttgtcggcgctgctaccggcgcgcattccgggccccagctccagctgcaagagtctggacctggcctggtcaagcctagcgagacactgagcctgacctgtaccgtgtccggcgatagcatcagcagcggcgattactactggggctggatcagacagcctcctggcaaaggactggaatggatcggccacatctactacagcggcgtgacctactacaaccccagcctgaagtccagagtgaccatcagcgtggacaccagccggaaccagttctccctgaagctgtctagcgtgacagccgccgataccgccgtgtactactgcaccagagaggacagcagcaactggcggagtagaggccagggaacactggtcacagttagctctggatccggcggaggcggaagtggaggcggaggatctggcggcggaggctctttcgaagtgcacgaggtccagcttgtgcagtccggggcagaggtcaagaagcctggttctagcgtaaaagtgagttgcaaagcctcaggtgggacattttcatcctacgcgatcagttgggttagacaggctcctggtcaagggctggaatggatgggcggaattattccaatcttcggaacagcgaattacgcgcagaagttccagggtagagtaaccatcactgctgacaagtccacctccaccgcatacatggaattgtctagtctccggagcgaggatacggcggtgtattattgtgctacgttcgccctgtttggcttccgcgaacaggctttcgacatctgggggcagggcacgacagtcacggttagtagtacgcgtatccagaaccctgatcctgccgtgtaccagctgcgggatagcaagagcagcgacaagagcgtgtgtctgttcaccgacttcgacagccagaccaacgtgtcccagagcaaggactccgacgtgtacatcaccgataagtgcgtgctggacatgcggagcatggacttcaagagcaactccgccgtggcctggtccaacaagtccgatttcgcctgcgccaacgccttcaacaacagcattatccccgaggacacattcttcccaagccccgagagcagctgcgacgtgaagctggtggaaaagagcttcgagacagacaccaacctgaacttccagaacctgagcgtgatcggcttcagaatcctgctgctgaaagtggccggctttaacctgctgatgaccctgcggctgtggtccagc

SEQ ID NO: 2395 - DNA, 2685 bp, Artificial Sequence
  Synthetic Polynucloetide
atggccttaccagtgaccgccttgctcctgccgctggccttgctgctccacgccgccaggccggaagtgcagctggttgaatctggcggaggactggttcagcctggcggatctctgagactgtcttgtgccgccagcggcttcagcttcagcgacttttggatgagctgggtccgacaggcccctggcaaaggacttgaatgggtcgccacaatcagccaggccggcagcgagaaggactacgtggactctgtgaagggcagattcaccatcagccgggacaacgccaagaagtccctgtacctccagatgaacagcctgagagccgaggacaccgccgtgtactattgtgcctctggcgtgtacagcttcgactacagaggccagggcaccctggtcacagtctcttctggtaccggcggaggcggatctggcggcggaggtagcggtggcggaggatctgaattcgacatcgtgctgacccagagccctctgagcctggccgtgtctctgggacagcctgccatcatcagctgcaaggccagccagagcgtgtcctttgccggcacctctctgatgcactggtatcaccagaagcccggccagcagcccagactgctgatctacagagccagcaacctggaagccggcgtgcccgatagattttccggcagcggcagcaagaccgacttcaccctgaccatcagccccgtggaagccgaagatgccgccacctactactgccagcagagcagagagtacccctacaccttcggcggaggcaccaagctggaaatcaagaggctcgaggacctgaagaacgtgttcccacctgaggtggccgtgttcgagcctagcgaggccgagatcagccacacccagaaagccaccctcgtgtgcctggctaccggcttctaccccgaccatgtggaactgtcttggtgggtcaacggcaaagaggtgcacagcggcgtgtgtaccgacccccagccactgaaagaacagcccgccctgaacgacagccggtactgcctgagcagcagactgagagtgtccgccaccttctggcagaacccccggaaccacttcagatgccaggtgcagttctacggcctgagcgagaacgacgagtggacccaggacagagccaagcccgtgacccagatcgtgtctgccgaagcctggggcagagccgattgcggctttaccagcgagagctaccagcagggcgtgctgagcgccaccatcctgtacgagatcctgctgggcaaggccaccctgtacgccgtgctggtgtctgccctggtgctgatggctatggtcaagcggaaggacagccggggaagggccaagcgatctggatctggagcaacaaacttctcactactcaaacaagcaggtgacgtggaggagaatcccgggcctactagtatggactggatttggcgcatccttttccttgtcggcgctgctaccggcgcgcattccgggccccagctccagctgcaagagtctggacctggcctggtcaagcctagcgagacactgagcctgacctgtaccgtgtccggcgatagcatcagcagcggcgattactactggggctggatcagacagcctcctggcaaaggactggaatggatcggccacatctactacagcggcgtgacctactacaaccccagcctgaagtccagagtgaccatcagcgtggacaccagccggaaccagttctccctgaagctgtctagcgtgacagccgccgataccgccgtgtactactgcaccagagaggacagcagcaactggcggagtagaggccagggaacactggtcacagttagctctggatccggcggaggcggaagtggaggcggaggatctggcggcggaggctctttcgaacaggtccaactggtgcagagcggagccgaggtcgtgaagcctggcgcttccgtgaagattagctgcaaagccagcggctacacctttaccggctactttatgaactgggtcaagcagagccctggccagagcctggaatggatcggcagaatccacccctacgacggcgacaccttctacaaccagaagttccagggcaaggccaccctgacagtggacaagagcagcaacaccgcccacatggaactgctgagcctgaccagcgaggacttcgccgtgtactactgcaccagatacgacggcagccgggctatggactattggggccagggcaccaccgtgaccgtgtctagtacgcgtatccagaaccctgatcctgccgtgtaccagctgcgggatagcaagagcagcgacaagagcgtgtgtctgttcaccgacttcgacagccagaccaacgtgtcccagagcaaggactccgacgtgtacatcaccgataagtgcgtgctggacatgcggagcatggacttcaagagcaactccgccgtggcctggtccaacaagtccgatttcgcctgcgccaacgccttcaacaacagcattatccccgaggacacattcttcccaagccccgagagcagctgcgacgtgaagctggtggaaaagagcttcgagacagacaccaacctgaacttccagaacctgagcgtgatcggcttcagaatcctgctgctgaaagtggccggctttaacctgctgatgaccctgcggctgtggtccagc

SEQ ID NO: 2396 - DNA, 2676 bp, Artificial Sequence
  Synthetic Polynucloetide
atggccttaccagtgaccgccttgctcctgccgctggccttgctgctccacgccgccaggccggaagtgcagctggttgaatctggcggaggactggttcagcctggcggatctctgagactgtcttgtgccgccagcggcttcagcttcagcgacttttggatgagctgggtccgacaggcccctggcaaaggacttgaatgggtcgccacaatcagccaggccggcagcgagaaggactacgtggactctgtgaagggcagattcaccatcagccgggacaacgccaagaagtccctgtacctccagatgaacagcctgagagccgaggacaccgccgtgtactattgtgcctctggcgtgtacagcttcgactacagaggccagggcaccctggtcacagtctcttctggtaccggcggaggcggatctggcggcggaggtagcggtggcggaggatctgaattcgacgacgttgtgatgacccagacccccctgagcctgcctgtgacacctggcgaacctgccagcatcagctgtcggagcagccagagcctggtgcacagaaacggcaacacctacctgcactggtatctccagaagcccggccagagccccaagctgctgatccacaaggtgtccaacagattcagcggcgtgcccgacagattctccggcagcggctctggcaccgacttcaccctgaagatcagccgggtggaagccgaggacctgggcgtgtacttctgtagccagagcacccatgtgccccccctgacatttggagccggcaccaagctggaactgaagctcgaggacctgaagaacgtgttcccacctgaggtggccgtgttcgagcctagcgaggccgagatcagccacacccagaaagccaccctcgtgtgcctggctaccggcttctaccccgaccatgtggaactgtcttggtgggtcaacggcaaagaggtgcacagcggcgtgtgtaccgacccccagccactgaaagaacagcccgccctgaacgacagccggtactgcctgagcagcagactgagagtgtccgccaccttctggcagaacccccggaaccacttcagatgccaggtgcagttctacggcctgagcgagaacgacgagtggacccaggacagagccaagcccgtgacccagatcgtgtctgccgaagcctggggcagagccgattgcggctttaccagcgagagctaccagcagggcgtgctgagcgccaccatcctgtacgagatcctgctgggcaaggccaccctgtacgccgtgctggtgtctgccctggtgctgatggctatggtcaagcggaaggacagccggggaagggccaagcgatctggatctggagcaacaaacttctcactactcaaacaagcaggtgacgtggaggagaatcccgggcctactagtatggactggatttggcgcatccttttccttgtcggcgctgctaccggcgcgcattccgggccccagctccagctgcaagagtctggacctggcctggtcaagcctagcgagacactgagcctgacctgtaccgtgtccggcgatagcatcagcagcggcgattactactggggctggatcagacagcctcctggcaaaggactggaatggatcggccacatctactacagcggcgtgacctactacaaccccagcctgaagtccagagtgaccatcagcgtggacaccagccggaaccagttctccctgaagctgtctagcgtgacagccgccgataccgccgtgtactactgcaccagagaggacagcagcaactggcggagtagaggccagggaacactggtcacagttagctctggatccggcggaggcggaagtggaggcggaggatctggcggcggaggctctttcgaagaagtgcagctggtgcagtctggcgctgaggtggaaaagcctggggccagcgtgaagattagctgcaaggccagcggcagcagcttcaccggctacaacatgaactgggtgcgccagaacatcggcaagagcctggaatggatcggagccatcgacccctactacggcggcaccagctacaaccagaagttcaagggcagagccaccctgaccgtggacaagagcaccagcaccgcctacatgcacctgaagtccctgcggagcgaggacaccgccgtgtactactgtgtgtccggcatggaatattggggccagggcaccagcgtgaccgtgtctagtacgcgtatccagaaccctgatcctgccgtgtaccagctgcgggatagcaagagcagcgacaagagcgtgtgtctgttcaccgacttcgacagccagaccaacgtgtcccagagcaaggactccgacgtgtacatcaccgataagtgcgtgctggacatgcggagcatggacttcaagagcaactccgccgtggcctggtccaacaagtccgatttcgcctgcgccaacgccttcaacaacagcattatccccgaggacacattcttcccaagccccgagagcagctgcgacgtgaagctggtggaaaagagcttcgagacagacaccaacctgaacttccagaacctgagcgtgatcggcttcagaatcctgctgctgaaagtggccggctttaacctgctgatgaccctgcggctgtggtccagc

SEQ ID NO: 2397 - DNA, 2670 bp, Artificial Sequence
  Synthetic Polynucloetide
atggccttaccagtgaccgccttgctcctgccgctggccttgctgctccacgccgccaggccggaagtgcagctggttgaatctggcggaggactggttcagcctggcggatctctgagactgtcttgtgccgccagcggcttcagcttcagcgacttttggatgagctgggtccgacaggcccctggcaaaggacttgaatgggtcgccacaatcagccaggccggcagcgagaaggactacgtggactctgtgaagggcagattcaccatcagccgggacaacgccaagaagtccctgtacctccagatgaacagcctgagagccgaggacaccgccgtgtactattgtgcctctggcgtgtacagcttcgactacagaggccagggcaccctggtcacagtctcttctggtaccggcggaggcggatctggcggcggaggtagcggtggcggaggatctgaattcgacgagatcgtgatgacccagacccctgccaccctgtctgtgtctgccggcgagagagtgaccattacctgcaaggccagccagagcgtgtccaacgacgtgacctggtatcagcagaagcccggccaggcccccagactgctgatctacagcgccagcaacagatacagcggcgtgcccgccagattttccggcagcggctacggcaccgagttcaccttcaccatcagcagcgtgcagagcgaggacttcgccgtgtacttctgtcagcaagactacagcagcttcggccagggcaccaagctggaaatcaagaggctcgaggacctgaagaacgtgttcccacctgaggtggccgtgttcgagcctagcgaggccgagatcagccacacccagaaagccaccctcgtgtgcctggctaccggcttctaccccgaccatgtggaactgtcttggtgggtcaacggcaaagaggtgcacagcggcgtgtgtaccgacccccagccactgaaagaacagcccgccctgaacgacagccggtactgcctgagcagcagactgagagtgtccgccaccttctggcagaacccccggaaccacttcagatgccaggtgcagttctacggcctgagcgagaacgacgagtggacccaggacagagccaagcccgtgacccagatcgtgtctgccgaagcctggggcagagccgattgcggctttaccagcgagagctaccagcagggcgtgctgagcgccaccatcctgtacgagatcctgctgggcaaggccaccctgtacgccgtgctggtgtctgccctggtgctgatggctatggtcaagcggaaggacagccggggaagggccaagcgatctggatctggagcaacaaacttctcactactcaaacaagcaggtgacgtggaggagaatcccgggcctactagtatggactggatttggcgcatccttttccttgtcggcgctgctaccggcgcgcattccgggccccagctccagctgcaagagtctggacctggcctggtcaagcctagcgagacactgagcctgacctgtaccgtgtccggcgatagcatcagcagcggcgattactactggggctggatcagacagcctcctggcaaaggactggaatggatcggccacatctactacagcggcgtgacctactacaaccccagcctgaagtccagagtgaccatcagcgtggacaccagccggaaccagttctccctgaagctgtctagcgtgacagccgccgataccgccgtgtactactgcaccagagaggacagcagcaactggcggagtagaggccagggaacactggtcacagttagctctggatccggcggaggcggaagtggaggcggaggatctggcggcggaggctctttcgaacaggtgcagctggtggaatctggacctggcgtggtgcagcctggcagaagcctgagaatcagctgtgccgtgtccggcttcagcgtgaccaactacggcgtgcactgggtgcgccagccacctggaaaaggactggaatggctgggcgtgatctgggctggcggcatcaccaactacaacagcgccttcatgtcccggctgaccatctccaaggacaacagcaagaacaccgtgtacctccagatgaacagcctgcgggccgaggacaccgccatgtactactgtgcttccagaggcggccactacggctacgccctggattattggggccagggaaccctcgtgaccgtgtcctctacgcgtatccagaaccctgatcctgccgtgtaccagctgcgggatagcaagagcagcgacaagagcgtgtgtctgttcaccgacttcgacagccagaccaacgtgtcccagagcaaggactccgacgtgtacatcaccgataagtgcgtgctggacatgcggagcatggacttcaagagcaactccgccgtggcctggtccaacaagtccgatttcgcctgcgccaacgccttcaacaacagcattatccccgaggacacattcttcccaagccccgagagcagctgcgacgtgaagctggtggaaaagagcttcgagacagacaccaacctgaacttccagaacctgagcgtgatcggcttcagaatcctgctgctgaaagtggccggctttaacctgctgatgaccctgcggctgtggtccagc

SEQ ID NO: 2398 - DNA, 2676 bp, Artificial Sequence
  Synthetic Polynucloetide
atggccttaccagtgaccgccttgctcctgccgctggccttgctgctccacgccgccaggccggaagtgcagctggttgaatctggcggaggactggttcagcctggcggatctctgagactgtcttgtgccgccagcggcttcagcttcagcgacttttggatgagctgggtccgacaggcccctggcaaaggacttgaatgggtcgccacaatcagccaggccggcagcgagaaggactacgtggactctgtgaagggcagattcaccatcagccgggacaacgccaagaagtccctgtacctccagatgaacagcctgagagccgaggacaccgccgtgtactattgtgcctctggcgtgtacagcttcgactacagaggccagggcaccctggtcacagtctcttctggtaccggcggaggcggatctggcggcggaggtagcggtggcggaggatctgaattcgacatccagatgacccagaccgccagcagcctgcctgcctctctgggcgacagagtgaccatctcctgtagcgccagccaggacatcagcaactacctgaactggtatcagcagaaacccgacggcaccgtgaagctgctgatcttctacagcagcaacctgcacagcggcgtgcccagcagattttctggcggcggaagcggcaccgactacagcctgaccatcagcaatctggaacccgaggacattgccacctacttttgccaccagtacagcaagctgccctggacctttggcggaggcaccaagctggaaatcaagagactcgaggacctgaagaacgtgttcccacctgaggtggccgtgttcgagcctagcgaggccgagatcagccacacccagaaagccaccctcgtgtgcctggctaccggcttctaccccgaccatgtggaactgtcttggtgggtcaacggcaaagaggtgcacagcggcgtgtgtaccgacccccagccactgaaagaacagcccgccctgaacgacagccggtactgcctgagcagcagactgagagtgtccgccaccttctggcagaacccccggaaccacttcagatgccaggtgcagttctacggcctgagcgagaacgacgagtggacccaggacagagccaagcccgtgacccagatcgtgtctgccgaagcctggggcagagccgattgcggctttaccagcgagagctaccagcagggcgtgctgagcgccaccatcctgtacgagatcctgctgggcaaggccaccctgtacgccgtgctggtgtctgccctggtgctgatggctatggtcaagcggaaggacagccggggaagggccaagcgatctggatctggagcaacaaacttctcactactcaaacaagcaggtgacgtggaggagaatcccgggcctactagtatggactggatttggcgcatccttttccttgtcggcgctgctaccggcgcgcattccgggccccagctccagctgcaagagtctggacctggcctggtcaagcctagcgagacactgagcctgacctgtaccgtgtccggcgatagcatcagcagcggcgattactactggggctggatcagacagcctcctggcaaaggactggaatggatcggccacatctactacagcggcgtgacctactacaaccccagcctgaagtccagagtgaccatcagcgtggacaccagccggaaccagttctccctgaagctgtctagcgtgacagccgccgataccgccgtgtactactgcaccagagaggacagcagcaactggcggagtagaggccagggaacactggtcacagttagctctggatccggcggaggcggaagtggaggcggaggatctggcggcggaggctctttcgaagaagtgaccctggtggaaagcggcggagacttcgtgaagcctggcggctctctgaaggtgtcctgtgccgccagcggcttcgcctttagccactacgccatgagctgggtgcgccagacccctgccaagagactggaatgggtggcctacatcagcagcggcggctccggcacctactactccgatagcgtgaagggccggttcaccatcagccgggacaacgccaagaacaccctgtacctccagatgcggagcctgcggagcgaggacagcgccatgtatttctgcaccagagtgaagctgggcacctattacttcgactcttggggccagggcaccaccctgaccgtgtcatctacgcgtatccagaaccctgatcctgccgtgtaccagctgcgggatagcaagagcagcgacaagagcgtgtgtctgttcaccgacttcgacagccagaccaacgtgtcccagagcaaggactccgacgtgtacatcaccgataagtgcgtgctggacatgcggagcatggacttcaagagcaactccgccgtggcctggtccaacaagtccgatttcgcctgcgccaacgccttcaacaacagcattatccccgaggacacattcttcccaagccccgagagcagctgcgacgtgaagctggtggaaaagagcttcgagacagacaccaacctgaacttccagaacctgagcgtgatcggcttcagaatcctgctgctgaaagtggccggctttaacctgctgatgaccctgcggctgtggtccagc

SEQ ID NO: 2399 - DNA, 2682 bp, Artificial Sequence
  Synthetic Polynucloetide
atggccttaccagtgaccgccttgctcctgccgctggccttgctgctccacgccgccaggccggaagtgcagctggttgaatctggcggaggactggttcagcctggcggatctctgagactgtcttgtgccgccagcggcttcagcttcagcgacttttggatgagctgggtccgacaggcccctggcaaaggacttgaatgggtcgccacaatcagccaggccggcagcgagaaggactacgtggactctgtgaagggcagattcaccatcagccgggacaacgccaagaagtccctgtacctccagatgaacagcctgagagccgaggacaccgccgtgtactattgtgcctctggcgtgtacagcttcgactacagaggccagggcaccctggtcacagtctcttctggtaccggcggaggcggatctggcggcggaggtagcggtggcggaggatctgaattccagttcgtgctgacccagagcccttctgcctctgctgccctgggagcctctgccaagctgacctgtacactgagcagcgcccacaagacctacaccatcgactggtatcagcagcagaagggaaaggcccccagatacctgatccaagtgaagtccgacggcacctacacaaaggccaccggcgtgcccgatagattcagcggcagtagcagcggagccgatagatacctgattatccccagcgtgcaggccgacgacgaggccgattactactgcggcaccgattacaccggcggctacgtgttcggcggaggcacacaactgaccgtgacactcgaggacctgaagaacgtgttcccacctgaggtggccgtgttcgagcctagcgaggccgagatcagccacacccagaaagccaccctcgtgtgcctggctaccggcttctaccccgaccatgtggaactgtcttggtgggtcaacggcaaagaggtgcacagcggcgtgtgtaccgacccccagccactgaaagaacagcccgccctgaacgacagccggtactgcctgagcagcagactgagagtgtccgccaccttctggcagaacccccggaaccacttcagatgccaggtgcagttctacggcctgagcgagaacgacgagtggacccaggacagagccaagcccgtgacccagatcgtgtctgccgaagcctggggcagagccgattgcggctttaccagcgagagctaccagcagggcgtgctgagcgccaccatcctgtacgagatcctgctgggcaaggccaccctgtacgccgtgctggtgtctgccctggtgctgatggctatggtcaagcggaaggacagccggggaagggccaagcgatctggatctggagcaacaaacttctcactactcaaacaagcaggtgacgtggaggagaatcccgggcctactagtatggactggatttggcgcatccttttccttgtcggcgctgctaccggcgcgcattccgggccccagctccagctgcaagagtctggacctggcctggtcaagcctagcgagacactgagcctgacctgtaccgtgtccggcgatagcatcagcagcggcgattactactggggctggatcagacagcctcctggcaaaggactggaatggatcggccacatctactacagcggcgtgacctactacaaccccagcctgaagtccagagtgaccatcagcgtggacaccagccggaaccagttctccctgaagctgtctagcgtgacagccgccgataccgccgtgtactactgcaccagagaggacagcagcaactggcggagtagaggccagggaacactggtcacagttagctctggatccggcggaggcggaagtggaggcggaggatctggcggcggaggctctttcgaagagcaactgaaagagtctggcggcggactgttcaagcccaccgataccctgaccctgacctgcaccgtgtccggcttcagcctgagctactacggcgtgaactgggtgcgccaggcccctggcaatggcctggaatggatcggcacaatcggcggcagcggcgacacctactatgcctcttgggccaagtccagaagcaccatcatcagaaacaccaacgagaacaccgtgaccctgaagatgaccagcctgacagccgccgacaccgccacctacttttgcgtcagatacgccaacatcggctacgagtatttcaacgtgtggggacccggcaccctcgtgaccgtgtcatctacgcgtatccagaaccctgatcctgccgtgtaccagctgcgggatagcaagagcagcgacaagagcgtgtgtctgttcaccgacttcgacagccagaccaacgtgtcccagagcaaggactccgacgtgtacatcaccgataagtgcgtgctggacatgcggagcatggacttcaagagcaactccgccgtggcctggtccaacaagtccgatttcgcctgcgccaacgccttcaacaacagcattatccccgaggacacattcttcccaagccccgagagcagctgcgacgtgaagctggtggaaaagagcttcgagacagacaccaacctgaacttccagaacctgagcgtgatcggcttcagaatcctgctgctgaaagtggccggctttaacctgctgatgaccctgcggctgtggtccagc

SEQ ID NO: 2400 - DNA, 2697 bp, Artificial Sequence
  Synthetic Polynucloetide
atggccttaccagtgaccgccttgctcctgccgctggccttgctgctccacgccgccaggccggaagtgcagctggttgaatctggcggaggactggttcagcctggcggatctctgagactgtcttgtgccgccagcggcttcagcttcagcgacttttggatgagctgggtccgacaggcccctggcaaaggacttgaatgggtcgccacaatcagccaggccggcagcgagaaggactacgtggactctgtgaagggcagattcaccatcagccgggacaacgccaagaagtccctgtacctccagatgaacagcctgagagccgaggacaccgccgtgtactattgtgcctctggcgtgtacagcttcgactacagaggccagggcaccctggtcacagtctcttctggtaccggcggaggcggatctggcggcggaggtagcggtggcggaggatctgaattccagttcgtgctgacccagagcccttctgtgtctgccgccctgggagcctctgccaagctgacctgtacactgagcagcgcccacaagacctacaccatcgactggtatcagcagcagcagggcgaggcccccagatacctgatgcaagtgaagtccgacggcagctacaccaagggcaccggcgtgcccgatagattcagcggcagtagcagcggagccgatagatacctgattatccccagcgtgcaggccgacgacgaggccggatatgtgtgcggcgctgacgacaatggcggctacgtgttcggcggaggcacccaactgacagtgacactcgaggacctgaagaacgtgttcccacctgaggtggccgtgttcgagcctagcgaggccgagatcagccacacccagaaagccaccctcgtgtgcctggctaccggcttctaccccgaccatgtggaactgtcttggtgggtcaacggcaaagaggtgcacagcggcgtgtgtaccgacccccagccactgaaagaacagcccgccctgaacgacagccggtactgcctgagcagcagactgagagtgtccgccaccttctggcagaacccccggaaccacttcagatgccaggtgcagttctacggcctgagcgagaacgacgagtggacccaggacagagccaagcccgtgacccagatcgtgtctgccgaagcctggggcagagccgattgcggctttaccagcgagagctaccagcagggcgtgctgagcgccaccatcctgtacgagatcctgctgggcaaggccaccctgtacgccgtgctggtgtctgccctggtgctgatggctatggtcaagcggaaggacagccggggaagggccaagcgatctggatctggagcaacaaacttctcactactcaaacaagcaggtgacgtggaggagaatcccgggcctactagtatggactggatttggcgcatccttttccttgtcggcgctgctaccggcgcgcattccgggccccagctccagctgcaagagtctggacctggcctggtcaagcctagcgagacactgagcctgacctgtaccgtgtccggcgatagcatcagcagcggcgattactactggggctggatcagacagcctcctggcaaaggactggaatggatcggccacatctactacagcggcgtgacctactacaaccccagcctgaagtccagagtgaccatcagcgtggacaccagccggaaccagttctccctgaagctgtctagcgtgacagccgccgataccgccgtgtactactgcaccagagaggacagcagcaactggcggagtagaggccagggaacactggtcacagttagctctggatccggcggaggcggaagtggaggcggaggatctggcggcggaggctctttcgaacagagcgtgaaagagtctgagggcggcctgttcaagcccaccgataccctgaccctgacctgcaccgtgtccggcttcagcctgagcagacacgccctgacatgggtgcgccaggcccctggaaatggcctggaatggatcggagccatcgacaacgccggcaccacctactatgcctcttgggccaagtccagaagcaccatcacccggaacaccgacctgcacaccgtgaccctgaagatgaccagcctgaccgccagcgacaccgccacctacttttgcgccagagtgttctacgacatcaacagcggctactacctggacggcatggacctgtggggacctggcacacttgtgaccgtgtccagcacgcgtatccagaaccctgatcctgccgtgtaccagctgcgggatagcaagagcagcgacaagagcgtgtgtctgttcaccgacttcgacagccagaccaacgtgtcccagagcaaggactccgacgtgtacatcaccgataagtgcgtgctggacatgcggagcatggacttcaagagcaactccgccgtggcctggtccaacaagtccgatttcgcctgcgccaacgccttcaacaacagcattatccccgaggacacattcttcccaagccccgagagcagctgcgacgtgaagctggtggaaaagagcttcgagacagacaccaacctgaacttccagaacctgagcgtgatcggcttcagaatcctgctgctgaaagtggccggctttaacctgctgatgaccctgcggctgtggtccagc

SEQ ID NO: 2401 - DNA, 2679 bp, Artificial Sequence
  Synthetic Polynucloetide
atggccttaccagtgaccgccttgctcctgccgctggccttgctgctccacgccgccaggccggaagtgcagctggttgaatctggcggaggactggttcagcctggcggatctctgagactgtcttgtgccgccagcggcttcagcttcagcgacttttggatgagctgggtccgacaggcccctggcaaaggacttgaatgggtcgccacaatcagccaggccggcagcgagaaggactacgtggactctgtgaagggcagattcaccatcagccgggacaacgccaagaagtccctgtacctccagatgaacagcctgagagccgaggacaccgccgtgtactattgtgcctctggcgtgtacagcttcgactacagaggccagggcaccctggtcacagtctcttctggtaccggcggaggcggatctggcggcggaggtagcggtggcggaggatctgaattcgacatccagatgacccagagccccagcagcctgtctgccagcgtgggcgacagagtgaccatcacctgtagagccagccagggcatcagctcttggctggcctggtatcagcagaagcccgagaaggcccccaagagcctgatctacgccgcctctagtctccagagcggcgtgcccagcagattttctggcagcggctccggcaccgacttcaccctgacaatcagctccctccagcccgaggacttcgccacctactactgccagcagtacaacagctacccccccacctttggcggaggcaccaaggtggaaatcaagctcgaggacctgaagaacgtgttcccacctgaggtggccgtgttcgagcctagcgaggccgagatcagccacacccagaaagccaccctcgtgtgcctggctaccggcttctaccccgaccatgtggaactgtcttggtgggtcaacggcaaagaggtgcacagcggcgtgtgtaccgacccccagccactgaaagaacagcccgccctgaacgacagccggtactgcctgagcagcagactgagagtgtccgccaccttctggcagaacccccggaaccacttcagatgccaggtgcagttctacggcctgagcgagaacgacgagtggacccaggacagagccaagcccgtgacccagatcgtgtctgccgaagcctggggcagagccgattgcggctttaccagcgagagctaccagcagggcgtgctgagcgccaccatcctgtacgagatcctgctgggcaaggccaccctgtacgccgtgctggtgtctgccctggtgctgatggctatggtcaagcggaaggacagccggggaagggccaagcgatctggatctggagcaacaaacttctcactactcaaacaagcaggtgacgtggaggagaatcccgggcctactagtatggactggatttggcgcatccttttccttgtcggcgctgctaccggcgcgcattccgggccccagctccagctgcaagagtctggacctggcctggtcaagcctagcgagacactgagcctgacctgtaccgtgtccggcgatagcatcagcagcggcgattactactggggctggatcagacagcctcctggcaaaggactggaatggatcggccacatctactacagcggcgtgacctactacaaccccagcctgaagtccagagtgaccatcagcgtggacaccagccggaaccagttctccctgaagctgtctagcgtgacagccgccgataccgccgtgtactactgcaccagagaggacagcagcaactggcggagtagaggccagggaacactggtcacagttagctctggatccggcggaggcggaagtggaggcggaggatctggcggcggaggctctttcgaagaagtgcaactggtggaatcaggcggcggactggtgcagcctggcgagtctctgagactgagctgtgtggcctccggcttcaccttcagccggtacaagatgaactgggtgcgccaggcccctggcaagggactggaatgggtgtcctacatcagccgcagcggcagagacatctactacgccgacagcgtgaagggccggttcaccatcagcagagacaacgccaagaacagcctgtacctccagatgaactccctgcgggacgaggacaccgccgtgtactactgtgccggaaccgtgaccacctattactacttcggcatggacgtgtggggccacggcaccaccgtgacagtgtcatctacgcgtatccagaaccctgatcctgccgtgtaccagctgcgggatagcaagagcagcgacaagagcgtgtgtctgttcaccgacttcgacagccagaccaacgtgtcccagagcaaggactccgacgtgtacatcaccgataagtgcgtgctggacatgcggagcatggacttcaagagcaactccgccgtggcctggtccaacaagtccgatttcgcctgcgccaacgccttcaacaacagcattatccccgaggacacattcttcccaagccccgagagcagctgcgacgtgaagctggtggaaaagagcttcgagacagacaccaacctgaacttccagaacctgagcgtgatcggcttcagaatcctgctgctgaaagtggccggctttaacctgctgatgaccctgcggctgtggtccagc

SEQ ID NO: 2402 - DNA, 2682 bp, Artificial Sequence
  Synthetic Polynucloetide
atggccttaccagtgaccgccttgctcctgccgctggccttgctgctccacgccgccaggccggaagtgcagctggttgaatctggcggaggactggttcagcctggcggatctctgagactgtcttgtgccgccagcggcttcagcttcagcgacttttggatgagctgggtccgacaggcccctggcaaaggacttgaatgggtcgccacaatcagccaggccggcagcgagaaggactacgtggactctgtgaagggcagattcaccatcagccgggacaacgccaagaagtccctgtacctccagatgaacagcctgagagccgaggacaccgccgtgtactattgtgcctctggcgtgtacagcttcgactacagaggccagggcaccctggtcacagtctcttctggtaccggcggaggcggatctggcggcggaggtagcggtggcggaggatctgaattcgacatccagatgacccagagccccagcagcctgtctgccagcgtgggcgacagagtgaccatcacctgtagagccagccagggcatcagctcttggctggcctggtatcagcagaagcccgagaaggcccccaagagcctgatctacgccgcctctagtctccagagcggcgtgcccagcagattttctggcagcggctccggcaccgacttcaccctgacaatcagctccctccagcccgaggacttcgccacctactactgccagcagtacaacagctaccctcccacctttggcggaggcaccaaggtggaaatcaagctcgaggacctgaagaacgtgttcccacctgaggtggccgtgttcgagcctagcgaggccgagatcagccacacccagaaagccaccctcgtgtgcctggctaccggcttctaccccgaccatgtggaactgtcttggtgggtcaacggcaaagaggtgcacagcggcgtgtgtaccgacccccagccactgaaagaacagcccgccctgaacgacagccggtactgcctgagcagcagactgagagtgtccgccaccttctggcagaacccccggaaccacttcagatgccaggtgcagttctacggcctgagcgagaacgacgagtggacccaggacagagccaagcccgtgacccagatcgtgtctgccgaagcctggggcagagccgattgcggctttaccagcgagagctaccagcagggcgtgctgagcgccaccatcctgtacgagatcctgctgggcaaggccaccctgtacgccgtgctggtgtctgccctggtgctgatggctatggtcaagcggaaggacagccggggaagggccaagcgatctggatctggagcaacaaacttctcactactcaaacaagcaggtgacgtggaggagaatcccgggcctactagtatggactggatttggcgcatccttttccttgtcggcgctgctaccggcgcgcattccgggccccagctccagctgcaagagtctggacctggcctggtcaagcctagcgagacactgagcctgacctgtaccgtgtccggcgatagcatcagcagcggcgattactactggggctggatcagacagcctcctggcaaaggactggaatggatcggccacatctactacagcggcgtgacctactacaaccccagcctgaagtccagagtgaccatcagcgtggacaccagccggaaccagttctccctgaagctgtctagcgtgacagccgccgataccgccgtgtactactgcaccagagaggacagcagcaactggcggagtagaggccagggaacactggtcacagttagctctggatccggcggaggcggaagtggaggcggaggatctggcggcggaggctctttcgaagaagtgcaactggtggaatccgggggaggctctgtgcagcctggcgagtctctgagactgagctgtgtggcctccggcttcaccttcagccggtacaagatgaactgggtgcgccaggcccctggcaagggactggaatgggtgtcctacatcagccgcagcggcagagacatctactacgccgacagcgtgaagggccggttcaccatcagcagagacaacgccaagaacagcctgtacctccagatgaactccctgcgggacgaggacaccgccgtgtactactgtgccggaaccgtgaccacctattactacgacttcggcatggacgtgtggggccagggcacaaccgtgacagtgtctagcacgcgtatccagaaccctgatcctgccgtgtaccagctgcgggatagcaagagcagcgacaagagcgtgtgtctgttcaccgacttcgacagccagaccaacgtgtcccagagcaaggactccgacgtgtacatcaccgataagtgcgtgctggacatgcggagcatggacttcaagagcaactccgccgtggcctggtccaacaagtccgatttcgcctgcgccaacgccttcaacaacagcattatccccgaggacacattcttcccaagccccgagagcagctgcgacgtgaagctggtggaaaagagcttcgagacagacaccaacctgaacttccagaacctgagcgtgatcggcttcagaatcctgctgctgaaagtggccggctttaacctgctgatgaccctgcggctgtggtccagc

SEQ ID NO: 2403 - DNA, 2676 bp, Artificial Sequence
  Synthetic Polynucloetide
atggccttaccagtgaccgccttgctcctgccgctggccttgctgctccacgccgccaggccggaagtgcagctggttgaatctggcggaggactggttcagcctggcggatctctgagactgtcttgtgccgccagcggcttcagcttcagcgacttttggatgagctgggtccgacaggcccctggcaaaggacttgaatgggtcgccacaatcagccaggccggcagcgagaaggactacgtggactctgtgaagggcagattcaccatcagccgggacaacgccaagaagtccctgtacctccagatgaacagcctgagagccgaggacaccgccgtgtactattgtgcctctggcgtgtacagcttcgactacagaggccagggcaccctggtcacagtctcttctggtaccggcggaggcggatctggcggcggaggtagcggtggcggaggatctgaattccagtctgtgctgacacagcctccatctgcctctggcacacctggacagagagtgaccatcagctgtagcggcagcagaagcaacgtcggcggcaactacgtgttctggtatcagcaggtcccaggcgctacccctaagctgctgatctacagaagcaatcagcggcctagcggcgtgcccgatagatttgccggaagcaagagcggcagctctgccagccttgccatctctggactgagaagcgaggacgaggccgactactactgtgccacctgggatgatagcctgagcggcttcgtgtttggcaccggcaccaaagtgacagtgcttggtctcgaggacctgaagaacgtgttcccacctgaggtggccgtgttcgagcctagcgaggccgagatcagccacacccagaaagccaccctcgtgtgcctggctaccggcttctaccccgaccatgtggaactgtcttggtgggtcaacggcaaagaggtgcacagcggcgtgtgtaccgacccccagccactgaaagaacagcccgccctgaacgacagccggtactgcctgagcagcagactgagagtgtccgccaccttctggcagaacccccggaaccacttcagatgccaggtgcagttctacggcctgagcgagaacgacgagtggacccaggacagagccaagcccgtgacccagatcgtgtctgccgaagcctggggcagagccgattgcggctttaccagcgagagctaccagcagggcgtgctgagcgccaccatcctgtacgagatcctgctgggcaaggccaccctgtacgccgtgctggtgtctgccctggtgctgatggctatggtcaagcggaaggacagccggggaagggccaagcgatctggatctggagcaacaaacttctcactactcaaacaagcaggtgacgtggaggagaatcccgggcctactagtatggactggatttggcgcatccttttccttgtcggcgctgctaccggcgcgcattccgggccccagctccagctgcaagagtctggacctggcctggtcaagcctagcgagacactgagcctgacctgtaccgtgtccggcgatagcatcagcagcggcgattactactggggctggatcagacagcctcctggcaaaggactggaatggatcggccacatctactacagcggcgtgacctactacaaccccagcctgaagtccagagtgaccatcagcgtggacaccagccggaaccagttctccctgaagctgtctagcgtgacagccgccgataccgccgtgtactactgcaccagagaggacagcagcaactggcggagtagaggccagggaacactggtcacagttagctctggatccggcggaggcggaagtggaggcggaggatctggcggcggaggctctttcgaagttcagctggttgaatctggcggcggactggttaagcctggcggatctctgagactgtcttgtgccgccagcggcttcaccttcagcgattactacatgagctggatcagacaggcccctggcaaaggactggaatgggtgtcctacatcagcagcagcggctccaccatctactacgccgatagcgtgaagggcagattcaccatcagccgggacaacgccaagaacagcctgtacctccagatgaactccctgagagccgaggacaccgccgtgtactattgcgccagaggctacggcaaagcctacgatcaatggggccagggcacactggtcaccgtttcttctacgcgtatccagaaccctgatcctgccgtgtaccagctgcgggatagcaagagcagcgacaagagcgtgtgtctgttcaccgacttcgacagccagaccaacgtgtcccagagcaaggactccgacgtgtacatcaccgataagtgcgtgctggacatgcggagcatggacttcaagagcaactccgccgtggcctggtccaacaagtccgatttcgcctgcgccaacgccttcaacaacagcattatccccgaggacacattcttcccaagccccgagagcagctgcgacgtgaagctggtggaaaagagcttcgagacagacaccaacctgaacttccagaacctgagcgtgatcggcttcagaatcctgctgctgaaagtggccggctttaacctgctgatgaccctgcggctgtggtccagc

SEQ ID NO: 2404 - DNA, 2673 bp, Artificial Sequence
  Synthetic Polynucloetide
atggccttaccagtgaccgccttgctcctgccgctggccttgctgctccacgccgccaggccggaagtgcagctggttgaatctggcggaggactggttcagcctggcggatctctgagactgtcttgtgccgccagcggcttcagcttcagcgacttttggatgagctgggtccgacaggcccctggcaaaggacttgaatgggtcgccacaatcagccaggccggcagcgagaaggactacgtggactctgtgaagggcagattcaccatcagccgggacaacgccaagaagtccctgtacctccagatgaacagcctgagagccgaggacaccgccgtgtactattgtgcctctggcgtgtacagcttcgactacagaggccagggcaccctggtcacagtctcttctggtaccggcggaggcggatctggcggcggaggtagcggtggcggaggatctgaattccagtctgtggtcacacagccacctagcatgtctgccgctccaggccagcaagtgaccatctcttgtagcggcggcaacagcaacatcgagcggaactacgtgtcctggtatctgcaactgcctggcacagcccctaagctggtcatcttcgacaacgacagacggcccagcggcatccccgatagattttctggcagcaagagcggcaccagcgccacactgggaattaccggacttcagacaggcgacgaggccgactactactgtggcacatgggactctagcctgagaggctgggttttcggcggaggcacaaagctgacagtgcttggtctcgaggacctgaagaacgtgttcccacctgaggtggccgtgttcgagcctagcgaggccgagatcagccacacccagaaagccaccctcgtgtgcctggctaccggcttctaccccgaccatgtggaactgtcttggtgggtcaacggcaaagaggtgcacagcggcgtgtgtaccgacccccagccactgaaagaacagcccgccctgaacgacagccggtactgcctgagcagcagactgagagtgtccgccaccttctggcagaacccccggaaccacttcagatgccaggtgcagttctacggcctgagcgagaacgacgagtggacccaggacagagccaagcccgtgacccagatcgtgtctgccgaagcctggggcagagccgattgcggctttaccagcgagagctaccagcagggcgtgctgagcgccaccatcctgtacgagatcctgctgggcaaggccaccctgtacgccgtgctggtgtctgccctggtgctgatggctatggtcaagcggaaggacagccggggaagggccaagcgatctggatctggagcaacaaacttctcactactcaaacaagcaggtgacgtggaggagaatcccgggcctactagtatggactggatttggcgcatccttttccttgtcggcgctgctaccggcgcgcattccgggccccagctccagctgcaagagtctggacctggcctggtcaagcctagcgagacactgagcctgacctgtaccgtgtccggcgatagcatcagcagcggcgattactactggggctggatcagacagcctcctggcaaaggactggaatggatcggccacatctactacagcggcgtgacctactacaaccccagcctgaagtccagagtgaccatcagcgtggacaccagccggaaccagttctccctgaagctgtctagcgtgacagccgccgataccgccgtgtactactgcaccagagaggacagcagcaactggcggagtagaggccagggaacactggtcacagttagctctggatccggcggaggcggaagtggaggcggaggatctggcggcggaggctctttcgaagtgcagctcgttgagtctggcggcggactgattcaacctggcggaagcctgagactgagctgtgccgcttccggcttcaccttcagcaactacgccatgaactgggttcgacaggcccctggcaaaggactggaatgggtgtccaccatcaacggcagaggcagcagcaccatctacgccgattctgtgaagggcagattcaccatcagccgggacaacagcaagaacaccctgtacctccagatgaactccctgagagccgaggacaccgccacctattactgtgcccggtacatcagcagaggactgggcgattcttggggccagggcacactggttacagtgacgcgtatccagaaccctgatcctgccgtgtaccagctgcgggatagcaagagcagcgacaagagcgtgtgtctgttcaccgacttcgacagccagaccaacgtgtcccagagcaaggactccgacgtgtacatcaccgataagtgcgtgctggacatgcggagcatggacttcaagagcaactccgccgtggcctggtccaacaagtccgatttcgcctgcgccaacgccttcaacaacagcattatccccgaggacacattcttcccaagccccgagagcagctgcgacgtgaagctggtggaaaagagcttcgagacagacaccaacctgaacttccagaacctgagcgtgatcggcttcagaatcctgctgctgaaagtggccggctttaacctgctgatgaccctgcggctgtggtccagc

SEQ ID NO: 2405 - DNA, 2676 bp, Artificial Sequence
  Synthetic Polynucloetide
atggccttaccagtgaccgccttgctcctgccgctggccttgctgctccacgccgccaggccggaagtgcagctggttgaatctggcggaggactggttcagcctggcggatctctgagactgtcttgtgccgccagcggcttcagcttcagcgacttttggatgagctgggtccgacaggcccctggcaaaggacttgaatgggtcgccacaatcagccaggccggcagcgagaaggactacgtggactctgtgaagggcagattcaccatcagccgggacaacgccaagaagtccctgtacctccagatgaacagcctgagagccgaggacaccgccgtgtactattgtgcctctggcgtgtacagcttcgactacagaggccagggcaccctggtcacagtctcttctggtaccggcggaggcggatctggcggcggaggtagcggtggcggaggatctgaattcgacgtcgtgatgacccagacccctctgagcctgcctgtgtccctgggcgatcaggccagcatcagctgtagaagcagccagagcctggtgcacagcaacggcaacacctacctgcactggtatctccagaagcccggccagagccccaagctgctgatctacaaggtgtccaacagattcagcggcgtgcccgacagattctccggcagcggctctggcaccgacttcaccctgaagatcagccgggtggaagccgaggacctgggcgtgtacttctgtagccagaacacccccgtgccccccaagtttggcagcggcaccaagctggaaatcaagctcgaggacctgaagaacgtgttcccacctgaggtggccgtgttcgagcctagcgaggccgagatcagccacacccagaaagccaccctcgtgtgcctggctaccggcttctaccccgaccatgtggaactgtcttggtgggtcaacggcaaagaggtgcacagcggcgtgtgtaccgacccccagccactgaaagaacagcccgccctgaacgacagccggtactgcctgagcagcagactgagagtgtccgccaccttctggcagaacccccggaaccacttcagatgccaggtgcagttctacggcctgagcgagaacgacgagtggacccaggacagagccaagcccgtgacccagatcgtgtctgccgaagcctggggcagagccgattgcggctttaccagcgagagctaccagcagggcgtgctgagcgccaccatcctgtacgagatcctgctgggcaaggccaccctgtacgccgtgctggtgtctgccctggtgctgatggctatggtcaagcggaaggacagccggggaagggccaagcgatctggatctggagcaacaaacttctcactactcaaacaagcaggtgacgtggaggagaatcccgggcctactagtatggactggatttggcgcatccttttccttgtcggcgctgctaccggcgcgcattccgggccccagctccagctgcaagagtctggacctggcctggtcaagcctagcgagacactgagcctgacctgtaccgtgtccggcgatagcatcagcagcggcgattactactggggctggatcagacagcctcctggcaaaggactggaatggatcggccacatctactacagcggcgtgacctactacaaccccagcctgaagtccagagtgaccatcagcgtggacaccagccggaaccagttctccctgaagctgtctagcgtgacagccgccgataccgccgtgtactactgcaccagagaggacagcagcaactggcggagtagaggccagggaacactggtcacagttagctctggatccggcggaggcggaagtggaggcggaggatctggcggcggaggctctttcgaacaggtgcagctccagcagtctggcgctgaactcgtgcggcctggcgcttctgtgaagctgtcttgcaaggccagcggctacaccttcaacgactacgagatgcactgggtcaagcagacccctgtgcacggcctgaagtggatcggagccctggaacccaagaccggcgataccgcctacagccagaagttcaagggcaaggccaccctgaccgccgacaagagcagcagcacagcctacatggaactgcggagcctgaccagcgaggacagcgccgtgtactactgcaccagctgctactactacacctacagcggccagggcaccctcgtgacagtgtctgctacgcgtatccagaaccctgatcctgccgtgtaccagctgcgggatagcaagagcagcgacaagagcgtgtgtctgttcaccgacttcgacagccagaccaacgtgtcccagagcaaggactccgacgtgtacatcaccgataagtgcgtgctggacatgcggagcatggacttcaagagcaactccgccgtggcctggtccaacaagtccgatttcgcctgcgccaacgccttcaacaacagcattatccccgaggacacattcttcccaagccccgagagcagctgcgacgtgaagctggtggaaaagagcttcgagacagacaccaacctgaacttccagaacctgagcgtgatcggcttcagaatcctgctgctgaaagtggccggctttaacctgctgatgaccctgcggctgtggtccagc

SEQ ID NO: 2406 - DNA, 2673 bp, Artificial Sequence
  Synthetic Polynucloetide
atggccttaccagtgaccgccttgctcctgccgctggccttgctgctccacgccgccaggccggaagtgcagctggttgaatctggcggaggactggttcagcctggcggatctctgagactgtcttgtgccgccagcggcttcagcttcagcgacttttggatgagctgggtccgacaggcccctggcaaaggacttgaatgggtcgccacaatcagccaggccggcagcgagaaggactacgtggactctgtgaagggcagattcaccatcagccgggacaacgccaagaagtccctgtacctccagatgaacagcctgagagccgaggacaccgccgtgtactattgtgcctctggcgtgtacagcttcgactacagaggccagggcaccctggtcacagtctcttctggtaccggcggaggcggatctggcggcggaggtagcggtggcggaggatctgaattcgacatccaactgacccagagccccagcagcctgtctgcctctgtgggcgacagagtgaccatcacctgtagagccagccagggcatcagaaacgacctgggctggtatcagcagaagcccggcaaggcccccaagcggctgatctatgctgccagctccctccagaatggcgtgcccagcagattttccggcagcggctctggcaccgagttcaccctgaccatcagctccctccagcccgaggacttcgccacctactactgcctccagcacaacacctaccccgccttcggccagggcaccaaggtggaaatcaagagactcgaggacctgaagaacgtgttcccacctgaggtggccgtgttcgagcctagcgaggccgagatcagccacacccagaaagccaccctcgtgtgcctggctaccggcttctaccccgaccatgtggaactgtcttggtgggtcaacggcaaagaggtgcacagcggcgtgtgtaccgacccccagccactgaaagaacagcccgccctgaacgacagccggtactgcctgagcagcagactgagagtgtccgccaccttctggcagaacccccggaaccacttcagatgccaggtgcagttctacggcctgagcgagaacgacgagtggacccaggacagagccaagcccgtgacccagatcgtgtctgccgaagcctggggcagagccgattgcggctttaccagcgagagctaccagcagggcgtgctgagcgccaccatcctgtacgagatcctgctgggcaaggccaccctgtacgccgtgctggtgtctgccctggtgctgatggctatggtcaagcggaaggacagccggggaagggccaagcgatctggatctggagcaacaaacttctcactactcaaacaagcaggtgacgtggaggagaatcccgggcctactagtatggactggatttggcgcatccttttccttgtcggcgctgctaccggcgcgcattccgggccccagctccagctgcaagagtctggacctggcctggtcaagcctagcgagacactgagcctgacctgtaccgtgtccggcgatagcatcagcagcggcgattactactggggctggatcagacagcctcctggcaaaggactggaatggatcggccacatctactacagcggcgtgacctactacaaccccagcctgaagtccagagtgaccatcagcgtggacaccagccggaaccagttctccctgaagctgtctagcgtgacagccgccgataccgccgtgtactactgcaccagagaggacagcagcaactggcggagtagaggccagggaacactggtcacagttagctctggatccggcggaggcggaagtggaggcggaggatctggcggcggaggctctttcgaacaggtgcaactccaggaatctggccctggcctcgtgaagcctagccagaccctgagcctgacctgtaccgtgtctggcggcagcatcagcagcttcaactactactggtcctggatcagacaccaccctggcaagggcctggaatggatcggctacatctactacagcggcagcacctacagcaaccccagcctgaagtcccgcgtgaccatctccgtggacaccagcaagaaccagtttagcctgaccctgtccagcgtgacagccgccgataccgccgtgtactactgcgccagaggctacaactggaactacttcgactactggggccagggaaccctcgtgaccgtgtctagtacgcgtatccagaaccctgatcctgccgtgtaccagctgcgggatagcaagagcagcgacaagagcgtgtgtctgttcaccgacttcgacagccagaccaacgtgtcccagagcaaggactccgacgtgtacatcaccgataagtgcgtgctggacatgcggagcatggacttcaagagcaactccgccgtggcctggtccaacaagtccgatttcgcctgcgccaacgccttcaacaacagcattatccccgaggacacattcttcccaagccccgagagcagctgcgacgtgaagctggtggaaaagagcttcgagacagacaccaacctgaacttccagaacctgagcgtgatcggcttcagaatcctgctgctgaaagtggccggctttaacctgctgatgaccctgcggctgtggtccagc

SEQ ID NO: 2407 - DNA, 2679 bp, Artificial Sequence
  Synthetic Polynucloetide
atggccttaccagtgaccgccttgctcctgccgctggccttgctgctccacgccgccaggccggaagtgcagctggttgaatctggcggaggactggttcagcctggcggatctctgagactgtcttgtgccgccagcggcttcagcttcagcgacttttggatgagctgggtccgacaggcccctggcaaaggacttgaatgggtcgccacaatcagccaggccggcagcgagaaggactacgtggactctgtgaagggcagattcaccatcagccgggacaacgccaagaagtccctgtacctccagatgaacagcctgagagccgaggacaccgccgtgtactattgtgcctctggcgtgtacagcttcgactacagaggccagggcaccctggtcacagtctcttctggtaccggcggaggcggatctggcggcggaggtagcggtggcggaggatctgaattcgacgacatcgtgctgacccagagccccgccagcctggccgtgagcctgggccagagcgtgaccatcagctgcagagccagcgagagcgtggagtactacggcaccagcctgatgcagtggtaccagcagaagcccggccagccccccaagctgctgatctacgccaccagcaacgtggagagcggcgtgcccgccagattcagcggcagcggcagcggcaccgacttcagcctgaacatccaccccgtggaggaggacgacatcgccatgtacttctgccagcagagcagaaagctgcccagcaccttcggcggcggcaccaagctggagatcaagctcgaggacctgaagaacgtgttcccacctgaggtggccgtgttcgagcctagcgaggccgagatcagccacacccagaaagccaccctcgtgtgcctggctaccggcttctaccccgaccatgtggaactgtcttggtgggtcaacggcaaagaggtgcacagcggcgtgtgtaccgacccccagccactgaaagaacagcccgccctgaacgacagccggtactgcctgagcagcagactgagagtgtccgccaccttctggcagaacccccggaaccacttcagatgccaggtgcagttctacggcctgagcgagaacgacgagtggacccaggacagagccaagcccgtgacccagatcgtgtctgccgaagcctggggcagagccgattgcggctttaccagcgagagctaccagcagggcgtgctgagcgccaccatcctgtacgagatcctgctgggcaaggccaccctgtacgccgtgctggtgtctgccctggtgctgatggctatggtcaagcggaaggacagccggggaagggccaagcgatctggatctggagcaacaaacttctcactactcaaacaagcaggtgacgtggaggagaatcccgggcctactagtatggactggatttggcgcatccttttccttgtcggcgctgctaccggcgcgcattccgggccccagctccagctgcaagagtctggacctggcctggtcaagcctagcgagacactgagcctgacctgtaccgtgtccggcgatagcatcagcagcggcgattactactggggctggatcagacagcctcctggcaaaggactggaatggatcggccacatctactacagcggcgtgacctactacaaccccagcctgaagtccagagtgaccatcagcgtggacaccagccggaaccagttctccctgaagctgtctagcgtgacagccgccgataccgccgtgtactactgcaccagagaggacagcagcaactggcggagtagaggccagggaacactggtcacagttagctctggatccggcggaggcggaagtggaggcggaggatctggcggcggaggctctttcgaagacgtgagactgcaggagagcggccccggccaggtgaagcccagccagaccgtgagcctgacctgcagcgtgaccggctacagcatcaccaacggcaaccactggtggaactggatcagacaggtgagcggcagcaagctggagtggatcggctacatcagcagcagcggcagcaccgacagcaaccccagcctgaagagcagaatcagcatcaccagagacaccagcaagaaccagctgttcctgcagctgaacagcgtgaccaccgaggacatcgccacctactactgcgccagaggctactacttcgactactggggccagggcaccaccctgaccgtgagcagcacgcgtatccagaaccctgatcctgccgtgtaccagctgcgggatagcaagagcagcgacaagagcgtgtgtctgttcaccgacttcgacagccagaccaacgtgtcccagagcaaggactccgacgtgtacatcaccgataagtgcgtgctggacatgcggagcatggacttcaagagcaactccgccgtggcctggtccaacaagtccgatttcgcctgcgccaacgccttcaacaacagcattatccccgaggacacattcttcccaagccccgagagcagctgcgacgtgaagctggtggaaaagagcttcgagacagacaccaacctgaacttccagaacctgagcgtgatcggcttcagaatcctgctgctgaaagtggccggctttaacctgctgatgaccctgcggctgtggtccagc

SEQ ID NO: 2408 - DNA, 2676 bp, Artificial Sequence
  Synthetic Polynucloetide
atggccttaccagtgaccgccttgctcctgccgctggccttgctgctccacgccgccaggccggaagtgcagctggttgaatctggcggaggactggttcagcctggcggatctctgagactgtcttgtgccgccagcggcttcagcttcagcgacttttggatgagctgggtccgacaggcccctggcaaaggacttgaatgggtcgccacaatcagccaggccggcagcgagaaggactacgtggactctgtgaagggcagattcaccatcagccgggacaacgccaagaagtccctgtacctccagatgaacagcctgagagccgaggacaccgccgtgtactattgtgcctctggcgtgtacagcttcgactacagaggccagggcaccctggtcacagtctcttctggtaccggcggaggcggatctggcggcggaggtagcggtggcggaggatctgaattcgacatccagatgacccagagccccagcagcctgtctgccagcgtgggcgacagagtgaccatcacctgtagagccagccaggacgtgaacaccgccgtggcctggtatcagcagaagcctggcaaggcccccaagctgctgatctacagcgccagcttcctggaaagcggcgtgcccagcagattcagcggaagcagaagcggcaccgacttcaccctgaccatcagctccctccagcccgaggacttcgccacctactactgccagcagcactacaccacccctcccaccttcggccagaccaaggtggaaatcaagagactcgaggacctgaagaacgtgttcccacctgaggtggccgtgttcgagcctagcgaggccgagatcagccacacccagaaagccaccctcgtgtgcctggctaccggcttctaccccgaccatgtggaactgtcttggtgggtcaacggcaaagaggtgcacagcggcgtgtgtaccgacccccagccactgaaagaacagcccgccctgaacgacagccggtactgcctgagcagcagactgagagtgtccgccaccttctggcagaacccccggaaccacttcagatgccaggtgcagttctacggcctgagcgagaacgacgagtggacccaggacagagccaagcccgtgacccagatcgtgtctgccgaagcctggggcagagccgattgcggctttaccagcgagagctaccagcagggcgtgctgagcgccaccatcctgtacgagatcctgctgggcaaggccaccctgtacgccgtgctggtgtctgccctggtgctgatggctatggtcaagcggaaggacagccggggaagggccaagcgatctggatctggagcaacaaacttctcactactcaaacaagcaggtgacgtggaggagaatcccgggcctactagtatggactggatttggcgcatccttttccttgtcggcgctgctaccggcgcgcattccgggccccagctccagctgcaagagtctggacctggcctggtcaagcctagcgagacactgagcctgacctgtaccgtgtccggcgatagcatcagcagcggcgattactactggggctggatcagacagcctcctggcaaaggactggaatggatcggccacatctactacagcggcgtgacctactacaaccccagcctgaagtccagagtgaccatcagcgtggacaccagccggaaccagttctccctgaagctgtctagcgtgacagccgccgataccgccgtgtactactgcaccagagaggacagcagcaactggcggagtagaggccagggaacactggtcacagttagctctggatccggcggaggcggaagtggaggcggaggatctggcggcggaggctctttcgaagaagtgcaactggtggaatctggcggcggactggtgcagcctggcggatctctgagactgagctgtgccgccagcggcttcaacatcaaggacacctacatccactgggtgcgccaggcccctggaaagggactggaatgggtggcccggatctaccccaccaacggctacaccagatacgccgacagcgtgaagggccggttcaccatcagcgccgacaccagcaagaataccgcctacctccagatgaacagcctgcgggccgaggataccgccgtgtactactgctcaagatggggaggcgacggcttctacgctatggacgtgtggggccagggcacccttgtgaccgtgtcatctacgcgtatccagaaccctgatcctgccgtgtaccagctgcgggatagcaagagcagcgacaagagcgtgtgtctgttcaccgacttcgacagccagaccaacgtgtcccagagcaaggactccgacgtgtacatcaccgataagtgcgtgctggacatgcggagcatggacttcaagagcaactccgccgtggcctggtccaacaagtccgatttcgcctgcgccaacgccttcaacaacagcattatccccgaggacacattcttcccaagccccgagagcagctgcgacgtgaagctggtggaaaagagcttcgagacagacaccaacctgaacttccagaacctgagcgtgatcggcttcagaatcctgctgctgaaagtggccggctttaacctgctgatgaccctgcggctgtggtccagc

SEQ ID NO: 2409 - DNA, 2673 bp, Artificial Sequence
  Synthetic Polynucloetide
atggccttaccagtgaccgccttgctcctgccgctggccttgctgctccacgccgccaggccggaagtgcagctggttgaatctggcggaggactggttcagcctggcggatctctgagactgtcttgtgccgccagcggcttcagcttcagcgacttttggatgagctgggtccgacaggcccctggcaaaggacttgaatgggtcgccacaatcagccaggccggcagcgagaaggactacgtggactctgtgaagggcagattcaccatcagccgggacaacgccaagaagtccctgtacctccagatgaacagcctgagagccgaggacaccgccgtgtactattgtgcctctggcgtgtacagcttcgactacagaggccagggcaccctggtcacagtctcttctggtaccggcggaggcggatctggcggcggaggtagcggtggcggaggatctgaattcgaccagagcgtgctgacacagcctcctagcgtgtcagtggcccctggcaagaccgccagaatcccctgcgagggcaactacatcggcagcagcaacgtgcactggtatcagcagaagcccggccaggctcccgtgctcgtgatccacttcgacagcgacagacccagcggcatccccgacagattcagcggcagcaacagcggcaacatggctaccctgaccatcagcagagtggaagccggggacgaggccgactactactgtcaagtgtgggagaaccacggctgggtgttcggcggaggcaccaagctgacagtgctgtctctcgaggacctgaagaacgtgttcccacctgaggtggccgtgttcgagcctagcgaggccgagatcagccacacccagaaagccaccctcgtgtgcctggctaccggcttctaccccgaccatgtggaactgtcttggtgggtcaacggcaaagaggtgcacagcggcgtgtgtaccgacccccagccactgaaagaacagcccgccctgaacgacagccggtactgcctgagcagcagactgagagtgtccgccaccttctggcagaacccccggaaccacttcagatgccaggtgcagttctacggcctgagcgagaacgacgagtggacccaggacagagccaagcccgtgacccagatcgtgtctgccgaagcctggggcagagccgattgcggctttaccagcgagagctaccagcagggcgtgctgagcgccaccatcctgtacgagatcctgctgggcaaggccaccctgtacgccgtgctggtgtctgccctggtgctgatggctatggtcaagcggaaggacagccggggaagggccaagcgatctggatctggagcaacaaacttctcactactcaaacaagcaggtgacgtggaggagaatcccgggcctactagtatggactggatttggcgcatccttttccttgtcggcgctgctaccggcgcgcattccgggccccagctccagctgcaagagtctggacctggcctggtcaagcctagcgagacactgagcctgacctgtaccgtgtccggcgatagcatcagcagcggcgattactactggggctggatcagacagcctcctggcaaaggactggaatggatcggccacatctactacagcggcgtgacctactacaaccccagcctgaagtccagagtgaccatcagcgtggacaccagccggaaccagttctccctgaagctgtctagcgtgacagccgccgataccgccgtgtactactgcaccagagaggacagcagcaactggcggagtagaggccagggaacactggtcacagttagctctggatccggcggaggcggaagtggaggcggaggatctggcggcggaggctctttcgaagaggtgcaactggtggaaacaggcggcggactggtgcagcctggcgagtctctgagactgagctgtgccgccagcggcttcaccttcagcgactacgagatgaactgggtgcgccaggcccctggaaagggcctggaatgggtgtcctacatcagcagctccggcagcaccatctactacgccgacagcgtgaagggccggtttaccatctaccgggacaacgccaagaacagcctgtacctccagatgaactccctgcgggccgaggacaccgccctgtactattgtgccagagcctggggcgtgggaccccctgattattggggacagggcaccctcgtgaccgtgtcctctacgcgtatccagaaccctgatcctgccgtgtaccagctgcgggatagcaagagcagcgacaagagcgtgtgtctgttcaccgacttcgacagccagaccaacgtgtcccagagcaaggactccgacgtgtacatcaccgataagtgcgtgctggacatgcggagcatggacttcaagagcaactccgccgtggcctggtccaacaagtccgatttcgcctgcgccaacgccttcaacaacagcattatccccgaggacacattcttcccaagccccgagagcagctgcgacgtgaagctggtggaaaagagcttcgagacagacaccaacctgaacttccagaacctgagcgtgatcggcttcagaatcctgctgctgaaagtggccggctttaacctgctgatgaccctgcggctgtggtccagc

SEQ ID NO: 2410 - DNA, 2697 bp, Artificial Sequence
  Synthetic Polynucloetide
atggccttaccagtgaccgccttgctcctgccgctggccttgctgctccacgccgccaggccggaagtgcagctggttgaatctggcggaggactggttcagcctggcggatctctgagactgtcttgtgccgccagcggcttcagcttcagcgacttttggatgagctgggtccgacaggcccctggcaaaggacttgaatgggtcgccacaatcagccaggccggcagcgagaaggactacgtggactctgtgaagggcagattcaccatcagccgggacaacgccaagaagtccctgtacctccagatgaacagcctgagagccgaggacaccgccgtgtactattgtgcctctggcgtgtacagcttcgactacagaggccagggcaccctggtcacagtctcttctggtaccggcggaggcggatctggcggcggaggtagcggtggcggaggatctgaattcgacatccagatgacccagagccccagcagcctgtctgccagcgtgggcgataccgtgaccatcacctgtcaggccaacggctacctgaactggtatcagcagcggagaggcaaggcccccaagctgctgatctacgacggcagcaagctggaaagaggcgtgcccagcagattcagcggcagaagatggggccaggagtacaacctgaccatcaacaacctccagcccgaggatattgccacatacttttgccaggtgtacgagttcgtggtgcccggcacacggctggacctgaagagaacagtggctgctcctctcgaggacctgaagaacgtgttcccacctgaggtggccgtgttcgagcctagcgaggccgagatcagccacacccagaaagccaccctcgtgtgcctggctaccggcttctaccccgaccatgtggaactgtcttggtgggtcaacggcaaagaggtgcacagcggcgtgtgtaccgacccccagccactgaaagaacagcccgccctgaacgacagccggtactgcctgagcagcagactgagagtgtccgccaccttctggcagaacccccggaaccacttcagatgccaggtgcagttctacggcctgagcgagaacgacgagtggacccaggacagagccaagcccgtgacccagatcgtgtctgccgaagcctggggcagagccgattgcggctttaccagcgagagctaccagcagggcgtgctgagcgccaccatcctgtacgagatcctgctgggcaaggccaccctgtacgccgtgctggtgtctgccctggtgctgatggctatggtcaagcggaaggacagccggggaagggccaagcgatctggatctggagcaacaaacttctcactactcaaacaagcaggtgacgtggaggagaatcccgggcctactagtatggactggatttggcgcatccttttccttgtcggcgctgctaccggcgcgcattccgggccccagctccagctgcaagagtctggacctggcctggtcaagcctagcgagacactgagcctgacctgtaccgtgtccggcgatagcatcagcagcggcgattactactggggctggatcagacagcctcctggcaaaggactggaatggatcggccacatctactacagcggcgtgacctactacaaccccagcctgaagtccagagtgaccatcagcgtggacaccagccggaaccagttctccctgaagctgtctagcgtgacagccgccgataccgccgtgtactactgcaccagagaggacagcagcaactggcggagtagaggccagggaacactggtcacagttagctctggatccggcggaggcggaagtggaggcggaggatctggcggcggaggctctttcgaacaggtgcagctgctccagtctggcgctgccgtgacaaagcctggcgcttctgtgcgggtgtcctgtgaagccagcggctacaacatccgggactacttcatccactggtggcggcaggctccaggccagggactccagtgggtgggatggatcaaccccaagaccggccagcccaacaaccccagacagttccagggcagagtgtccctgaccagacacgccagctgggacttcgacaccttcagcttctacatggatctgaaggccctgcggagcgacgataccgccgtgtacttctgcgccagacagagaagcgactactgggatttcgacgtgtggggcagcggcacccaagtgacagtgtctagcgccagcaccaagggacccacgcgtatccagaaccctgatcctgccgtgtaccagctgcgggatagcaagagcagcgacaagagcgtgtgtctgttcaccgacttcgacagccagaccaacgtgtcccagagcaaggactccgacgtgtacatcaccgataagtgcgtgctggacatgcggagcatggacttcaagagcaactccgccgtggcctggtccaacaagtccgatttcgcctgcgccaacgccttcaacaacagcattatccccgaggacacattcttcccaagccccgagagcagctgcgacgtgaagctggtggaaaagagcttcgagacagacaccaacctgaacttccagaacctgagcgtgatcggcttcagaatcctgctgctgaaagtggccggctttaacctgctgatgaccctgcggctgtggtccagc

SEQ ID NO: 2411 - DNA, 2715 bp, Artificial Sequence
  Synthetic Polynucloetide
atggccttaccagtgaccgccttgctcctgccgctggccttgctgctccacgccgccaggccggaagtgcagctggttgaatctggcggaggactggttcagcctggcggatctctgagactgtcttgtgccgccagcggcttcagcttcagcgacttttggatgagctgggtccgacaggcccctggcaaaggacttgaatgggtcgccacaatcagccaggccggcagcgagaaggactacgtggactctgtgaagggcagattcaccatcagccgggacaacgccaagaagtccctgtacctccagatgaacagcctgagagccgaggacaccgccgtgtactattgtgcctctggcgtgtacagcttcgactacagaggccagggcaccctggtcacagtctcttctggtaccggcggaggcggatctggcggcggaggtagcggtggcggaggatctgaattccagtctgccctgacacagcctcctagcgcctctggctctcccggccagagcatcaccatcagctgtaccggcaccagcaacaacttcgtgtcctggtatcagcagcacgccggcaaggcccccaagctcgtgatctacgacgtgaacaagcggcccagcggcgtgcccgatagattcagcggcagcaagagcggcaacaccgccagcctgacagtgtctggcctccagaccgatgacgaggccgtgtactactgcggcagcctcgtgggcaactgggacgtgatctttggcggaggcaccaagctgaccgtgctgctcgaggacctgaagaacgtgttcccacctgaggtggccgtgttcgagcctagcgaggccgagatcagccacacccagaaagccaccctcgtgtgcctggctaccggcttctaccccgaccatgtggaactgtcttggtgggtcaacggcaaagaggtgcacagcggcgtgtgtaccgacccccagccactgaaagaacagcccgccctgaacgacagccggtactgcctgagcagcagactgagagtgtccgccaccttctggcagaacccccggaaccacttcagatgccaggtgcagttctacggcctgagcgagaacgacgagtggacccaggacagagccaagcccgtgacccagatcgtgtctgccgaagcctggggcagagccgattgcggctttaccagcgagagctaccagcagggcgtgctgagcgccaccatcctgtacgagatcctgctgggcaaggccaccctgtacgccgtgctggtgtctgccctggtgctgatggctatggtcaagcggaaggacagccggggaagggccaagcgatctggatctggagcaacaaacttctcactactcaaacaagcaggtgacgtggaggagaatcccgggcctactagtatggactggatttggcgcatccttttccttgtcggcgctgctaccggcgcgcattccgggccccagctccagctgcaagagtctggacctggcctggtcaagcctagcgagacactgagcctgacctgtaccgtgtccggcgatagcatcagcagcggcgattactactggggctggatcagacagcctcctggcaaaggactggaatggatcggccacatctactacagcggcgtgacctactacaaccccagcctgaagtccagagtgaccatcagcgtggacaccagccggaaccagttctccctgaagctgtctagcgtgacagccgccgataccgccgtgtactactgcaccagagaggacagcagcaactggcggagtagaggccagggaacactggtcacagttagctctggatccggcggaggcggaagtggaggcggaggatctggcggcggaggctctttcgaacagccccagctccaggaatctggccccacactggtggaagccagcgagacactgagcctgacctgtgccgtgtccggcgattctaccgccgcctgcaatagcttctggggctgggtgcgccagcctcctggaaagggactggaatgggtgggaagcctgagccactgcgccagctattggaaccggggctggacctaccacaaccccagcctgaagtccagactgaccctggccctggacacccccaagaacctggtgttcctgaagctgaacagcgtgacagccgccgacaccgccacctactactgtgccagatttggcggcgaggtgctgcggtacaccgactggcctaaacctgcctgggtggacctgtggggcagaggaacactcgtgaccgtgtccagcacgcgtatccagaaccctgatcctgccgtgtaccagctgcgggatagcaagagcagcgacaagagcgtgtgtctgttcaccgacttcgacagccagaccaacgtgtcccagagcaaggactccgacgtgtacatcaccgataagtgcgtgctggacatgcggagcatggacttcaagagcaactccgccgtggcctggtccaacaagtccgatttcgcctgcgccaacgccttcaacaacagcattatccccgaggacacattcttcccaagccccgagagcagctgcgacgtgaagctggtggaaaagagcttcgagacagacaccaacctgaacttccagaacctgagcgtgatcggcttcagaatcctgctgctgaaagtggccggctttaacctgctgatgaccctgcggctgtggtccagc

SEQ ID NO: 2412 - DNA, 2670 bp, Artificial Sequence
  Synthetic Polynucloetide
atggccttaccagtgaccgccttgctcctgccgctggccttgctgctccacgccgccaggccggaagtgcagctggttgaatctggcggaggactggttcagcctggcggatctctgagactgtcttgtgccgccagcggcttcagcttcagcgacttttggatgagctgggtccgacaggcccctggcaaaggacttgaatgggtcgccacaatcagccaggccggcagcgagaaggactacgtggactctgtgaagggcagattcaccatcagccgggacaacgccaagaagtccctgtacctccagatgaacagcctgagagccgaggacaccgccgtgtactattgtgcctctggcgtgtacagcttcgactacagaggccagggcaccctggtcacagtctcttctggtaccggcggaggcggatctggcggcggaggtagcggtggcggaggatctgaattcgagatcgtgctgacacagagccctggcaccctgagcctgtctccaggcgagacagccatcatcagctgccggacaagccagtacggcagcctggcctggtatcagcagaggccaggacaggcccccagactcgtgatctacagcggcagcacaagagccgccggaatccccgatagattcagcggctccagatggggacccgactacaacctgaccatcagcaacctggaaagcggcgacttcggcgtgtactactgccagcagtacgagttcttcggccagggcaccaaggtgcaggtggacatcaaaagactcgaggacctgaagaacgtgttcccacctgaggtggccgtgttcgagcctagcgaggccgagatcagccacacccagaaagccaccctcgtgtgcctggctaccggcttctaccccgaccatgtggaactgtcttggtgggtcaacggcaaagaggtgcacagcggcgtgtgtaccgacccccagccactgaaagaacagcccgccctgaacgacagccggtactgcctgagcagcagactgagagtgtccgccaccttctggcagaacccccggaaccacttcagatgccaggtgcagttctacggcctgagcgagaacgacgagtggacccaggacagagccaagcccgtgacccagatcgtgtctgccgaagcctggggcagagccgattgcggctttaccagcgagagctaccagcagggcgtgctgagcgccaccatcctgtacgagatcctgctgggcaaggccaccctgtacgccgtgctggtgtctgccctggtgctgatggctatggtcaagcggaaggacagccggggaagggccaagcgatctggatctggagcaacaaacttctcactactcaaacaagcaggtgacgtggaggagaatcccgggcctactagtatggactggatttggcgcatccttttccttgtcggcgctgctaccggcgcgcattccgggccccagctccagctgcaagagtctggacctggcctggtcaagcctagcgagacactgagcctgacctgtaccgtgtccggcgatagcatcagcagcggcgattactactggggctggatcagacagcctcctggcaaaggactggaatggatcggccacatctactacagcggcgtgacctactacaaccccagcctgaagtccagagtgaccatcagcgtggacaccagccggaaccagttctccctgaagctgtctagcgtgacagccgccgataccgccgtgtactactgcaccagagaggacagcagcaactggcggagtagaggccagggaacactggtcacagttagctctggatccggcggaggcggaagtggaggcggaggatctggcggcggaggctctttcgaacaggtgcagctggtgcagtctggcggccagatgaagaaacccggcgagagcatgagaatcagctgtcgggcctccggctacgagttcatcgactgcaccctgaactggatcagactggcccctggcaagcggcctgagtggatgggatggctgaagcctagaggcggagccgtgaactacgccagacctctccagggcagagtgaccatgaccagggacgtgtacagcgataccgccttcctggaactgcggagcctgaccgtggatgataccgccgtgtacttctgcaccagaggcaagaactgcgattacaactgggacttcgagcactggggcagaggcacccctgtgatcgtgtctagcacgcgtatccagaaccctgatcctgccgtgtaccagctgcgggatagcaagagcagcgacaagagcgtgtgtctgttcaccgacttcgacagccagaccaacgtgtcccagagcaaggactccgacgtgtacatcaccgataagtgcgtgctggacatgcggagcatggacttcaagagcaactccgccgtggcctggtccaacaagtccgatttcgcctgcgccaacgccttcaacaacagcattatccccgaggacacattcttcccaagccccgagagcagctgcgacgtgaagctggtggaaaagagcttcgagacagacaccaacctgaacttccagaacctgagcgtgatcggcttcagaatcctgctgctgaaagtggccggctttaacctgctgatgaccctgcggctgtggtccagc

SEQ ID NO: 2413 - DNA, 2700 bp, Artificial Sequence
  Synthetic Polynucloetide
atggccttaccagtgaccgccttgctcctgccgctggccttgctgctccacgccgccaggccggaagtgcagctggttgaatctggcggaggactggttcagcctggcggatctctgagactgtcttgtgccgccagcggcttcagcttcagcgacttttggatgagctgggtccgacaggcccctggcaaaggacttgaatgggtcgccacaatcagccaggccggcagcgagaaggactacgtggactctgtgaagggcagattcaccatcagccgggacaacgccaagaagtccctgtacctccagatgaacagcctgagagccgaggacaccgccgtgtactattgtgcctctggcgtgtacagcttcgactacagaggccagggcaccctggtcacagtctcttctggtaccggcggaggcggatctggcggcggaggtagcggtggcggaggatctgaattcgagctggtgctgacacagagccctggcaccctgtctctgtctgccggcgaaagagccaccctgagctgtagagccagccagagcgtgtcctctggcagcctggcttggtatcagcagaagccaggccaggcccccagactgctgatctacggcgcttctaccagagccaccggcatccccgatagattcagcggctctggctccggcaccgacttcaccctgacaatcggcagactggaacccgaggacctggccgtgtactactgccagcagtacggcaccagcccctacacattcggccagggcaccaagctggaaatcctcgaggacctgaagaacgtgttcccacctgaggtggccgtgttcgagcctagcgaggccgagatcagccacacccagaaagccaccctcgtgtgcctggctaccggcttctaccccgaccatgtggaactgtcttggtgggtcaacggcaaagaggtgcacagcggcgtgtgtaccgacccccagccactgaaagaacagcccgccctgaacgacagccggtactgcctgagcagcagactgagagtgtccgccaccttctggcagaacccccggaaccacttcagatgccaggtgcagttctacggcctgagcgagaacgacgagtggacccaggacagagccaagcccgtgacccagatcgtgtctgccgaagcctggggcagagccgattgcggctttaccagcgagagctaccagcagggcgtgctgagcgccaccatcctgtacgagatcctgctgggcaaggccaccctgtacgccgtgctggtgtctgccctggtgctgatggctatggtcaagcggaaggacagccggggaagggccaagcgatctggatctggagcaacaaacttctcactactcaaacaagcaggtgacgtggaggagaatcccgggcctactagtatggactggatttggcgcatccttttccttgtcggcgctgctaccggcgcgcattccgggccccagctccagctgcaagagtctggacctggcctggtcaagcctagcgagacactgagcctgacctgtaccgtgtccggcgatagcatcagcagcggcgattactactggggctggatcagacagcctcctggcaaaggactggaatggatcggccacatctactacagcggcgtgacctactacaaccccagcctgaagtccagagtgaccatcagcgtggacaccagccggaaccagttctccctgaagctgtctagcgtgacagccgccgataccgccgtgtactactgcaccagagaggacagcagcaactggcggagtagaggccagggaacactggtcacagttagctctggatccggcggaggcggaagtggaggcggaggatctggcggcggaggctctttcgaactggaacagagcggagccgaagtgaagaaacccggcagcagcgtgcaggtgtcctgcaaagcaagcggcggcaccttctctatgtacggcttcaactgggtgcgccaggctcctggacacggcctggaatggatgggcggcatcatccccatcttcggcacctccaactacgcccagaaattccggggcagagtgaccttcaccgccgaccaggccacaagcaccgcctacatggaactgaccaacctgcggagcgacgacaccgccgtgtattattgcgccagagacttcggccccgactgggaggatggcgacagctacgatggcagcggcagaggcttcttcgacttctggggccagggaacccttgtgaccgtgtcctcaacgcgtatccagaaccctgatcctgccgtgtaccagctgcgggatagcaagagcagcgacaagagcgtgtgtctgttcaccgacttcgacagccagaccaacgtgtcccagagcaaggactccgacgtgtacatcaccgataagtgcgtgctggacatgcggagcatggacttcaagagcaactccgccgtggcctggtccaacaagtccgatttcgcctgcgccaacgccttcaacaacagcattatccccgaggacacattcttcccaagccccgagagcagctgcgacgtgaagctggtggaaaagagcttcgagacagacaccaacctgaacttccagaacctgagcgtgatcggcttcagaatcctgctgctgaaagtggccggctttaacctgctgatgaccctgcggctgtggtccagc

SEQ ID NO: 2414 - DNA, 2640 bp, Artificial Sequence
  Synthetic Polynucloetide
atggccttaccagtgaccgccttgctcctgccgctggccttgctgctccacgccgccaggccggaagtgcagctggttgaatctggcggaggactggttcagcctggcggatctctgagactgtcttgtgccgccagcggcttcagcttcagcgacttttggatgagctgggtccgacaggcccctggcaaaggacttgaatgggtcgccacaatcagccaggccggcagcgagaaggactacgtggactctgtgaagggcagattcaccatcagccgggacaacgccaagaagtccctgtacctccagatgaacagcctgagagccgaggacaccgccgtgtactattgtgcctctggcgtgtacagcttcgactacagaggccagggcaccctggtcacagtctcttctggtaccggcggaggcggatctggcggcggaggtagcggtggcggaggatctgaattcgacatccagatgacccagagccccagcagcctgtctgccagcgtgggcgacagagtgaccatcacctgtcaggccagccaggacatcaacaactacctgaactggtatcagcagaagcccggcaaggcccccaagctgctgatctacgacgccagcaatctgcagaccggcgtgcccagcagattttccggctctggcagcggcaccgacttcaccttcaccatcgaggacattgccacctactactgccagcagtacaccttcggccctggcaccaaggtggacatcaaactcgaggacctgaagaacgtgttcccacctgaggtggccgtgttcgagcctagcgaggccgagatcagccacacccagaaagccaccctcgtgtgcctggctaccggcttctaccccgaccatgtggaactgtcttggtgggtcaacggcaaagaggtgcacagcggcgtgtgtaccgacccccagccactgaaagaacagcccgccctgaacgacagccggtactgcctgagcagcagactgagagtgtccgccaccttctggcagaacccccggaaccacttcagatgccaggtgcagttctacggcctgagcgagaacgacgagtggacccaggacagagccaagcccgtgacccagatcgtgtctgccgaagcctggggcagagccgattgcggctttaccagcgagagctaccagcagggcgtgctgagcgccaccatcctgtacgagatcctgctgggcaaggccaccctgtacgccgtgctggtgtctgccctggtgctgatggctatggtcaagcggaaggacagccggggaagggccaagcgatctggatctggagcaacaaacttctcactactcaaacaagcaggtgacgtggaggagaatcccgggcctactagtatggactggatttggcgcatccttttccttgtcggcgctgctaccggcgcgcattccgggccccagctccagctgcaagagtctggacctggcctggtcaagcctagcgagacactgagcctgacctgtaccgtgtccggcgatagcatcagcagcggcgattactactggggctggatcagacagcctcctggcaaaggactggaatggatcggccacatctactacagcggcgtgacctactacaaccccagcctgaagtccagagtgaccatcagcgtggacaccagccggaaccagttctccctgaagctgtctagcgtgacagccgccgataccgccgtgtactactgcaccagagaggacagcagcaactggcggagtagaggccagggaacactggtcacagttagctctggatccggcggaggcggaagtggaggcggaggatctggcggcggaggctctttcgaagaagtgcaactgctggaatctggcggcggactggtgcagcctggcggatctctgagactgagctgtgccgccagcggcttcacctttagctggtacagcatgacctgggtgcgccaggcccctggcaaaggactggaatgggtgtccagcatcgtgccctggggcgatttcacccagtacgccgatagcgtgaagggccggttcaccatcagccgggacaacagcaagaacaccctgtacctgcagatgaacagcctgcgggccgaggacaccgccgtgtactattgtgccaagggacctggctggggcagcttcgatctgtggggcagaggaacccttgtgaccgtgtccagcacgcgtatccagaaccctgatcctgccgtgtaccagctgcgggatagcaagagcagcgacaagagcgtgtgtctgttcaccgacttcgacagccagaccaacgtgtcccagagcaaggactccgacgtgtacatcaccgataagtgcgtgctggacatgcggagcatggacttcaagagcaactccgccgtggcctggtccaacaagtccgatttcgcctgcgccaacgccttcaacaacagcattatccccgaggacacattcttcccaagccccgagagcagctgcgacgtgaagctggtggaaaagagcttcgagacagacaccaacctgaacttccagaacctgagcgtgatcggcttcagaatcctgctgctgaaagtggccggctttaacctgctgatgaccctgcggctgtggtccagc

SEQ ID NO: 2415 - DNA, 2670 bp, Artificial Sequence
  Synthetic Polynucloetide
atggccttaccagtgaccgccttgctcctgccgctggccttgctgctccacgccgccaggccggaagtgcagctggttgaatctggcggaggactggttcagcctggcggatctctgagactgtcttgtgccgccagcggcttcagcttcagcgacttttggatgagctgggtccgacaggcccctggcaaaggacttgaatgggtcgccacaatcagccaggccggcagcgagaaggactacgtggactctgtgaagggcagattcaccatcagccgggacaacgccaagaagtccctgtacctccagatgaacagcctgagagccgaggacaccgccgtgtactattgtgcctctggcgtgtacagcttcgactacagaggccagggcaccctggtcacagtctcttctggtaccggcggaggcggatctggcggcggaggtagcggtggcggaggatctgaattcgacatccagatgacccagagccccagcagcctgtctgccagcgtgggcgacagagtgaccatcacctgtaccgccagcctgagcgtgtccagcacctacctgcactggtatcagcagaagcccggcagcagccccaagctgtggatctacagcaccagcaacctggcctccggcgtgcccagcagattttctggcagcggctctggcaccagctacaccctgaccatcagctccctccagcccgaggacttcgccacctactactgccaccagtaccacagaagccccctgacctttggcggaggcaccaaggtggaaatcaagagactcgaggacctgaagaacgtgttcccacctgaggtggccgtgttcgagcctagcgaggccgagatcagccacacccagaaagccaccctcgtgtgcctggctaccggcttctaccccgaccatgtggaactgtcttggtgggtcaacggcaaagaggtgcacagcggcgtgtgtaccgacccccagccactgaaagaacagcccgccctgaacgacagccggtactgcctgagcagcagactgagagtgtccgccaccttctggcagaacccccggaaccacttcagatgccaggtgcagttctacggcctgagcgagaacgacgagtggacccaggacagagccaagcccgtgacccagatcgtgtctgccgaagcctggggcagagccgattgcggctttaccagcgagagctaccagcagggcgtgctgagcgccaccatcctgtacgagatcctgctgggcaaggccaccctgtacgccgtgctggtgtctgccctggtgctgatggctatggtcaagcggaaggacagccggggaagggccaagcgatctggatctggagcaacaaacttctcactactcaaacaagcaggtgacgtggaggagaatcccgggcctactagtatggactggatttggcgcatccttttccttgtcggcgctgctaccggcgcgcattccgggccccagctccagctgcaagagtctggacctggcctggtcaagcctagcgagacactgagcctgacctgtaccgtgtccggcgatagcatcagcagcggcgattactactggggctggatcagacagcctcctggcaaaggactggaatggatcggccacatctactacagcggcgtgacctactacaaccccagcctgaagtccagagtgaccatcagcgtggacaccagccggaaccagttctccctgaagctgtctagcgtgacagccgccgataccgccgtgtactactgcaccagagaggacagcagcaactggcggagtagaggccagggaacactggtcacagttagctctggatccggcggaggcggaagtggaggcggaggatctggcggcggaggctctttcgaagaagtgcaactggtggaatctggcggcggactggtgcagcctggcggatctctgagactgagctgtgccgccagcggcttcagcctgaccaaatacggcgtgcactgggtgcgccaggcccctggaaaaggactggaatgggtgggagtgaagtgggctggcggctccaccgactacaacagcgccctgatgagccggttcaccatcagcaaggacaacgccaagaacagcctgtacctccagatgaactccctgcgggccgaggacaccgccgtgtactactgtgccagagatcaccgggacgctatggactactggggccagggaacactcgtgaccgtgtcctctacgcgtatccagaaccctgatcctgccgtgtaccagctgcgggatagcaagagcagcgacaagagcgtgtgtctgttcaccgacttcgacagccagaccaacgtgtcccagagcaaggactccgacgtgtacatcaccgataagtgcgtgctggacatgcggagcatggacttcaagagcaactccgccgtggcctggtccaacaagtccgatttcgcctgcgccaacgccttcaacaacagcattatccccgaggacacattcttcccaagccccgagagcagctgcgacgtgaagctggtggaaaagagcttcgagacagacaccaacctgaacttccagaacctgagcgtgatcggcttcagaatcctgctgctgaaagtggccggctttaacctgctgatgaccctgcggctgtggtccagc

SEQ ID NO: 2416 - DNA, 2682 bp, Artificial Sequence
  Synthetic Polynucloetide
atggccttaccagtgaccgccttgctcctgccgctggccttgctgctccacgccgccaggccggaagtgcagctggttgaatctggcggaggactggttcagcctggcggatctctgagactgtcttgtgccgccagcggcttcagcttcagcgacttttggatgagctgggtccgacaggcccctggcaaaggacttgaatgggtcgccacaatcagccaggccggcagcgagaaggactacgtggactctgtgaagggcagattcaccatcagccgggacaacgccaagaagtccctgtacctccagatgaacagcctgagagccgaggacaccgccgtgtactattgtgcctctggcgtgtacagcttcgactacagaggccagggcaccctggtcacagtctcttctggtaccggcggaggcggatctggcggcggaggtagcggtggcggaggatctgaattcgacatccagatgacccagagccccagcagcctgtctgccagcgtgggcgacagagtgaccatcacatgcaaggccagccaggacgtgggaacagccgtggcctggtatcagcagaagcctggcaaggcccccaagctgctgatctacagcgccagctacagatccaccggcgtgcccagcagattttccggctctggcagcggcaccgacttcaccctgaccatctctagcctccagcccgaggacttcgccacctactactgccagcaccactactccgccccctggacatttggcggaggcaccaaggtggaaatcaagctcgaggacctgaagaacgtgttcccacctgaggtggccgtgttcgagcctagcgaggccgagatcagccacacccagaaagccaccctcgtgtgcctggctaccggcttctaccccgaccatgtggaactgtcttggtgggtcaacggcaaagaggtgcacagcggcgtgtgtaccgacccccagccactgaaagaacagcccgccctgaacgacagccggtactgcctgagcagcagactgagagtgtccgccaccttctggcagaacccccggaaccacttcagatgccaggtgcagttctacggcctgagcgagaacgacgagtggacccaggacagagccaagcccgtgacccagatcgtgtctgccgaagcctggggcagagccgattgcggctttaccagcgagagctaccagcagggcgtgctgagcgccaccatcctgtacgagatcctgctgggcaaggccaccctgtacgccgtgctggtgtctgccctggtgctgatggctatggtcaagcggaaggacagccggggaagggccaagcgatctggatctggagcaacaaacttctcactactcaaacaagcaggtgacgtggaggagaatcccgggcctactagtatggactggatttggcgcatccttttccttgtcggcgctgctaccggcgcgcattccgggccccagctccagctgcaagagtctggacctggcctggtcaagcctagcgagacactgagcctgacctgtaccgtgtccggcgatagcatcagcagcggcgattactactggggctggatcagacagcctcctggcaaaggactggaatggatcggccacatctactacagcggcgtgacctactacaaccccagcctgaagtccagagtgaccatcagcgtggacaccagccggaaccagttctccctgaagctgtctagcgtgacagccgccgataccgccgtgtactactgcaccagagaggacagcagcaactggcggagtagaggccagggaacactggtcacagttagctctggatccggcggaggcggaagtggaggcggaggatctggcggcggaggctctttcgaagaagtgcaactggtggaatcaggcggcggactggtgcagcctggcggatctctgagactgagctgtgccgccagcggcttcaccttcagcagaaacggcatgagctgggtgcgccaggcccctggaaaaggactggaatgggtggcaaccgtgtccagcggcggcagctacatctactacgccgacagcgtgaagggccggttcaccatctccagagacaacgccaagaacagcctgtacctccagatgaactccctgcgggccgaggacaccgccgtgtactattgtgccagacagggcaccaccgccctggctaccagattcttcgatgtgtggggccagggcaccctcgtgaccgtgtcatctacgcgtatccagaaccctgatcctgccgtgtaccagctgcgggatagcaagagcagcgacaagagcgtgtgtctgttcaccgacttcgacagccagaccaacgtgtcccagagcaaggactccgacgtgtacatcaccgataagtgcgtgctggacatgcggagcatggacttcaagagcaactccgccgtggcctggtccaacaagtccgatttcgcctgcgccaacgccttcaacaacagcattatccccgaggacacattcttcccaagccccgagagcagctgcgacgtgaagctggtggaaaagagcttcgagacagacaccaacctgaacttccagaacctgagcgtgatcggcttcagaatcctgctgctgaaagtggccggctttaacctgctgatgaccctgcggctgtggtccagc

SEQ ID NO: 2417 - DNA, 2670 bp, Artificial Sequence
  Synthetic Polynucloetide
atggccttaccagtgaccgccttgctcctgccgctggccttgctgctccacgccgccaggccggaagtgcagctggttgaatctggcggaggactggttcagcctggcggatctctgagactgtcttgtgccgccagcggcttcagcttcagcgacttttggatgagctgggtccgacaggcccctggcaaaggacttgaatgggtcgccacaatcagccaggccggcagcgagaaggactacgtggactctgtgaagggcagattcaccatcagccgggacaacgccaagaagtccctgtacctccagatgaacagcctgagagccgaggacaccgccgtgtactattgtgcctctggcgtgtacagcttcgactacagaggccagggcaccctggtcacagtctcttctggtaccggcggaggcggatctggcggcggaggtagcggtggcggaggatctgaattcgacatccagatgacccagagcccccctagcctgtctgcctctgtgggcggcaaagtgaccatcacatgcaaggccagccaggacatcgaccgctacatggcctggtatcaggacaagcccggcaagggacccaagctgctgatccacgataccagcaccctccagcccggcatccccagcagattttctggcagcggctccggcagagactacagcttcagcatcagcaacctggaacccgaggacattgccacctactactgcctccagtacgacaacctgtggaccttcggcggaggcaccaagctggaaatcaagagactcgaggacctgaagaacgtgttcccacctgaggtggccgtgttcgagcctagcgaggccgagatcagccacacccagaaagccaccctcgtgtgcctggctaccggcttctaccccgaccatgtggaactgtcttggtgggtcaacggcaaagaggtgcacagcggcgtgtgtaccgacccccagccactgaaagaacagcccgccctgaacgacagccggtactgcctgagcagcagactgagagtgtccgccaccttctggcagaacccccggaaccacttcagatgccaggtgcagttctacggcctgagcgagaacgacgagtggacccaggacagagccaagcccgtgacccagatcgtgtctgccgaagcctggggcagagccgattgcggctttaccagcgagagctaccagcagggcgtgctgagcgccaccatcctgtacgagatcctgctgggcaaggccaccctgtacgccgtgctggtgtctgccctggtgctgatggctatggtcaagcggaaggacagccggggaagggccaagcgatctggatctggagcaacaaacttctcactactcaaacaagcaggtgacgtggaggagaatcccgggcctactagtatggactggatttggcgcatccttttccttgtcggcgctgctaccggcgcgcattccgggccccagctccagctgcaagagtctggacctggcctggtcaagcctagcgagacactgagcctgacctgtaccgtgtccggcgatagcatcagcagcggcgattactactggggctggatcagacagcctcctggcaaaggactggaatggatcggccacatctactacagcggcgtgacctactacaaccccagcctgaagtccagagtgaccatcagcgtggacaccagccggaaccagttctccctgaagctgtctagcgtgacagccgccgataccgccgtgtactactgcaccagagaggacagcagcaactggcggagtagaggccagggaacactggtcacagttagctctggatccggcggaggcggaagtggaggcggaggatctggcggcggaggctctttcgaacaggtgcaactggtgcagagcggagccgagcttgtgaagcctggcgcttccgtgaagatgagctgcaaagccagcggctacatcttcaccaactacaacatccactgggtcaagaagtccccaggccagggcctggaatggatcggagccatctaccccggaaacggcgacgccccttacagccagaagttccaggacagagccaccctgaccgccgacaccagcagcagcaccacctacatggaactgagcagcctgaccagcgaggacagcgccgtgtactattgcgtgcgggccaactgggatgtggccttcgcctattggggccagggcacactggtgtccgtgtcctctacgcgtatccagaaccctgatcctgccgtgtaccagctgcgggatagcaagagcagcgacaagagcgtgtgtctgttcaccgacttcgacagccagaccaacgtgtcccagagcaaggactccgacgtgtacatcaccgataagtgcgtgctggacatgcggagcatggacttcaagagcaactccgccgtggcctggtccaacaagtccgatttcgcctgcgccaacgccttcaacaacagcattatccccgaggacacattcttcccaagccccgagagcagctgcgacgtgaagctggtggaaaagagcttcgagacagacaccaacctgaacttccagaacctgagcgtgatcggcttcagaatcctgctgctgaaagtggccggctttaacctgctgatgaccctgcggctgtggtccagc

SEQ ID NO: 2418 - DNA, 2673 bp, Artificial Sequence
  Synthetic Polynucloetide
atggccttaccagtgaccgccttgctcctgccgctggccttgctgctccacgccgccaggccggaagtgcagctggttgaatctggcggaggactggttcagcctggcggatctctgagactgtcttgtgccgccagcggcttcagcttcagcgacttttggatgagctgggtccgacaggcccctggcaaaggacttgaatgggtcgccacaatcagccaggccggcagcgagaaggactacgtggactctgtgaagggcagattcaccatcagccgggacaacgccaagaagtccctgtacctccagatgaacagcctgagagccgaggacaccgccgtgtactattgtgcctctggcgtgtacagcttcgactacagaggccagggcaccctggtcacagtctcttctggtaccggcggaggcggatctggcggcggaggtagcggtggcggaggatctgaattcgacatccagatgacccagagccctgccagcctgtctgcctctgtgggcgagacagtgaccatcacctgtcgggtgtccggcaacatccacaactacctggcctggtatcagcagaagcagggcaagagcccccaactgctggtgtacaacgccaagaccctggccgatggcgtgcccagcagattttctggctctggcagcggcacccagtacagcctgaagatcaacagcctccagcccgaggacttcggcagctactactgccagcacttctggtccaacccctacaccttcggcggaggcaccaagctggaaatcaagctcgaggacctgaagaacgtgttcccacctgaggtggccgtgttcgagcctagcgaggccgagatcagccacacccagaaagccaccctcgtgtgcctggctaccggcttctaccccgaccatgtggaactgtcttggtgggtcaacggcaaagaggtgcacagcggcgtgtgtaccgacccccagccactgaaagaacagcccgccctgaacgacagccggtactgcctgagcagcagactgagagtgtccgccaccttctggcagaacccccggaaccacttcagatgccaggtgcagttctacggcctgagcgagaacgacgagtggacccaggacagagccaagcccgtgacccagatcgtgtctgccgaagcctggggcagagccgattgcggctttaccagcgagagctaccagcagggcgtgctgagcgccaccatcctgtacgagatcctgctgggcaaggccaccctgtacgccgtgctggtgtctgccctggtgctgatggctatggtcaagcggaaggacagccggggaagggccaagcgatctggatctggagcaacaaacttctcactactcaaacaagcaggtgacgtggaggagaatcccgggcctactagtatggactggatttggcgcatccttttccttgtcggcgctgctaccggcgcgcattccgggccccagctccagctgcaagagtctggacctggcctggtcaagcctagcgagacactgagcctgacctgtaccgtgtccggcgatagcatcagcagcggcgattactactggggctggatcagacagcctcctggcaaaggactggaatggatcggccacatctactacagcggcgtgacctactacaaccccagcctgaagtccagagtgaccatcagcgtggacaccagccggaaccagttctccctgaagctgtctagcgtgacagccgccgataccgccgtgtactactgcaccagagaggacagcagcaactggcggagtagaggccagggaacactggtcacagttagctctggatccggcggaggcggaagtggaggcggaggatctggcggcggaggctctttcgaacaggtgcaactccagcagtctggcgcttccgtgaaggtgtcctgcaaggccagcgaactcgtgcggcctggcacaggctacgccttcaccaattacctgatcgagtgggtcaagcagaggcccggacagggcctggaatggatcggagtgattaacccaggcagcggcggcaccaactacaacgagaagttcaagggcaaggccaccctgaccgccgacaagagcagcagcacagcctacatgcaactgagcagcctgaccagcgacgacagcgccgtgtacttctgcgcccggtacagaagctacgactggtacttcgacgtgtggggagccggcaccaccgtgacagtgtcatctacgcgtatccagaaccctgatcctgccgtgtaccagctgcgggatagcaagagcagcgacaagagcgtgtgtctgttcaccgacttcgacagccagaccaacgtgtcccagagcaaggactccgacgtgtacatcaccgataagtgcgtgctggacatgcggagcatggacttcaagagcaactccgccgtggcctggtccaacaagtccgatttcgcctgcgccaacgccttcaacaacagcattatccccgaggacacattcttcccaagccccgagagcagctgcgacgtgaagctggtggaaaagagcttcgagacagacaccaacctgaacttccagaacctgagcgtgatcggcttcagaatcctgctgctgaaagtggccggctttaacctgctgatgaccctgcggctgtggtccagc

SEQ ID NO: 2419 - DNA, 2670 bp, Artificial Sequence
  Synthetic Polynucloetide
atggccttaccagtgaccgccttgctcctgccgctggccttgctgctccacgccgccaggccggaagtgcagctggttgaatctggcggaggactggttcagcctggcggatctctgagactgtcttgtgccgccagcggcttcagcttcagcgacttttggatgagctgggtccgacaggcccctggcaaaggacttgaatgggtcgccacaatcagccaggccggcagcgagaaggactacgtggactctgtgaagggcagattcaccatcagccgggacaacgccaagaagtccctgtacctccagatgaacagcctgagagccgaggacaccgccgtgtactattgtgcctctggcgtgtacagcttcgactacagaggccagggcaccctggtcacagtctcttctggtaccggcggaggcggatctggcggcggaggtagcggtggcggaggatctgaattcgacatccagatgacccagagcttcagcagcctgagcgccagcgtgggcgacagagtgaccatcacctgtagagccagccaggacatcagcaactacctgaactggtatcagcagaagcccggcaaggcccccaagctgctgatctactacaccagcagactgcacagcggcgtgcccagcagattttctggcagcggctccggcaccgactacaccctgacaatcagctccctgcagcccgaggacttcgctacctacttctgtcagcaaggcaacaccctgccctggacctttggcggaggcaccaagctggaaatcaagagactcgaggacctgaagaacgtgttcccacctgaggtggccgtgttcgagcctagcgaggccgagatcagccacacccagaaagccaccctcgtgtgcctggctaccggcttctaccccgaccatgtggaactgtcttggtgggtcaacggcaaagaggtgcacagcggcgtgtgtaccgacccccagccactgaaagaacagcccgccctgaacgacagccggtactgcctgagcagcagactgagagtgtccgccaccttctggcagaacccccggaaccacttcagatgccaggtgcagttctacggcctgagcgagaacgacgagtggacccaggacagagccaagcccgtgacccagatcgtgtctgccgaagcctggggcagagccgattgcggctttaccagcgagagctaccagcagggcgtgctgagcgccaccatcctgtacgagatcctgctgggcaaggccaccctgtacgccgtgctggtgtctgccctggtgctgatggctatggtcaagcggaaggacagccggggaagggccaagcgatctggatctggagcaacaaacttctcactactcaaacaagcaggtgacgtggaggagaatcccgggcctactagtatggactggatttggcgcatccttttccttgtcggcgctgctaccggcgcgcattccgggccccagctccagctgcaagagtctggacctggcctggtcaagcctagcgagacactgagcctgacctgtaccgtgtccggcgatagcatcagcagcggcgattactactggggctggatcagacagcctcctggcaaaggactggaatggatcggccacatctactacagcggcgtgacctactacaaccccagcctgaagtccagagtgaccatcagcgtggacaccagccggaaccagttctccctgaagctgtctagcgtgacagccgccgataccgccgtgtactactgcaccagagaggacagcagcaactggcggagtagaggccagggaacactggtcacagttagctctggatccggcggaggcggaagtggaggcggaggatctggcggcggaggctctttcgaagaagtgcaactggtgcagtccggcggagggctggtgcagagcggaggatctctgagactgagctgcagagccagcggctacaccttcacccggtactggatgctgtgggtgcgccagaggccaggcaagggactggaatgggtggccgagatcaacccccggaacgaccggaccaactacaacgagaagttcaagacccggttcaccatcagcgtggacagaagcaagaacaccctgtacctgcagatggacagcctgcgggccgaggataccgccgtgtacttttgtgctctgggaggcggctacgctatggactactggggccagggaacccttgtgaccgtgtcctctacgcgtatccagaaccctgatcctgccgtgtaccagctgcgggatagcaagagcagcgacaagagcgtgtgtctgttcaccgacttcgacagccagaccaacgtgtcccagagcaaggactccgacgtgtacatcaccgataagtgcgtgctggacatgcggagcatggacttcaagagcaactccgccgtggcctggtccaacaagtccgatttcgcctgcgccaacgccttcaacaacagcattatccccgaggacacattcttcccaagccccgagagcagctgcgacgtgaagctggtggaaaagagcttcgagacagacaccaacctgaacttccagaacctgagcgtgatcggcttcagaatcctgctgctgaaagtggccggctttaacctgctgatgaccctgcggctgtggtccagc

SEQ ID NO: 2420 - DNA, 2673 bp, Artificial Sequence
  Synthetic Polynucloetide
atggccttaccagtgaccgccttgctcctgccgctggccttgctgctccacgccgccaggccggaagtgcagctggttgaatctggcggaggactggttcagcctggcggatctctgagactgtcttgtgccgccagcggcttcagcttcagcgacttttggatgagctgggtccgacaggcccctggcaaaggacttgaatgggtcgccacaatcagccaggccggcagcgagaaggactacgtggactctgtgaagggcagattcaccatcagccgggacaacgccaagaagtccctgtacctccagatgaacagcctgagagccgaggacaccgccgtgtactattgtgcctctggcgtgtacagcttcgactacagaggccagggcaccctggtcacagtctcttctggtaccggcggaggcggatctggcggcggaggtagcggtggcggaggatctgaattcgacatccagatgacacagtctccggcgtcactgtccgcctccgtgggggagactgtgactattatttgtagggcatcagttaacatctactcttatttggcctggtaccagcagaagcaaggcaagagtcctcagctgctggtgtataatgcgaagatcctggcagagggcgtgccgagccggttctccggcagcggctcaggtacccaattttccctcaagatcaattcactgcagccagaggactttggcagttactattgtcaacaccactacggcacattcactttcgggtccggtacaaaattggagattaagcgactcgaggacctgaagaacgtgttcccacctgaggtggccgtgttcgagcctagcgaggccgagatcagccacacccagaaagccaccctcgtgtgcctggctaccggcttctaccccgaccatgtggaactgtcttggtgggtcaacggcaaagaggtgcacagcggcgtgtgtaccgacccccagccactgaaagaacagcccgccctgaacgacagccggtactgcctgagcagcagactgagagtgtccgccaccttctggcagaacccccggaaccacttcagatgccaggtgcagttctacggcctgagcgagaacgacgagtggacccaggacagagccaagcccgtgacccagatcgtgtctgccgaagcctggggcagagccgattgcggctttaccagcgagagctaccagcagggcgtgctgagcgccaccatcctgtacgagatcctgctgggcaaggccaccctgtacgccgtgctggtgtctgccctggtgctgatggctatggtcaagcggaaggacagccggggaagggccaagcgatctggatctggagcaacaaacttctcactactcaaacaagcaggtgacgtggaggagaatcccgggcctactagtatggactggatttggcgcatccttttccttgtcggcgctgctaccggcgcgcattccgggccccagctccagctgcaagagtctggacctggcctggtcaagcctagcgagacactgagcctgacctgtaccgtgtccggcgatagcatcagcagcggcgattactactggggctggatcagacagcctcctggcaaaggactggaatggatcggccacatctactacagcggcgtgacctactacaaccccagcctgaagtccagagtgaccatcagcgtggacaccagccggaaccagttctccctgaagctgtctagcgtgacagccgccgataccgccgtgtactactgcaccagagaggacagcagcaactggcggagtagaggccagggaacactggtcacagttagctctggatccggcggaggcggaagtggaggcggaggatctggcggcggaggctctttcgaacaggtacagttgaaagaaagcgggcctggactggtagcgccttcccaatctctctccatcacgtgcaccatctctggcttctccctgacttcctatggagttcactgggtgaggcagccccccggcaagggactggaatggctggtcgtcatctggtccgacgggtccacaacctacaactccgctctgaaaagtcggctctctatttctaaagataatagcaagagccaggtgtttctgaaaatgaactctctgcagaccgatgatacggccatttactactgcgcttcacactatggctcaaccttggcattcgcttcctggggccacggaacactggtgaccgtttccgcagccacgcgtatccagaaccctgatcctgccgtgtaccagctgcgggatagcaagagcagcgacaagagcgtgtgtctgttcaccgacttcgacagccagaccaacgtgtcccagagcaaggactccgacgtgtacatcaccgataagtgcgtgctggacatgcggagcatggacttcaagagcaactccgccgtggcctggtccaacaagtccgatttcgcctgcgccaacgccttcaacaacagcattatccccgaggacacattcttcccaagccccgagagcagctgcgacgtgaagctggtggaaaagagcttcgagacagacaccaacctgaacttccagaacctgagcgtgatcggcttcagaatcctgctgctgaaagtggccggctttaacctgctgatgaccctgcggctgtggtccagc

SEQ ID NO: 2421 - DNA, 2697 bp, Artificial Sequence
  Synthetic Polynucloetide
atggccttaccagtgaccgccttgctcctgccgctggccttgctgctccacgccgccaggccggaagtgcagctggttgaatctggcggaggactggttcagcctggcggatctctgagactgtcttgtgccgccagcggcttcagcttcagcgacttttggatgagctgggtccgacaggcccctggcaaaggacttgaatgggtcgccacaatcagccaggccggcagcgagaaggactacgtggactctgtgaagggcagattcaccatcagccgggacaacgccaagaagtccctgtacctccagatgaacagcctgagagccgaggacaccgccgtgtactattgtgcctctggcgtgtacagcttcgactacagaggccagggcaccctggtcacagtctcttctggtaccggcggaggcggatctggcggcggaggtagcggtggcggaggatctgaattcgacattgtgatgacccagtctcacaaattcatgtccacatcagtaggagacagggtcagcgtcacctgcaaggccagtcagaatgtgggtaataatgtagcctggtatcaacagaaaccagggcaatctcctaaagtactgatttactcggcatcctaccggtacagtggagtccctgatcgcttcacaggcagtggatctgggacagatttcactctcaccatcagtaatgtgcagtctgaagacttggcagagtatttctgtcagcaatataacacctatccattcacgttcggctcggggacaaagttggaaataaaactcgaggacctgaagaacgtgttcccacctgaggtggccgtgttcgagcctagcgaggccgagatcagccacacccagaaagccaccctcgtgtgcctggctaccggcttctaccccgaccatgtggaactgtcttggtgggtcaacggcaaagaggtgcacagcggcgtgtgtaccgacccccagccactgaaagaacagcccgccctgaacgacagccggtactgcctgagcagcagactgagagtgtccgccaccttctggcagaacccccggaaccacttcagatgccaggtgcagttctacggcctgagcgagaacgacgagtggacccaggacagagccaagcccgtgacccagatcgtgtctgccgaagcctggggcagagccgattgcggctttaccagcgagagctaccagcagggcgtgctgagcgccaccatcctgtacgagatcctgctgggcaaggccaccctgtacgccgtgctggtgtctgccctggtgctgatggctatggtcaagcggaaggacagccggggaagggccaagcgatctggatctggagcaacaaacttctcactactcaaacaagcaggtgacgtggaggagaatcccgggcctactagtatggactggatttggcgcatccttttccttgtcggcgctgctaccggcgcgcattccgggccccagctccagctgcaagagtctggacctggcctggtcaagcctagcgagacactgagcctgacctgtaccgtgtccggcgatagcatcagcagcggcgattactactggggctggatcagacagcctcctggcaaaggactggaatggatcggccacatctactacagcggcgtgacctactacaaccccagcctgaagtccagagtgaccatcagcgtggacaccagccggaaccagttctccctgaagctgtctagcgtgacagccgccgataccgccgtgtactactgcaccagagaggacagcagcaactggcggagtagaggccagggaacactggtcacagttagctctggatccggcggaggcggaagtggaggcggaggatctggcggcggaggctctttcgaagaggtacagctggaggaaagcggtggaggactggtgcaacctggagggtctatgaagctctcttgcgtagcttctgggttcacgttctccaattactggatgaactgggtgcggcagtcccccgagaaaggcctggaatgggtagcagaaattcggttcaagtcccataactatgctacacactttgccgagtctgtcaaaggccggttcactattagtcgagacgacagcaagtcttcagtctacctgcagatgaataacttgcgggcagaggacacaggtatctactactgcaccaggagaatcggcaactccgactatgactggtggtactttgacgtctggggagcaggcaccagcgtgacggtgagttcagcctcaacgcgtatccagaaccctgatcctgccgtgtaccagctgcgggatagcaagagcagcgacaagagcgtgtgtctgttcaccgacttcgacagccagaccaacgtgtcccagagcaaggactccgacgtgtacatcaccgataagtgcgtgctggacatgcggagcatggacttcaagagcaactccgccgtggcctggtccaacaagtccgatttcgcctgcgccaacgccttcaacaacagcattatccccgaggacacattcttcccaagccccgagagcagctgcgacgtgaagctggtggaaaagagcttcgagacagacaccaacctgaacttccagaacctgagcgtgatcggcttcagaatcctgctgctgaaagtggccggctttaacctgctgatgaccctgcggctgtggtccagc

SEQ ID NO: 2422 - DNA, 2676 bp, Artificial Sequence
  Synthetic Polynucloetide
atggccttaccagtgaccgccttgctcctgccgctggccttgctgctccacgccgccaggccggaagtgcagctggttgaatctggcggaggactggttcagcctggcggatctctgagactgtcttgtgccgccagcggcttcagcttcagcgacttttggatgagctgggtccgacaggcccctggcaaaggacttgaatgggtcgccacaatcagccaggccggcagcgagaaggactacgtggactctgtgaagggcagattcaccatcagccgggacaacgccaagaagtccctgtacctccagatgaacagcctgagagccgaggacaccgccgtgtactattgtgcctctggcgtgtacagcttcgactacagaggccagggcaccctggtcacagtctcttctggtaccggcggaggcggatctggcggcggaggtagcggtggcggaggatctgaattcgaccagatcgtgctgacccagtcccccgctattatgtccgcatcaccgggcgaaaaagtgacgatctcctgtagcgcttcatctagcgtctcctacatgtattggtatcaacagaaacctgggtctagcccaaagccgtggatctacagaaccagtaaccttgccagtggggtgccagcccgcttcagcggtagtggcagtggaacttcctatagcctcacaataagcaacatggaggctgaagatgccgctgcctattactgccagcagtaccacagttacccaaccacgttcggcgggggaactaagctcgaagtaaaactcgaggacctgaagaacgtgttcccacctgaggtggccgtgttcgagcctagcgaggccgagatcagccacacccagaaagccaccctcgtgtgcctggctaccggcttctaccccgaccatgtggaactgtcttggtgggtcaacggcaaagaggtgcacagcggcgtgtgtaccgacccccagccactgaaagaacagcccgccctgaacgacagccggtactgcctgagcagcagactgagagtgtccgccaccttctggcagaacccccggaaccacttcagatgccaggtgcagttctacggcctgagcgagaacgacgagtggacccaggacagagccaagcccgtgacccagatcgtgtctgccgaagcctggggcagagccgattgcggctttaccagcgagagctaccagcagggcgtgctgagcgccaccatcctgtacgagatcctgctgggcaaggccaccctgtacgccgtgctggtgtctgccctggtgctgatggctatggtcaagcggaaggacagccggggaagggccaagcgatctggatctggagcaacaaacttctcactactcaaacaagcaggtgacgtggaggagaatcccgggcctactagtatggactggatttggcgcatccttttccttgtcggcgctgctaccggcgcgcattccgggccccagctccagctgcaagagtctggacctggcctggtcaagcctagcgagacactgagcctgacctgtaccgtgtccggcgatagcatcagcagcggcgattactactggggctggatcagacagcctcctggcaaaggactggaatggatcggccacatctactacagcggcgtgacctactacaaccccagcctgaagtccagagtgaccatcagcgtggacaccagccggaaccagttctccctgaagctgtctagcgtgacagccgccgataccgccgtgtactactgcaccagagaggacagcagcaactggcggagtagaggccagggaacactggtcacagttagctctggatccggcggaggcggaagtggaggcggaggatctggcggcggaggctctttcgaagaggtgcagctggtggaatctgggggcggcctggtccaacctaagggatcactcaagctctcttgtgcggccagcggattctctttcaatacctatgctatgaattgggtgagacaggcgcccggaaagggcctcgaatggatagcccatatccggtcaaaatcaaacaatttcgcaacctactatgcggactccgtgaaggaccgattttccatctcccgagatgcctccgagaatattctgttcctgcagatgaataacctcaagacagaggacaccgccatgtactactgtgtgcgccagggcggtgactttcccatggattactgggggcaggggaccagcgtgaccgtgagctctacgcgtatccagaaccctgatcctgccgtgtaccagctgcgggatagcaagagcagcgacaagagcgtgtgtctgttcaccgacttcgacagccagaccaacgtgtcccagagcaaggactccgacgtgtacatcaccgataagtgcgtgctggacatgcggagcatggacttcaagagcaactccgccgtggcctggtccaacaagtccgatttcgcctgcgccaacgccttcaacaacagcattatccccgaggacacattcttcccaagccccgagagcagctgcgacgtgaagctggtggaaaagagcttcgagacagacaccaacctgaacttccagaacctgagcgtgatcggcttcagaatcctgctgctgaaagtggccggctttaacctgctgatgaccctgcggctgtggtccagc

SEQ ID NO: 2423 - DNA, 2673 bp, Artificial Sequence
  Synthetic Polynucloetide
atggccttaccagtgaccgccttgctcctgccgctggccttgctgctccacgccgccaggccggaagtgcagctggttgaatctggcggaggactggttcagcctggcggatctctgagactgtcttgtgccgccagcggcttcagcttcagcgacttttggatgagctgggtccgacaggcccctggcaaaggacttgaatgggtcgccacaatcagccaggccggcagcgagaaggactacgtggactctgtgaagggcagattcaccatcagccgggacaacgccaagaagtccctgtacctccagatgaacagcctgagagccgaggacaccgccgtgtactattgtgcctctggcgtgtacagcttcgactacagaggccagggcaccctggtcacagtctcttctggtaccggcggaggcggatctggcggcggaggtagcggtggcggaggatctgaattcgacgacatccagatgacccagagcagcagcagcttcagcgtgagcctgggcgacagagtgaccatcacctgcatggccagcgaggacatctacatcagactggcctggtaccagcagaagcccggcaacgcccccagactgctgatcagcgccgccaccagcctggagaccggcgtgcccagcagattcagcggcagcggcagcggcaaggactacaccctgagcatcaccagcctgcagaccgaggacgtgggcacctactactgccagcagtactggagcagcccctggaccttcggcggcggcaccaagctggagatcaacctcgaggacctgaagaacgtgttcccacctgaggtggccgtgttcgagcctagcgaggccgagatcagccacacccagaaagccaccctcgtgtgcctggctaccggcttctaccccgaccatgtggaactgtcttggtgggtcaacggcaaagaggtgcacagcggcgtgtgtaccgacccccagccactgaaagaacagcccgccctgaacgacagccggtactgcctgagcagcagactgagagtgtccgccaccttctggcagaacccccggaaccacttcagatgccaggtgcagttctacggcctgagcgagaacgacgagtggacccaggacagagccaagcccgtgacccagatcgtgtctgccgaagcctggggcagagccgattgcggctttaccagcgagagctaccagcagggcgtgctgagcgccaccatcctgtacgagatcctgctgggcaaggccaccctgtacgccgtgctggtgtctgccctggtgctgatggctatggtcaagcggaaggacagccggggaagggccaagcgatctggatctggagcaacaaacttctcactactcaaacaagcaggtgacgtggaggagaatcccgggcctactagtatggactggatttggcgcatccttttccttgtcggcgctgctaccggcgcgcattccgggccccagctccagctgcaagagtctggacctggcctggtcaagcctagcgagacactgagcctgacctgtaccgtgtccggcgatagcatcagcagcggcgattactactggggctggatcagacagcctcctggcaaaggactggaatggatcggccacatctactacagcggcgtgacctactacaaccccagcctgaagtccagagtgaccatcagcgtggacaccagccggaaccagttctccctgaagctgtctagcgtgacagccgccgataccgccgtgtactactgcaccagagaggacagcagcaactggcggagtagaggccagggaacactggtcacagttagctctggatccggcggaggcggaagtggaggcggaggatctggcggcggaggctctttcgaagacgtgcagctgcaggagagcggccccggcctggtgaagcccagccagagcctgagcctgacctgcaccgtgaccggctacagcatcaccagcgactacacctggaactggatcagacagttccccggcaacaagctggagtggatgggctacatcacctacagcggcagcaccagctacaaccccagcctgaagagcagaaacagcatcaccagagacaccagcaagaaccagttcttcctgcagctgaacagcgtgaccaccgaggacaccgccacctactactgcgccagactgggcagaagatacacaatggactactggggccagggcaccagcgtgaccgtgagcagcacgcgtatccagaaccctgatcctgccgtgtaccagctgcgggatagcaagagcagcgacaagagcgtgtgtctgttcaccgacttcgacagccagaccaacgtgtcccagagcaaggactccgacgtgtacatcaccgataagtgcgtgctggacatgcggagcatggacttcaagagcaactccgccgtggcctggtccaacaagtccgatttcgcctgcgccaacgccttcaacaacagcattatccccgaggacacattcttcccaagccccgagagcagctgcgacgtgaagctggtggaaaagagcttcgagacagacaccaacctgaacttccagaacctgagcgtgatcggcttcagaatcctgctgctgaaagtggccggctttaacctgctgatgaccctgcggctgtggtccagc

SEQ ID NO: 2424 - DNA, 2682 bp, Artificial Sequence
  Synthetic Polynucloetide
atggccttaccagtgaccgccttgctcctgccgctggccttgctgctccacgccgccaggccggaagtgcagctggttgaatctggcggaggactggttcagcctggcggatctctgagactgtcttgtgccgccagcggcttcagcttcagcgacttttggatgagctgggtccgacaggcccctggcaaaggacttgaatgggtcgccacaatcagccaggccggcagcgagaaggactacgtggactctgtgaagggcagattcaccatcagccgggacaacgccaagaagtccctgtacctccagatgaacagcctgagagccgaggacaccgccgtgtactattgtgcctctggcgtgtacagcttcgactacagaggccagggcaccctggtcacagtctcttctggtaccggcggaggcggatctggcggcggaggtagcggtggcggaggatctgaattcgacgacatccagatgacccagagccccagcagcctgtctgccagcgtgggcgacagagtgaccatcacctgtagagccagccagagcatcagcagctacctgaactggtatcagcagaagcccggcaaggcccccaaactgctgatctacgacgccagcaacctggaaaccggcgtgcccagcagattttccggcagcggctctggcaccgacttcaccttcaccatcagctccctccagcccgaggacattgccacctactactgccagcagtacgacaacctgcccctgacctttggcggaggcaccaaggtggacatcaagagactcgaggacctgaagaacgtgttcccacctgaggtggccgtgttcgagcctagcgaggccgagatcagccacacccagaaagccaccctcgtgtgcctggctaccggcttctaccccgaccatgtggaactgtcttggtgggtcaacggcaaagaggtgcacagcggcgtgtgtaccgacccccagccactgaaagaacagcccgccctgaacgacagccggtactgcctgagcagcagactgagagtgtccgccaccttctggcagaacccccggaaccacttcagatgccaggtgcagttctacggcctgagcgagaacgacgagtggacccaggacagagccaagcccgtgacccagatcgtgtctgccgaagcctggggcagagccgattgcggctttaccagcgagagctaccagcagggcgtgctgagcgccaccatcctgtacgagatcctgctgggcaaggccaccctgtacgccgtgctggtgtctgccctggtgctgatggctatggtcaagcggaaggacagccggggaagggccaagcgatctggatctggagcaacaaacttctcactactcaaacaagcaggtgacgtggaggagaatcccgggcctactagtatggactggatttggcgcatccttttccttgtcggcgctgctaccggcgcgcattccgggccccagctccagctgcaagagtctggacctggcctggtcaagcctagcgagacactgagcctgacctgtaccgtgtccggcgatagcatcagcagcggcgattactactggggctggatcagacagcctcctggcaaaggactggaatggatcggccacatctactacagcggcgtgacctactacaaccccagcctgaagtccagagtgaccatcagcgtggacaccagccggaaccagttctccctgaagctgtctagcgtgacagccgccgataccgccgtgtactactgcaccagagaggacagcagcaactggcggagtagaggccagggaacactggtcacagttagctctggatccggcggaggcggaagtggaggcggaggatctggcggcggaggctctttcgaacaggtgcaactggtggaatctggcggcggagtggtgcagcctggcagaagcctgagactgagctgtgccgccagcggcttcacctttagcagctacgccatgcactgggtgcgccaggcccctggaaaaggcctggaatgggtggccgtgatctcctacgacggctccaacaagtattacgccgacagcgtgaagggccggttcaccatctccagagacaacagcaagaacaccctgtacctccagatgaacagcctgcgggccgaggacaccgccgtgtactattgtgccagggctcacaacagcagctcttggagcttcgactactggggccagggcaccctcgtgaccgtgtcatctacgcgtatccagaaccctgatcctgccgtgtaccagctgcgggatagcaagagcagcgacaagagcgtgtgtctgttcaccgacttcgacagccagaccaacgtgtcccagagcaaggactccgacgtgtacatcaccgataagtgcgtgctggacatgcggagcatggacttcaagagcaactccgccgtggcctggtccaacaagtccgatttcgcctgcgccaacgccttcaacaacagcattatccccgaggacacattcttcccaagccccgagagcagctgcgacgtgaagctggtggaaaagagcttcgagacagacaccaacctgaacttccagaacctgagcgtgatcggcttcagaatcctgctgctgaaagtggccggctttaacctgctgatgaccctgcggctgtggtccagc

SEQ ID NO: 2425 - DNA, 2709 bp, Artificial Sequence
  Synthetic Polynucloetide
atggccttaccagtgaccgccttgctcctgccgctggccttgctgctccacgccgccaggccggaagtgcagctggttgaatctggcggaggactggttcagcctggcggatctctgagactgtcttgtgccgccagcggcttcagcttcagcgacttttggatgagctgggtccgacaggcccctggcaaaggacttgaatgggtcgccacaatcagccaggccggcagcgagaaggactacgtggactctgtgaagggcagattcaccatcagccgggacaacgccaagaagtccctgtacctccagatgaacagcctgagagccgaggacaccgccgtgtactattgtgcctctggcgtgtacagcttcgactacagaggccagggcaccctggtcacagtctcttctggtaccggcggaggcggatctggcggcggaggtagcggtggcggaggatctgaattcgacgacgtcgtgatgacccagagccctctgagcctgcctgtgtccctgggcgatcaggccagcatctcctgcagatccagccagagactggtgcacagcaacggcaacacctacctgcactggtatctgcagaagcccggccagagccccaagctgctgatctaccgggtgtccaacagattccccggcgtgcccgatagattcagcggctctggcagcggcaccgacttcaccctgaagatcagccgggtggaagccgaggacctgggcatctatttctgcagccagagcacccacgtgccctacacctttggcggaggcaccaagctggaaatcaagcggctcgaggacctgaagaacgtgttcccacctgaggtggccgtgttcgagcctagcgaggccgagatcagccacacccagaaagccaccctcgtgtgcctggctaccggcttctaccccgaccatgtggaactgtcttggtgggtcaacggcaaagaggtgcacagcggcgtgtgtaccgacccccagccactgaaagaacagcccgccctgaacgacagccggtactgcctgagcagcagactgagagtgtccgccaccttctggcagaacccccggaaccacttcagatgccaggtgcagttctacggcctgagcgagaacgacgagtggacccaggacagagccaagcccgtgacccagatcgtgtctgccgaagcctggggcagagccgattgcggctttaccagcgagagctaccagcagggcgtgctgagcgccaccatcctgtacgagatcctgctgggcaaggccaccctgtacgccgtgctggtgtctgccctggtgctgatggctatggtcaagcggaaggacagccggggaagggccaagcgatctggatctggagcaacaaacttctcactactcaaacaagcaggtgacgtggaggagaatcccgggcctactagtatggactggatttggcgcatccttttccttgtcggcgctgctaccggcgcgcattccgggccccagctccagctgcaagagtctggacctggcctggtcaagcctagcgagacactgagcctgacctgtaccgtgtccggcgatagcatcagcagcggcgattactactggggctggatcagacagcctcctggcaaaggactggaatggatcggccacatctactacagcggcgtgacctactacaaccccagcctgaagtccagagtgaccatcagcgtggacaccagccggaaccagttctccctgaagctgtctagcgtgacagccgccgataccgccgtgtactactgcaccagagaggacagcagcaactggcggagtagaggccagggaacactggtcacagttagctctggatccggcggaggcggaagtggaggcggaggatctggcggcggaggctctttcgaagaagtgcggctgcagcagtctggccccgacctgattaagcctggggccagcgtgaagatgagctgcaaggccagcggctacaccttcaccggctacgtgatgcactgggtcaagcagaggccaggccagggcctggaatggatcggcttcatcaacccctacaacgacgacatccagagcaacgagcggttccggggcaaggccaccctgaccagcgataagagcagcaccaccgcctacatggaactgagcagcctgacctccgaggacagcgccgtgtactactgtgctaggggagccggctacaacttcgacggggcctacagattcttcgacttttggggccagggcaccacactgaccgtgtcctctacgcgtatccagaaccctgatcctgccgtgtaccagctgcgggatagcaagagcagcgacaagagcgtgtgtctgttcaccgacttcgacagccagaccaacgtgtcccagagcaaggactccgacgtgtacatcaccgataagtgcgtgctggacatgcggagcatggacttcaagagcaactccgccgtggcctggtccaacaagtccgatttcgcctgcgccaacgccttcaacaacagcattatccccgaggacacattcttcccaagccccgagagcagctgcgacgtgaagctggtggaaaagagcttcgagacagacaccaacctgaacttccagaacctgagcgtgatcggcttcagaatcctgctgctgaaagtggccggctttaacctgctgatgaccctgcggctgtggtccagc

SEQ ID NO: 2426 - DNA, 2682 bp, Artificial Sequence
  Synthetic Polynucloetide
atggccttaccagtgaccgccttgctcctgccgctggccttgctgctccacgccgccaggccggaagtgcagctggttgaatctggcggaggactggttcagcctggcggatctctgagactgtcttgtgccgccagcggcttcagcttcagcgacttttggatgagctgggtccgacaggcccctggcaaaggacttgaatgggtcgccacaatcagccaggccggcagcgagaaggactacgtggactctgtgaagggcagattcaccatcagccgggacaacgccaagaagtccctgtacctccagatgaacagcctgagagccgaggacaccgccgtgtactattgtgcctctggcgtgtacagcttcgactacagaggccagggcaccctggtcacagtctcttctggtaccggcggaggcggatctggcggcggaggtagcggtggcggaggatctgaattcgacagctacgagctgacccagcctcctagcgtgtccgtgtctcctggacagaccgccaccatctcttgcagcggcgatcaactgggcgggaagtacggccactggtatcagaagaagcccggccagagccccgtgctggtgctgtaccaggacagaaaacggcctgccggcatccccgagagattcagcggaagcagcagcggcaacaccatcaccctgaccatcagcggcacccaggccgtggatgaggccgactactactgccaggcttgggacaccaatctgggcggcgtgttcggcggaggcaccaaagtgacagtgctgggacagctcgaggacctgaagaacgtgttcccacctgaggtggccgtgttcgagcctagcgaggccgagatcagccacacccagaaagccaccctcgtgtgcctggctaccggcttctaccccgaccatgtggaactgtcttggtgggtcaacggcaaagaggtgcacagcggcgtgtgtaccgacccccagccactgaaagaacagcccgccctgaacgacagccggtactgcctgagcagcagactgagagtgtccgccaccttctggcagaacccccggaaccacttcagatgccaggtgcagttctacggcctgagcgagaacgacgagtggacccaggacagagccaagcccgtgacccagatcgtgtctgccgaagcctggggcagagccgattgcggctttaccagcgagagctaccagcagggcgtgctgagcgccaccatcctgtacgagatcctgctgggcaaggccaccctgtacgccgtgctggtgtctgccctggtgctgatggctatggtcaagcggaaggacagccggggaagggccaagcgatctggatctggagcaacaaacttctcactactcaaacaagcaggtgacgtggaggagaatcccgggcctactagtatggactggatttggcgcatccttttccttgtcggcgctgctaccggcgcgcattccgggccccagctccagctgcaagagtctggacctggcctggtcaagcctagcgagacactgagcctgacctgtaccgtgtccggcgatagcatcagcagcggcgattactactggggctggatcagacagcctcctggcaaaggactggaatggatcggccacatctactacagcggcgtgacctactacaaccccagcctgaagtccagagtgaccatcagcgtggacaccagccggaaccagttctccctgaagctgtctagcgtgacagccgccgataccgccgtgtactactgcaccagagaggacagcagcaactggcggagtagaggccagggaacactggtcacagttagctctggatccggcggaggcggaagtggaggcggaggatctggcggcggaggctctttcgaacaggtgcaactggtggaaagcggagccgaagtgaagaaacctggggccagcgtgaaggtgtcctgcaaggccagcggctacacctttaccggctactacatgcactgggtgcgccaggctccaggccagggactggaatggatgggccggatcaaccccaatagcggcggcaccaactacgcccagaaattccagggcagagtgaccatgaccagagacaccagcatcagcaccgcctacatggaactgagccggctgagaagcgacgacaccgccgtgtactactgcgccagccctagaggcagaggcagcgccttcgatatttggggccagggcacactcgtgaccgtgtcctctacgcgtatccagaaccctgatcctgccgtgtaccagctgcgggatagcaagagcagcgacaagagcgtgtgtctgttcaccgacttcgacagccagaccaacgtgtcccagagcaaggactccgacgtgtacatcaccgataagtgcgtgctggacatgcggagcatggacttcaagagcaactccgccgtggcctggtccaacaagtccgatttcgcctgcgccaacgccttcaacaacagcattatccccgaggacacattcttcccaagccccgagagcagctgcgacgtgaagctggtggaaaagagcttcgagacagacaccaacctgaacttccagaacctgagcgtgatcggcttcagaatcctgctgctgaaagtggccggctttaacctgctgatgaccctgcggctgtggtccagc

SEQ ID NO: 2427 - DNA, 2691 bp, Artificial Sequence
  Synthetic Polynucloetide
atggccttaccagtgaccgccttgctcctgccgctggccttgctgctccacgccgccaggccggaagtgcagctggttgaatctggcggaggactggttcagcctggcggatctctgagactgtcttgtgccgccagcggcttcagcttcagcgacttttggatgagctgggtccgacaggcccctggcaaaggacttgaatgggtcgccacaatcagccaggccggcagcgagaaggactacgtggactctgtgaagggcagattcaccatcagccgggacaacgccaagaagtccctgtacctccagatgaacagcctgagagccgaggacaccgccgtgtactattgtgcctctggcgtgtacagcttcgactacagaggccagggcaccctggtcacagtctcttctggtaccggcggaggcggatctggcggcggaggtagcggtggcggaggatctgaattcgacaacttcatgctgacccagccccacagcgtgtccgagagccctggcaagaccgtgaccatctcctgcaccagaagcagcggctctatcgccagcaaatacgtgcagtggtatcagcagaggcccggcagcagccctaccaccgtgatctacgaggacaaccagaggcctagcggcgtgcccgatagattcagcggcagcatcgacaccagcagcaacagcgccagcctgaccatcagcggcctgagaacagaggacgaggccgactactactgccacagctacgacagcaacaaccactccgtgttcggcggaggcaccaaagtgacagtgctgggacagctcgaggacctgaagaacgtgttcccacctgaggtggccgtgttcgagcctagcgaggccgagatcagccacacccagaaagccaccctcgtgtgcctggctaccggcttctaccccgaccatgtggaactgtcttggtgggtcaacggcaaagaggtgcacagcggcgtgtgtaccgacccccagccactgaaagaacagcccgccctgaacgacagccggtactgcctgagcagcagactgagagtgtccgccaccttctggcagaacccccggaaccacttcagatgccaggtgcagttctacggcctgagcgagaacgacgagtggacccaggacagagccaagcccgtgacccagatcgtgtctgccgaagcctggggcagagccgattgcggctttaccagcgagagctaccagcagggcgtgctgagcgccaccatcctgtacgagatcctgctgggcaaggccaccctgtacgccgtgctggtgtctgccctggtgctgatggctatggtcaagcggaaggacagccggggaagggccaagcgatctggatctggagcaacaaacttctcactactcaaacaagcaggtgacgtggaggagaatcccgggcctactagtatggactggatttggcgcatccttttccttgtcggcgctgctaccggcgcgcattccgggccccagctccagctgcaagagtctggacctggcctggtcaagcctagcgagacactgagcctgacctgtaccgtgtccggcgatagcatcagcagcggcgattactactggggctggatcagacagcctcctggcaaaggactggaatggatcggccacatctactacagcggcgtgacctactacaaccccagcctgaagtccagagtgaccatcagcgtggacaccagccggaaccagttctccctgaagctgtctagcgtgacagccgccgataccgccgtgtactactgcaccagagaggacagcagcaactggcggagtagaggccagggaacactggtcacagttagctctggatccggcggaggcggaagtggaggcggaggatctggcggcggaggctctttcgaagaagtgcaactggtggaaagcgggggaggcgtggtgcagccaggcggatctctgagactgagctgtgccgccagcggcttcaccttcagcagctacgccatgagctgggtgcgccaggcccctggaaaaggcctggaatgggtgtccgccatctctggctctggcggcagcacctactacgccgatagcgtgaagggccggttcagcatcagccgggacaacagcaagaacaccctgtacctccagatgaacagcctgcgggccgaggacaccgccgtgtactactgtgccagaaccagaagctccggggccttcgacatctggggccagggaacactcgtgaccgtgtcctctacgcgtatccagaaccctgatcctgccgtgtaccagctgcgggatagcaagagcagcgacaagagcgtgtgtctgttcaccgacttcgacagccagaccaacgtgtcccagagcaaggactccgacgtgtacatcaccgataagtgcgtgctggacatgcggagcatggacttcaagagcaactccgccgtggcctggtccaacaagtccgatttcgcctgcgccaacgccttcaacaacagcattatccccgaggacacattcttcccaagccccgagagcagctgcgacgtgaagctggtggaaaagagcttcgagacagacaccaacctgaacttccagaacctgagcgtgatcggcttcagaatcctgctgctgaaagtggccggctttaacctgctgatgaccctgcggctgtggtccagc

SEQ ID NO: 2428 - DNA, 2676 bp, Artificial Sequence
  Synthetic Polynucloetide
atggccttaccagtgaccgccttgctcctgccgctggccttgctgctccacgccgccaggccggaagtgcagctggttgaatctggcggaggactggttcagcctggcggatctctgagactgtcttgtgccgccagcggcttcagcttcagcgacttttggatgagctgggtccgacaggcccctggcaaaggacttgaatgggtcgccacaatcagccaggccggcagcgagaaggactacgtggactctgtgaagggcagattcaccatcagccgggacaacgccaagaagtccctgtacctccagatgaacagcctgagagccgaggacaccgccgtgtactattgtgcctctggcgtgtacagcttcgactacagaggccagggcaccctggtcacagtctcttctggtaccggcggaggcggatctggcggcggaggtagcggtggcggaggatctgaattcgacatccagatgaaccagagccccagcagcctgagcgccagcctgggcgataccatcaccatcacctgtcacgccagccagaacatcaacgtgtggctgagctggtatcagcagaagcccggcaacatccccaagctgctgatctacaaggccagcaacctgcacaccggcgtgcccagcagattttctggcagcggctctggcaccggcttcaccattaccatcagctccctccagcccgaggacattgccacctactactgccagcagggccagagctacccctggacatttggcggaggcaccaagctggaaatcaagagactcgaggacctgaagaacgtgttcccacctgaggtggccgtgttcgagcctagcgaggccgagatcagccacacccagaaagccaccctcgtgtgcctggctaccggcttctaccccgaccatgtggaactgtcttggtgggtcaacggcaaagaggtgcacagcggcgtgtgtaccgacccccagccactgaaagaacagcccgccctgaacgacagccggtactgcctgagcagcagactgagagtgtccgccaccttctggcagaacccccggaaccacttcagatgccaggtgcagttctacggcctgagcgagaacgacgagtggacccaggacagagccaagcccgtgacccagatcgtgtctgccgaagcctggggcagagccgattgcggctttaccagcgagagctaccagcagggcgtgctgagcgccaccatcctgtacgagatcctgctgggcaaggccaccctgtacgccgtgctggtgtctgccctggtgctgatggctatggtcaagcggaaggacagccggggaagggccaagcgatctggatctggagcaacaaacttctcactactcaaacaagcaggtgacgtggaggagaatcccgggcctactagtatggactggatttggcgcatccttttccttgtcggcgctgctaccggcgcgcattccgggccccagctccagctgcaagagtctggacctggcctggtcaagcctagcgagacactgagcctgacctgtaccgtgtccggcgatagcatcagcagcggcgattactactggggctggatcagacagcctcctggcaaaggactggaatggatcggccacatctactacagcggcgtgacctactacaaccccagcctgaagtccagagtgaccatcagcgtggacaccagccggaaccagttctccctgaagctgtctagcgtgacagccgccgataccgccgtgtactactgcaccagagaggacagcagcaactggcggagtagaggccagggaacactggtcacagttagctctggatccggcggaggcggaagtggaggcggaggatctggcggcggaggctctttcgaagaagtgcaactccagcagagcggcccagagcttgtgaagcctggcgcttccgtgaagattagctgcaaagccagcggctacagcttcaccggctacttcatgaactgggtcaagcagagccacggcaagagcctggagtacatcggcagattcaacccctacaacggcgagacactgtacaaccagaagttcaagggcaaggccaccctgaccgtggacaagagcagcagcaccgtgcacatggaactgctgagcgtgaccagcgaggacagcgccgtgtactactgtggcagaagcggcaacgacgacgctatggactattggggccagggcaccagcgtgaccgtgtctagtgctacgcgtatccagaaccctgatcctgccgtgtaccagctgcgggatagcaagagcagcgacaagagcgtgtgtctgttcaccgacttcgacagccagaccaacgtgtcccagagcaaggactccgacgtgtacatcaccgataagtgcgtgctggacatgcggagcatggacttcaagagcaactccgccgtggcctggtccaacaagtccgatttcgcctgcgccaacgccttcaacaacagcattatccccgaggacacattcttcccaagccccgagagcagctgcgacgtgaagctggtggaaaagagcttcgagacagacaccaacctgaacttccagaacctgagcgtgatcggcttcagaatcctgctgctgaaagtggccggctttaacctgctgatgaccctgcggctgtggtccagc

SEQ ID NO: 2429 - DNA, 2679 bp, Artificial Sequence
  Synthetic Polynucloetide
atggccttaccagtgaccgccttgctcctgccgctggccttgctgctccacgccgccaggccggaagtgcagctggttgaatctggcggaggactggttcagcctggcggatctctgagactgtcttgtgccgccagcggcttcagcttcagcgacttttggatgagctgggtccgacaggcccctggcaaaggacttgaatgggtcgccacaatcagccaggccggcagcgagaaggactacgtggactctgtgaagggcagattcaccatcagccgggacaacgccaagaagtccctgtacctccagatgaacagcctgagagccgaggacaccgccgtgtactattgtgcctctggcgtgtacagcttcgactacagaggccagggcaccctggtcacagtctcttctggtaccggcggaggcggatctggcggcggaggtagcggtggcggaggatctgaattcgagatcgtgctgacacagagccctgccaccctgtctctgagccctggcgaaagagccaccctgagctgtagagccagccagagcgtgcggagctacctggcctggtatcagcagaagcctggacaggcccccagactgctgatctacgacgccagcaatcgggccacaggcatccccgccagattttctggctctggcagcggcaccgacttcaccctgacaatcagcagcctggaacccgaggacttcgccgtgtactactgccagcagcggagcaactggccccctacctttggacagggcaccaaggtggaaatcaagctcgaggacctgaagaacgtgttcccacctgaggtggccgtgttcgagcctagcgaggccgagatcagccacacccagaaagccaccctcgtgtgcctggctaccggcttctaccccgaccatgtggaactgtcttggtgggtcaacggcaaagaggtgcacagcggcgtgtgtaccgacccccagccactgaaagaacagcccgccctgaacgacagccggtactgcctgagcagcagactgagagtgtccgccaccttctggcagaacccccggaaccacttcagatgccaggtgcagttctacggcctgagcgagaacgacgagtggacccaggacagagccaagcccgtgacccagatcgtgtctgccgaagcctggggcagagccgattgcggctttaccagcgagagctaccagcagggcgtgctgagcgccaccatcctgtacgagatcctgctgggcaaggccaccctgtacgccgtgctggtgtctgccctggtgctgatggctatggtcaagcggaaggacagccggggaagggccaagcgatctggatctggagcaacaaacttctcactactcaaacaagcaggtgacgtggaggagaatcccgggcctactagtatggactggatttggcgcatccttttccttgtcggcgctgctaccggcgcgcattccgggccccagctccagctgcaagagtctggacctggcctggtcaagcctagcgagacactgagcctgacctgtaccgtgtccggcgatagcatcagcagcggcgattactactggggctggatcagacagcctcctggcaaaggactggaatggatcggccacatctactacagcggcgtgacctactacaaccccagcctgaagtccagagtgaccatcagcgtggacaccagccggaaccagttctccctgaagctgtctagcgtgacagccgccgataccgccgtgtactactgcaccagagaggacagcagcaactggcggagtagaggccagggaacactggtcacagttagctctggatccggcggaggcggaagtggaggcggaggatctggcggcggaggctctttcgaacaactccaggtgcaggaatctggccccggactcgtgaagcccagcgagacactgagcctgacctgtaccgtgtccggcggcagcatcagcaacagctacttctcctggggctggatcagacagccccctggcaagggcctggaatggatcggcagcttctactacggcgagaaaacctactacaaccccagcctgaagtccagagccaccatcagcatcgacaccagcaagagccagttctccctgaagctgagcagcgtgacagccgccgacaccgccgtgtattattgccccagaggccccaccatgatccggggcgtgatcgactcttggggccagggaacactcgtgaccgtgtcctctacgcgtatccagaaccctgatcctgccgtgtaccagctgcgggatagcaagagcagcgacaagagcgtgtgtctgttcaccgacttcgacagccagaccaacgtgtcccagagcaaggactccgacgtgtacatcaccgataagtgcgtgctggacatgcggagcatggacttcaagagcaactccgccgtggcctggtccaacaagtccgatttcgcctgcgccaacgccttcaacaacagcattatccccgaggacacattcttcccaagccccgagagcagctgcgacgtgaagctggtggaaaagagcttcgagacagacaccaacctgaacttccagaacctgagcgtgatcggcttcagaatcctgctgctgaaagtggccggctttaacctgctgatgaccctgcggctgtggtccagc

SEQ ID NO: 2430 - DNA, 2706 bp, Artificial Sequence
  Synthetic Polynucloetide
atggccttaccagtgaccgccttgctcctgccgctggccttgctgctccacgccgccaggccggaagtgcagctggttgaatctggcggaggactggttcagcctggcggatctctgagactgtcttgtgccgccagcggcttcagcttcagcgacttttggatgagctgggtccgacaggcccctggcaaaggacttgaatgggtcgccacaatcagccaggccggcagcgagaaggactacgtggactctgtgaagggcagattcaccatcagccgggacaacgccaagaagtccctgtacctccagatgaacagcctgagagccgaggacaccgccgtgtactattgtgcctctggcgtgtacagcttcgactacagaggccagggcaccctggtcacagtctcttctggtaccggcggaggcggatctggcggcggaggtagcggtggcggaggatctgaattcgacatcgtgatgacccagacccccctgagcctgcctgtgacacctggcgagcctgccagcatctcctgcagaagcagcagaagcctgctggacagcgacgacggcaacacctacctggactggtatctgcagaaacccggccagagcccccaactgctgatctacaccctgagctacagagccagcggcgtgcccgatagattttccggctctggcagcggcaccgacttcaccctgaagatcagccgggtggaagccgaggacgtgggcgtgtactactgtatgcagcgggtggaatttcccatcaccttcggccagggcaccagactggaaatcaagagactcgaggacctgaagaacgtgttcccacctgaggtggccgtgttcgagcctagcgaggccgagatcagccacacccagaaagccaccctcgtgtgcctggctaccggcttctaccccgaccatgtggaactgtcttggtgggtcaacggcaaagaggtgcacagcggcgtgtgtaccgacccccagccactgaaagaacagcccgccctgaacgacagccggtactgcctgagcagcagactgagagtgtccgccaccttctggcagaacccccggaaccacttcagatgccaggtgcagttctacggcctgagcgagaacgacgagtggacccaggacagagccaagcccgtgacccagatcgtgtctgccgaagcctggggcagagccgattgcggctttaccagcgagagctaccagcagggcgtgctgagcgccaccatcctgtacgagatcctgctgggcaaggccaccctgtacgccgtgctggtgtctgccctggtgctgatggctatggtcaagcggaaggacagccggggaagggccaagcgatctggatctggagcaacaaacttctcactactcaaacaagcaggtgacgtggaggagaatcccgggcctactagtatggactggatttggcgcatccttttccttgtcggcgctgctaccggcgcgcattccgggccccagctccagctgcaagagtctggacctggcctggtcaagcctagcgagacactgagcctgacctgtaccgtgtccggcgatagcatcagcagcggcgattactactggggctggatcagacagcctcctggcaaaggactggaatggatcggccacatctactacagcggcgtgacctactacaaccccagcctgaagtccagagtgaccatcagcgtggacaccagccggaaccagttctccctgaagctgtctagcgtgacagccgccgataccgccgtgtactactgcaccagagaggacagcagcaactggcggagtagaggccagggaacactggtcacagttagctctggatccggcggaggcggaagtggaggcggaggatctggcggcggaggctctttcgaacaggtgcaactggtggaatctggcgggggagtggtgcagcctggcagatccctgagactgagctgtgccgccagcggcttcatcttcagcagatacggaatgcactgggtgcgccaggcccctggcaagggactgaaatgggtggccgtgatttggtacgacggcagcaacaagctgtacgccgacagcgtgaagggccggttcaccatcagcagagacaacagcaagaacaccctgtacctgcagatgaacagcctgcgggccgaggacaccgccgtgtactattgcgccagagactactacgacaacagccggcaccactggggcttcgactattggggccagggaacccttgtgaccgtgtcctctacgcgtatccagaaccctgatcctgccgtgtaccagctgcgggatagcaagagcagcgacaagagcgtgtgtctgttcaccgacttcgacagccagaccaacgtgtcccagagcaaggactccgacgtgtacatcaccgataagtgcgtgctggacatgcggagcatggacttcaagagcaactccgccgtggcctggtccaacaagtccgatttcgcctgcgccaacgccttcaacaacagcattatccccgaggacacattcttcccaagccccgagagcagctgcgacgtgaagctggtggaaaagagcttcgagacagacaccaacctgaacttccagaacctgagcgtgatcggcttcagaatcctgctgctgaaagtggccggctttaacctgctgatgaccctgcggctgtggtccagc

SEQ ID NO: 2431 - DNA, 2676 bp, Artificial Sequence
  Synthetic Polynucloetide
atggccttaccagtgaccgccttgctcctgccgctggccttgctgctccacgccgccaggccggaagtgcagctggttgaatctggcggaggactggttcagcctggcggatctctgagactgtcttgtgccgccagcggcttcagcttcagcgacttttggatgagctgggtccgacaggcccctggcaaaggacttgaatgggtcgccacaatcagccaggccggcagcgagaaggactacgtggactctgtgaagggcagattcaccatcagccgggacaacgccaagaagtccctgtacctccagatgaacagcctgagagccgaggacaccgccgtgtactattgtgcctctggcgtgtacagcttcgactacagaggccagggcaccctggtcacagtctcttctggtaccggcggaggcggatctggcggcggaggtagcggtggcggaggatctgaattcgagatccagatgacccagagccccagcagcatgtctgccagcctgggcgacaccatcaccatcacatgccaggccacccaggacatcttcaagaacctgaactggtatcagcagaagcccggcaagccccccagcctgctgatctactatgccaccgaactggccgagggcgtgcccagcagattttctggcagcggcagcggctccgactacagcctgaccatcagcaacctggaaagcgaggacttcgccgcctactactgcctccagttcttcgagttcccattcaccttcggctccggcaccaagctggaaatgaagctcgaggacctgaagaacgtgttcccacctgaggtggccgtgttcgagcctagcgaggccgagatcagccacacccagaaagccaccctcgtgtgcctggctaccggcttctaccccgaccatgtggaactgtcttggtgggtcaacggcaaagaggtgcacagcggcgtgtgtaccgacccccagccactgaaagaacagcccgccctgaacgacagccggtactgcctgagcagcagactgagagtgtccgccaccttctggcagaacccccggaaccacttcagatgccaggtgcagttctacggcctgagcgagaacgacgagtggacccaggacagagccaagcccgtgacccagatcgtgtctgccgaagcctggggcagagccgattgcggctttaccagcgagagctaccagcagggcgtgctgagcgccaccatcctgtacgagatcctgctgggcaaggccaccctgtacgccgtgctggtgtctgccctggtgctgatggctatggtcaagcggaaggacagccggggaagggccaagcgatctggatctggagcaacaaacttctcactactcaaacaagcaggtgacgtggaggagaatcccgggcctactagtatggactggatttggcgcatccttttccttgtcggcgctgctaccggcgcgcattccgggccccagctccagctgcaagagtctggacctggcctggtcaagcctagcgagacactgagcctgacctgtaccgtgtccggcgatagcatcagcagcggcgattactactggggctggatcagacagcctcctggcaaaggactggaatggatcggccacatctactacagcggcgtgacctactacaaccccagcctgaagtccagagtgaccatcagcgtggacaccagccggaaccagttctccctgaagctgtctagcgtgacagccgccgataccgccgtgtactactgcaccagagaggacagcagcaactggcggagtagaggccagggaacactggtcacagttagctctggatccggcggaggcggaagtggaggcggaggatctggcggcggaggctctttcgaacaggtgcaactccagcagtctggcgctgagcttgtgcggcctggcacctctgtgaaggtgtcctgtaaagccagcggctacgtgttcaccaactactggatcgagtggatcaagcagcggccaggccagggcctggaatggatcggcgtgatgaatccaggcagcggcgagacaacctacaacgagaagttcaagggcaaggccaccctgaccgccgacaagagcagcagcacagcctacatgcaactgtcctccctgaccagcgtggacagcgccgtgtacttctgcgccagggaccacgaccgggactactacgctatggactactggggccagggcaccagcgtgaccgtgtcatctacgcgtatccagaaccctgatcctgccgtgtaccagctgcgggatagcaagagcagcgacaagagcgtgtgtctgttcaccgacttcgacagccagaccaacgtgtcccagagcaaggactccgacgtgtacatcaccgataagtgcgtgctggacatgcggagcatggacttcaagagcaactccgccgtggcctggtccaacaagtccgatttcgcctgcgccaacgccttcaacaacagcattatccccgaggacacattcttcccaagccccgagagcagctgcgacgtgaagctggtggaaaagagcttcgagacagacaccaacctgaacttccagaacctgagcgtgatcggcttcagaatcctgctgctgaaagtggccggctttaacctgctgatgaccctgcggctgtggtccagc

SEQ ID NO: 2432 - DNA, 2667 bp, Artificial Sequence
  Synthetic Polynucloetide
atggccttaccagtgaccgccttgctcctgccgctggccttgctgctccacgccgccaggccggaagtgcagctggttgaatctggcggaggactggttcagcctggcggatctctgagactgtcttgtgccgccagcggcttcagcttcagcgacttttggatgagctgggtccgacaggcccctggcaaaggacttgaatgggtcgccacaatcagccaggccggcagcgagaaggactacgtggactctgtgaagggcagattcaccatcagccgggacaacgccaagaagtccctgtacctccagatgaacagcctgagagccgaggacaccgccgtgtactattgtgcctctggcgtgtacagcttcgactacagaggccagggcaccctggtcacagtctcttctggtaccggcggaggcggatctggcggcggaggtagcggtggcggaggatctgaattcgacatcctgctgacacagagccccgccatcctgtccgtgtctccaggcgagagagtgtcctttagctgccgggccagccagaacatcggcaccagcatccactggtatcagcagcggaccaacggcagccccagactgctgattaagtacgccagcgagtccgtgtccggcatccccagcagattttctggcagcggctccggcaccgacttcaccctgagcatcaacagcgtggaaagcgaggacattgccgactactactgccagcacaccaatagctggcccaccacctttggcggaggcaccaagctggaaatcaagagactcgaggacctgaagaacgtgttcccacctgaggtggccgtgttcgagcctagcgaggccgagatcagccacacccagaaagccaccctcgtgtgcctggctaccggcttctaccccgaccatgtggaactgtcttggtgggtcaacggcaaagaggtgcacagcggcgtgtgtaccgacccccagccactgaaagaacagcccgccctgaacgacagccggtactgcctgagcagcagactgagagtgtccgccaccttctggcagaacccccggaaccacttcagatgccaggtgcagttctacggcctgagcgagaacgacgagtggacccaggacagagccaagcccgtgacccagatcgtgtctgccgaagcctggggcagagccgattgcggctttaccagcgagagctaccagcagggcgtgctgagcgccaccatcctgtacgagatcctgctgggcaaggccaccctgtacgccgtgctggtgtctgccctggtgctgatggctatggtcaagcggaaggacagccggggaagggccaagcgatctggatctggagcaacaaacttctcactactcaaacaagcaggtgacgtggaggagaatcccgggcctactagtatggactggatttggcgcatccttttccttgtcggcgctgctaccggcgcgcattccgggccccagctccagctgcaagagtctggacctggcctggtcaagcctagcgagacactgagcctgacctgtaccgtgtccggcgatagcatcagcagcggcgattactactggggctggatcagacagcctcctggcaaaggactggaatggatcggccacatctactacagcggcgtgacctactacaaccccagcctgaagtccagagtgaccatcagcgtggacaccagccggaaccagttctccctgaagctgtctagcgtgacagccgccgataccgccgtgtactactgcaccagagaggacagcagcaactggcggagtagaggccagggaacactggtcacagttagctctggatccggcggaggcggaagtggaggcggaggatctggcggcggaggctctttcgaacaggtgcaactccagcagtccgacgccgagcttgtgaagcctggcgcttccgtgaagattagctgcaaggccagcggctacaccttcaccgaccacgccattcactgggtcaagcagaagcccgagcagggcctggaatggatcggctacttcagccccggcaacggcgacatcaagtacaacgagaagttcaagggcaaggccaccctgaccgccgacaagagcagcagcacagcctacatgcaactgaacagcctgaccagcgaggactccgccgtgtacttctgcaagcggagctacggcaactacgactactggggccagggcaccacactgaccgtgtctagtacgcgtatccagaaccctgatcctgccgtgtaccagctgcgggatagcaagagcagcgacaagagcgtgtgtctgttcaccgacttcgacagccagaccaacgtgtcccagagcaaggactccgacgtgtacatcaccgataagtgcgtgctggacatgcggagcatggacttcaagagcaactccgccgtggcctggtccaacaagtccgatttcgcctgcgccaacgccttcaacaacagcattatccccgaggacacattcttcccaagccccgagagcagctgcgacgtgaagctggtggaaaagagcttcgagacagacaccaacctgaacttccagaacctgagcgtgatcggcttcagaatcctgctgctgaaagtggccggctttaacctgctgatgaccctgcggctgtggtccagc

SEQ ID NO: 2433 - DNA, 2682 bp, Artificial Sequence
  Synthetic Polynucloetide
atggccttaccagtgaccgccttgctcctgccgctggccttgctgctccacgccgccaggccggaagtgcagctggttgaatctggcggaggactggttcagcctggcggatctctgagactgtcttgtgccgccagcggcttcagcttcagcgacttttggatgagctgggtccgacaggcccctggcaaaggacttgaatgggtcgccacaatcagccaggccggcagcgagaaggactacgtggactctgtgaagggcagattcaccatcagccgggacaacgccaagaagtccctgtacctccagatgaacagcctgagagccgaggacaccgccgtgtactattgtgcctctggcgtgtacagcttcgactacagaggccagggcaccctggtcacagtctcttctggtaccggcggaggcggatctggcggcggaggtagcggtggcggaggatctgaattcgacatcgtgatgacccagagccccgatagcctggccgtgtctctgggagagagagccaccatcaactgcaagagcagccagagcctgctgaacagcggcgaccagaagaactacctgacctggtatcagcagaagcccggccagccccccaagctgctgatctactgggccagcaccagagaaagcggcgtgcccgatagattcagcggcagcggaagtggcaccgacttcaccctgaccatcagttctcttcaggccgaggacgtggccgtgtactactgccagaacgactacagctaccccctgaccttcggccagggcaccaaggtggaaatcaagctcgaggacctgaagaacgtgttcccacctgaggtggccgtgttcgagcctagcgaggccgagatcagccacacccagaaagccaccctcgtgtgcctggctaccggcttctaccccgaccatgtggaactgtcttggtgggtcaacggcaaagaggtgcacagcggcgtgtgtaccgacccccagccactgaaagaacagcccgccctgaacgacagccggtactgcctgagcagcagactgagagtgtccgccaccttctggcagaacccccggaaccacttcagatgccaggtgcagttctacggcctgagcgagaacgacgagtggacccaggacagagccaagcccgtgacccagatcgtgtctgccgaagcctggggcagagccgattgcggctttaccagcgagagctaccagcagggcgtgctgagcgccaccatcctgtacgagatcctgctgggcaaggccaccctgtacgccgtgctggtgtctgccctggtgctgatggctatggtcaagcggaaggacagccggggaagggccaagcgatctggatctggagcaacaaacttctcactactcaaacaagcaggtgacgtggaggagaatcccgggcctactagtatggactggatttggcgcatccttttccttgtcggcgctgctaccggcgcgcattccgggccccagctccagctgcaagagtctggacctggcctggtcaagcctagcgagacactgagcctgacctgtaccgtgtccggcgatagcatcagcagcggcgattactactggggctggatcagacagcctcctggcaaaggactggaatggatcggccacatctactacagcggcgtgacctactacaaccccagcctgaagtccagagtgaccatcagcgtggacaccagccggaaccagttctccctgaagctgtctagcgtgacagccgccgataccgccgtgtactactgcaccagagaggacagcagcaactggcggagtagaggccagggaacactggtcacagttagctctggatccggcggaggcggaagtggaggcggaggatctggcggcggaggctctttcgaacaggtgcagctggtgcagtctggggccgaagtgaagaaaaccggcagcagcgtgaaggtgtcctgcaaggccagcggctacacctttaccgaccacgccattcacgtgtggcggcaggctccaggacaggccctggaatggatgggccacttcagccccggcaacaccgacatcaagtacaacgacaagttcaagggcagagtgaccctgaccgtggaccgcagcatgagcaccgcctacatggaactgagcagcctgcggagcgaggacaccgccatgtactattgcaagaccagcaccttctttttcgactactggggccagggaacaatggtcaccgtgtccagcacgcgtatccagaaccctgatcctgccgtgtaccagctgcgggatagcaagagcagcgacaagagcgtgtgtctgttcaccgacttcgacagccagaccaacgtgtcccagagcaaggactccgacgtgtacatcaccgataagtgcgtgctggacatgcggagcatggacttcaagagcaactccgccgtggcctggtccaacaagtccgatttcgcctgcgccaacgccttcaacaacagcattatccccgaggacacattcttcccaagccccgagagcagctgcgacgtgaagctggtggaaaagagcttcgagacagacaccaacctgaacttccagaacctgagcgtgatcggcttcagaatcctgctgctgaaagtggccggctttaacctgctgatgaccctgcggctgtggtccagc

SEQ ID NO: 2434 - DNA, 2679 bp, Artificial Sequence
  Synthetic Polynucloetide
atggccttaccagtgaccgccttgctcctgccgctggccttgctgctccacgccgccaggccggaagtgcagctggttgaatctggcggaggactggttcagcctggcggatctctgagactgtcttgtgccgccagcggcttcagcttcagcgacttttggatgagctgggtccgacaggcccctggcaaaggacttgaatgggtcgccacaatcagccaggccggcagcgagaaggactacgtggactctgtgaagggcagattcaccatcagccgggacaacgccaagaagtccctgtacctccagatgaacagcctgagagccgaggacaccgccgtgtactattgtgcctctggcgtgtacagcttcgactacagaggccagggcaccctggtcacagtctcttctggtaccggcggaggcggatctggcggcggaggtagcggtggcggaggatctgaattcgacatccagatgacccagagccccagcagcctgtctgccagcgtgggcgacagagtgaccatcacatgcaaggccagccaggacgtgtccattgccgtggcctggtatcagcagaagcccggcaaggcccccaaggtgctgatctacagcgccagctacagatacaccggcgtgcccgacagattcagcggctctggcagcggcaccgacttcaccttcaccatcagctccctccagcccgaggatattgccgtgtactactgccagcagcactacatcacccccctgacctttggcggaggcaccaaggtggaaatcaagctcgaggacctgaagaacgtgttcccacctgaggtggccgtgttcgagcctagcgaggccgagatcagccacacccagaaagccaccctcgtgtgcctggctaccggcttctaccccgaccatgtggaactgtcttggtgggtcaacggcaaagaggtgcacagcggcgtgtgtaccgacccccagccactgaaagaacagcccgccctgaacgacagccggtactgcctgagcagcagactgagagtgtccgccaccttctggcagaacccccggaaccacttcagatgccaggtgcagttctacggcctgagcgagaacgacgagtggacccaggacagagccaagcccgtgacccagatcgtgtctgccgaagcctggggcagagccgattgcggctttaccagcgagagctaccagcagggcgtgctgagcgccaccatcctgtacgagatcctgctgggcaaggccaccctgtacgccgtgctggtgtctgccctggtgctgatggctatggtcaagcggaaggacagccggggaagggccaagcgatctggatctggagcaacaaacttctcactactcaaacaagcaggtgacgtggaggagaatcccgggcctactagtatggactggatttggcgcatccttttccttgtcggcgctgctaccggcgcgcattccgggccccagctccagctgcaagagtctggacctggcctggtcaagcctagcgagacactgagcctgacctgtaccgtgtccggcgatagcatcagcagcggcgattactactggggctggatcagacagcctcctggcaaaggactggaatggatcggccacatctactacagcggcgtgacctactacaaccccagcctgaagtccagagtgaccatcagcgtggacaccagccggaaccagttctccctgaagctgtctagcgtgacagccgccgataccgccgtgtactactgcaccagagaggacagcagcaactggcggagtagaggccagggaacactggtcacagttagctctggatccggcggaggcggaagtggaggcggaggatctggcggcggaggctctttcgaacagatccaactggtgcagagcggccacgaagtgaagaaacctggggccagcgtgaaggtgtcctgcaaagccagcggctacacctttaccaactacggcatgaactgggtgcgccaggcccctggacagggcctggaatggatgggctggatcaacaccaagaccggcgagcccacctacgccgaagagttcaagggcagattcgtgttcagcctggaaaccagcgcctccaccgcctacctccagatcagctctctgaaggccgaggacaccgccatgtacttttgcggcagaggcggctacggcagcagctactggtacttcgatgtgtggggccagggcaccaccgtgaccgtgtcatctacgcgtatccagaaccctgatcctgccgtgtaccagctgcgggatagcaagagcagcgacaagagcgtgtgtctgttcaccgacttcgacagccagaccaacgtgtcccagagcaaggactccgacgtgtacatcaccgataagtgcgtgctggacatgcggagcatggacttcaagagcaactccgccgtggcctggtccaacaagtccgatttcgcctgcgccaacgccttcaacaacagcattatccccgaggacacattcttcccaagccccgagagcagctgcgacgtgaagctggtggaaaagagcttcgagacagacaccaacctgaacttccagaacctgagcgtgatcggcttcagaatcctgctgctgaaagtggccggctttaacctgctgatgaccctgcggctgtggtccagc

SEQ ID NO: 2435 - DNA, 2685 bp, Artificial Sequence
  Synthetic Polynucloetide
atggccttaccagtgaccgccttgctcctgccgctggccttgctgctccacgccgccaggccggaagtgcagctggttgaatctggcggaggactggttcagcctggcggatctctgagactgtcttgtgccgccagcggcttcagcttcagcgacttttggatgagctgggtccgacaggcccctggcaaaggacttgaatgggtcgccacaatcagccaggccggcagcgagaaggactacgtggactctgtgaagggcagattcaccatcagccgggacaacgccaagaagtccctgtacctccagatgaacagcctgagagccgaggacaccgccgtgtactattgtgcctctggcgtgtacagcttcgactacagaggccagggcaccctggtcacagtctcttctggtaccggcggaggcggatctggcggcggaggtagcggtggcggaggatctgaattcgacatcgtgatgacccagagccccgatagcctggccgtgtctctgggagagagagccaccatcaactgccgggccagcaagagcgtgtccaccagcggctacagctacatgcactggtatcagcagaagcccggccagccccccaagctgctgatctacctggcctccaacctggaaagcggcgtgcccgatagattcagcggcagcggctctggcaccgacttcaccctgaccatcagttctcttcaggccgaggacgtggccgtgtactactgccagcacagcagagagctgccctacaccttcggccagggcaccaagctggaaatcaagctcgaggacctgaagaacgtgttcccacctgaggtggccgtgttcgagcctagcgaggccgagatcagccacacccagaaagccaccctcgtgtgcctggctaccggcttctaccccgaccatgtggaactgtcttggtgggtcaacggcaaagaggtgcacagcggcgtgtgtaccgacccccagccactgaaagaacagcccgccctgaacgacagccggtactgcctgagcagcagactgagagtgtccgccaccttctggcagaacccccggaaccacttcagatgccaggtgcagttctacggcctgagcgagaacgacgagtggacccaggacagagccaagcccgtgacccagatcgtgtctgccgaagcctggggcagagccgattgcggctttaccagcgagagctaccagcagggcgtgctgagcgccaccatcctgtacgagatcctgctgggcaaggccaccctgtacgccgtgctggtgtctgccctggtgctgatggctatggtcaagcggaaggacagccggggaagggccaagcgatctggatctggagcaacaaacttctcactactcaaacaagcaggtgacgtggaggagaatcccgggcctactagtatggactggatttggcgcatccttttccttgtcggcgctgctaccggcgcgcattccgggccccagctccagctgcaagagtctggacctggcctggtcaagcctagcgagacactgagcctgacctgtaccgtgtccggcgatagcatcagcagcggcgattactactggggctggatcagacagcctcctggcaaaggactggaatggatcggccacatctactacagcggcgtgacctactacaaccccagcctgaagtccagagtgaccatcagcgtggacaccagccggaaccagttctccctgaagctgtctagcgtgacagccgccgataccgccgtgtactactgcaccagagaggacagcagcaactggcggagtagaggccagggaacactggtcacagttagctctggatccggcggaggcggaagtggaggcggaggatctggcggcggaggctctttcgaacaggtgcaactccaggaatctggccctggccttgtgaagcccagcgagacactgagcctgacctgtaccgtgtccggcggcagcatcagctcttacggcgtgcactggattcggcagcctccaggcaagggcctggaatggatcggcgtgatctggacctccggcgtgaccgactacaacagcgccctgatgggcagagtgaccatctccgtggacaccagcaagaaccagttcagcctgaagctgagcagcgtgacagccgccgataccgccgtgtattattgcgccagagatggcgactacgaccgctacacaatggactactggggccagggaacccttgtgaccgtgtcctctacgcgtatccagaaccctgatcctgccgtgtaccagctgcgggatagcaagagcagcgacaagagcgtgtgtctgttcaccgacttcgacagccagaccaacgtgtcccagagcaaggactccgacgtgtacatcaccgataagtgcgtgctggacatgcggagcatggacttcaagagcaactccgccgtggcctggtccaacaagtccgatttcgcctgcgccaacgccttcaacaacagcattatccccgaggacacattcttcccaagccccgagagcagctgcgacgtgaagctggtggaaaagagcttcgagacagacaccaacctgaacttccagaacctgagcgtgatcggcttcagaatcctgctgctgaaagtggccggctttaacctgctgatgaccctgcggctgtggtccagc

SEQ ID NO: 2436 - DNA, 2685 bp, Artificial Sequence
  Synthetic Polynucloetide
atggccttaccagtgaccgccttgctcctgccgctggccttgctgctccacgccgccaggccggaagtgcagctggttgaatctggcggaggactggttcagcctggcggatctctgagactgtcttgtgccgccagcggcttcagcttcagcgacttttggatgagctgggtccgacaggcccctggcaaaggacttgaatgggtcgccacaatcagccaggccggcagcgagaaggactacgtggactctgtgaagggcagattcaccatcagccgggacaacgccaagaagtccctgtacctccagatgaacagcctgagagccgaggacaccgccgtgtactattgtgcctctggcgtgtacagcttcgactacagaggccagggcaccctggtcacagtctcttctggtaccggcggaggcggatctggcggcggaggtagcggtggcggaggatctgaattcgacatccagatgacccagagccccagcagcctgtctgccagcgtgggcgacagagtgaccatcacctgtagagccagccagagcatcggcaccagcctgcactggtatcagcagaagcctggcaaggcccccaagctgctgattaagttcgccagcagactgcagagcggcgtgcccagcagattttctggcagcggctccggcaccgacttcaccctgacaatcagctccctgcagcccgaggacttcgccacctactactgccagcagagccccggcttccctccaacctttggacagggcaccaagctggaaatcaagcggctcgaggacctgaagaacgtgttcccacctgaggtggccgtgttcgagcctagcgaggccgagatcagccacacccagaaagccaccctcgtgtgcctggctaccggcttctaccccgaccatgtggaactgtcttggtgggtcaacggcaaagaggtgcacagcggcgtgtgtaccgacccccagccactgaaagaacagcccgccctgaacgacagccggtactgcctgagcagcagactgagagtgtccgccaccttctggcagaacccccggaaccacttcagatgccaggtgcagttctacggcctgagcgagaacgacgagtggacccaggacagagccaagcccgtgacccagatcgtgtctgccgaagcctggggcagagccgattgcggctttaccagcgagagctaccagcagggcgtgctgagcgccaccatcctgtacgagatcctgctgggcaaggccaccctgtacgccgtgctggtgtctgccctggtgctgatggctatggtcaagcggaaggacagccggggaagggccaagcgatctggatctggagcaacaaacttctcactactcaaacaagcaggtgacgtggaggagaatcccgggcctactagtatggactggatttggcgcatccttttccttgtcggcgctgctaccggcgcgcattccgggccccagctccagctgcaagagtctggacctggcctggtcaagcctagcgagacactgagcctgacctgtaccgtgtccggcgatagcatcagcagcggcgattactactggggctggatcagacagcctcctggcaaaggactggaatggatcggccacatctactacagcggcgtgacctactacaaccccagcctgaagtccagagtgaccatcagcgtggacaccagccggaaccagttctccctgaagctgtctagcgtgacagccgccgataccgccgtgtactactgcaccagagaggacagcagcaactggcggagtagaggccagggaacactggtcacagttagctctggatccggcggaggcggaagtggaggcggaggatctggcggcggaggctctttcgaacaggtgcaactggtggaatctggcggcggacttgtgaagccaggcggcagcctgagactgagctgtgccgccagcggcttcagcatcaccaccagcggctactactggacctggatcagacagttccccggcaagggcctggaatggatgggctacatcggctacaacagcaagacctactacaaccccgccctgaagtcccggatcaccatcagcagagacaacgccaagaacagcctgtacctgcagatgaactccctgagagccgaggataccgccgtgtactactgcgccagatccctgtacggcggctacaaggacgccttcgatagctggggccagggaacccttgtgaccgtgtctagcacgcgtatccagaaccctgatcctgccgtgtaccagctgcgggatagcaagagcagcgacaagagcgtgtgtctgttcaccgacttcgacagccagaccaacgtgtcccagagcaaggactccgacgtgtacatcaccgataagtgcgtgctggacatgcggagcatggacttcaagagcaactccgccgtggcctggtccaacaagtccgatttcgcctgcgccaacgccttcaacaacagcattatccccgaggacacattcttcccaagccccgagagcagctgcgacgtgaagctggtggaaaagagcttcgagacagacaccaacctgaacttccagaacctgagcgtgatcggcttcagaatcctgctgctgaaagtggccggctttaacctgctgatgaccctgcggctgtggtccagc

SEQ ID NO: 2437 - DNA, 2700 bp, Artificial Sequence
  Synthetic Polynucloetide
atggccttaccagtgaccgccttgctcctgccgctggccttgctgctccacgccgccaggccggaagtgcagctggttgaatctggcggaggactggttcagcctggcggatctctgagactgtcttgtgccgccagcggcttcagcttcagcgacttttggatgagctgggtccgacaggcccctggcaaaggacttgaatgggtcgccacaatcagccaggccggcagcgagaaggactacgtggactctgtgaagggcagattcaccatcagccgggacaacgccaagaagtccctgtacctccagatgaacagcctgagagccgaggacaccgccgtgtactattgtgcctctggcgtgtacagcttcgactacagaggccagggcaccctggtcacagtctcttctggtaccggcggaggcggatctggcggcggaggtagcggtggcggaggatctgaattcgacgagatcgtgctgacccagagccctctgagcctgcctgtgacacctggcgagcctgccagcatctcctgtagaagcagccagagcctgctgcacagcatcggctacaactacctggactggtatctccagaagcccggccagagcccccaactgctgatctacctgggcagcaacagagccagcggcgtgcccgatagattttccggcagcggctccggcaccgacttcaccctgaagatcagccgggtggaagccgaggacgtgggcgtgtactactgtatgcaggccctccagacccccctgacctttggcggaggcaccaaggtggaaatcaagcggctcgaggacctgaagaacgtgttcccacctgaggtggccgtgttcgagcctagcgaggccgagatcagccacacccagaaagccaccctcgtgtgcctggctaccggcttctaccccgaccatgtggaactgtcttggtgggtcaacggcaaagaggtgcacagcggcgtgtgtaccgacccccagccactgaaagaacagcccgccctgaacgacagccggtactgcctgagcagcagactgagagtgtccgccaccttctggcagaacccccggaaccacttcagatgccaggtgcagttctacggcctgagcgagaacgacgagtggacccaggacagagccaagcccgtgacccagatcgtgtctgccgaagcctggggcagagccgattgcggctttaccagcgagagctaccagcagggcgtgctgagcgccaccatcctgtacgagatcctgctgggcaaggccaccctgtacgccgtgctggtgtctgccctggtgctgatggctatggtcaagcggaaggacagccggggaagggccaagcgatctggatctggagcaacaaacttctcactactcaaacaagcaggtgacgtggaggagaatcccgggcctactagtatggactggatttggcgcatccttttccttgtcggcgctgctaccggcgcgcattccgggccccagctccagctgcaagagtctggacctggcctggtcaagcctagcgagacactgagcctgacctgtaccgtgtccggcgatagcatcagcagcggcgattactactggggctggatcagacagcctcctggcaaaggactggaatggatcggccacatctactacagcggcgtgacctactacaaccccagcctgaagtccagagtgaccatcagcgtggacaccagccggaaccagttctccctgaagctgtctagcgtgacagccgccgataccgccgtgtactactgcaccagagaggacagcagcaactggcggagtagaggccagggaacactggtcacagttagctctggatccggcggaggcggaagtggaggcggaggatctggcggcggaggctctttcgaagaagtgcaactggtggaaagcggaggcggcgtggtgcagcctggaagaagcctgagactgagctgtgccgccagcggcttcaccttccggtcctacggaatgcactgggtgcgccaggcccctggcaaaggactggaatgggtggccgtgatctcctacgacggctccaacaagtactacaccgacagcgtgaacggcagattcaccatcagcagagacaacagcaagaacaccctgtacctccagatgaacagcctgcgggccgaggacaccgccgtgtactattgtgctagaggcggaggctactacgagacaagcggccctgattactggggccagggcacactcgtgaccgtgtctagtacgcgtatccagaaccctgatcctgccgtgtaccagctgcgggatagcaagagcagcgacaagagcgtgtgtctgttcaccgacttcgacagccagaccaacgtgtcccagagcaaggactccgacgtgtacatcaccgataagtgcgtgctggacatgcggagcatggacttcaagagcaactccgccgtggcctggtccaacaagtccgatttcgcctgcgccaacgccttcaacaacagcattatccccgaggacacattcttcccaagccccgagagcagctgcgacgtgaagctggtggaaaagagcttcgagacagacaccaacctgaacttccagaacctgagcgtgatcggcttcagaatcctgctgctgaaagtggccggctttaacctgctgatgaccctgcggctgtggtccagc

SEQ ID NO: 2438 - DNA, 2694 bp, Artificial Sequence
  Synthetic Polynucloetide
atggccttaccagtgaccgccttgctcctgccgctggccttgctgctccacgccgccaggccggaagtgcagctggttgaatctggcggaggactggttcagcctggcggatctctgagactgtcttgtgccgccagcggcttcagcttcagcgacttttggatgagctgggtccgacaggcccctggcaaaggacttgaatgggtcgccacaatcagccaggccggcagcgagaaggactacgtggactctgtgaagggcagattcaccatcagccgggacaacgccaagaagtccctgtacctccagatgaacagcctgagagccgaggacaccgccgtgtactattgtgcctctggcgtgtacagcttcgactacagaggccagggcaccctggtcacagtctcttctggtaccggcggaggcggatctggcggcggaggtagcggtggcggaggatctgaattcgacgacgtcgtgatgacccagagccctctgagcctgcctgtgacacctggcgagcctgccagcatctcctgtagaagcagccagagcctgctgcacagcatcggctacaactacctgcactggtttctccagaagcccggccagagcccccaactgctgatctacctgggcagcaacagagccagcggcgtgcccgatagattttccggcagcggctccggcaccgacttcaccctgaagatcagccgggtggaagccgaggacgtgggcgtgtactactgtatgcaggccctccagacccctcccacctttggacagggcaccagactggaaatcaagcggctcgaggacctgaagaacgtgttcccacctgaggtggccgtgttcgagcctagcgaggccgagatcagccacacccagaaagccaccctcgtgtgcctggctaccggcttctaccccgaccatgtggaactgtcttggtgggtcaacggcaaagaggtgcacagcggcgtgtgtaccgacccccagccactgaaagaacagcccgccctgaacgacagccggtactgcctgagcagcagactgagagtgtccgccaccttctggcagaacccccggaaccacttcagatgccaggtgcagttctacggcctgagcgagaacgacgagtggacccaggacagagccaagcccgtgacccagatcgtgtctgccgaagcctggggcagagccgattgcggctttaccagcgagagctaccagcagggcgtgctgagcgccaccatcctgtacgagatcctgctgggcaaggccaccctgtacgccgtgctggtgtctgccctggtgctgatggctatggtcaagcggaaggacagccggggaagggccaagcgatctggatctggagcaacaaacttctcactactcaaacaagcaggtgacgtggaggagaatcccgggcctactagtatggactggatttggcgcatccttttccttgtcggcgctgctaccggcgcgcattccgggccccagctccagctgcaagagtctggacctggcctggtcaagcctagcgagacactgagcctgacctgtaccgtgtccggcgatagcatcagcagcggcgattactactggggctggatcagacagcctcctggcaaaggactggaatggatcggccacatctactacagcggcgtgacctactacaaccccagcctgaagtccagagtgaccatcagcgtggacaccagccggaaccagttctccctgaagctgtctagcgtgacagccgccgataccgccgtgtactactgcaccagagaggacagcagcaactggcggagtagaggccagggaacactggtcacagttagctctggatccggcggaggcggaagtggaggcggaggatctggcggcggaggctctttcgaacaactccaactccaggaaagcggccctggcctcgtgaagcctagcggcacactgagcctgacatgtgccgtgtctggcggcagcatcagcagcagcaactggtggtcttgggtgcgccagcctcctggcaagggcctggaatggatcggcgaaatctaccacagcggcagcaccaactacaaccccagcctgaagtccagagtgaccatcagcgtggacaagagcaagaaccagttctccctgaagctgagcagcgtgacagccgccgataccgccgtgtactattgcgtgggcagcccctacggcgactacgtgctggattattggggccagggcaccctcgtgaccgtgtctagtacgcgtatccagaaccctgatcctgccgtgtaccagctgcgggatagcaagagcagcgacaagagcgtgtgtctgttcaccgacttcgacagccagaccaacgtgtcccagagcaaggactccgacgtgtacatcaccgataagtgcgtgctggacatgcggagcatggacttcaagagcaactccgccgtggcctggtccaacaagtccgatttcgcctgcgccaacgccttcaacaacagcattatccccgaggacacattcttcccaagccccgagagcagctgcgacgtgaagctggtggaaaagagcttcgagacagacaccaacctgaacttccagaacctgagcgtgatcggcttcagaatcctgctgctgaaagtggccggctttaacctgctgatgaccctgcggctgtggtccagc

SEQ ID NO: 2439 - DNA, 2688 bp, Artificial Sequence
  Synthetic Polynucloetide
atggccttaccagtgaccgccttgctcctgccgctggccttgctgctccacgccgccaggccggaagtgcagctggttgaatctggcggaggactggttcagcctggcggatctctgagactgtcttgtgccgccagcggcttcagcttcagcgacttttggatgagctgggtccgacaggcccctggcaaaggacttgaatgggtcgccacaatcagccaggccggcagcgagaaggactacgtggactctgtgaagggcagattcaccatcagccgggacaacgccaagaagtccctgtacctccagatgaacagcctgagagccgaggacaccgccgtgtactattgtgcctctggcgtgtacagcttcgactacagaggccagggcaccctggtcacagtctcttctggtaccggcggaggcggatctggcggcggaggtagcggtggcggaggatctgaattcgacgagatcgtgctgacacagagccctggcaccctgagcctgtctctgggagagagagccacactgagctgtcgggccagccagtctatcagcagcagcttcctggcctggtatcagcagaagcccggccaggcccctaagctgctgatctacgccgccagcacaagagccaccggcatccccgatagattcagcggctctggcagcggcaccgacttcaccctgaccatcagcagactggaacccgaggacttcgccgtgtactactgccagcagtacggcagaagcctgagcttcggcggaggcaccaaggtggaagtgaagctcgaggacctgaagaacgtgttcccacctgaggtggccgtgttcgagcctagcgaggccgagatcagccacacccagaaagccaccctcgtgtgcctggctaccggcttctaccccgaccatgtggaactgtcttggtgggtcaacggcaaagaggtgcacagcggcgtgtgtaccgacccccagccactgaaagaacagcccgccctgaacgacagccggtactgcctgagcagcagactgagagtgtccgccaccttctggcagaacccccggaaccacttcagatgccaggtgcagttctacggcctgagcgagaacgacgagtggacccaggacagagccaagcccgtgacccagatcgtgtctgccgaagcctggggcagagccgattgcggctttaccagcgagagctaccagcagggcgtgctgagcgccaccatcctgtacgagatcctgctgggcaaggccaccctgtacgccgtgctggtgtctgccctggtgctgatggctatggtcaagcggaaggacagccggggaagggccaagcgatctggatctggagcaacaaacttctcactactcaaacaagcaggtgacgtggaggagaatcccgggcctactagtatggactggatttggcgcatccttttccttgtcggcgctgctaccggcgcgcattccgggccccagctccagctgcaagagtctggacctggcctggtcaagcctagcgagacactgagcctgacctgtaccgtgtccggcgatagcatcagcagcggcgattactactggggctggatcagacagcctcctggcaaaggactggaatggatcggccacatctactacagcggcgtgacctactacaaccccagcctgaagtccagagtgaccatcagcgtggacaccagccggaaccagttctccctgaagctgtctagcgtgacagccgccgataccgccgtgtactactgcaccagagaggacagcagcaactggcggagtagaggccagggaacactggtcacagttagctctggatccggcggaggcggaagtggaggcggaggatctggcggcggaggctctttcgaacaggtgcaactccagcagtctggccccggactcgtgaagcctagccagacactgagcctgacctgcgccatcagcggcgatagcgtgtccggcaatagcgccacctggaactggatcagacagagcccatctcggggcctggaatggctgggccggacctactaccgcagcaagtggaaccacgactacgccgagagcgtgaagtcccggatcaccatcaaccccgacaccagcaagaaccagttctccttgcaactgaacagcgtgacccccgaggacacagccgtgtattattgcgccagaggcgacagcagctcttggtacgccttcgactattggggccagggcaccctcgtgaccgtgtctagtacgcgtatccagaaccctgatcctgccgtgtaccagctgcgggatagcaagagcagcgacaagagcgtgtgtctgttcaccgacttcgacagccagaccaacgtgtcccagagcaaggactccgacgtgtacatcaccgataagtgcgtgctggacatgcggagcatggacttcaagagcaactccgccgtggcctggtccaacaagtccgatttcgcctgcgccaacgccttcaacaacagcattatccccgaggacacattcttcccaagccccgagagcagctgcgacgtgaagctggtggaaaagagcttcgagacagacaccaacctgaacttccagaacctgagcgtgatcggcttcagaatcctgctgctgaaagtggccggctttaacctgctgatgaccctgcggctgtggtccagc

SEQ ID NO: 2440 - DNA, 2685 bp, Artificial Sequence
  Synthetic Polynucloetide
atggccttaccagtgaccgccttgctcctgccgctggccttgctgctccacgccgccaggccggaagtgcagctggttgaatctggcggaggactggttcagcctggcggatctctgagactgtcttgtgccgccagcggcttcagcttcagcgacttttggatgagctgggtccgacaggcccctggcaaaggacttgaatgggtcgccacaatcagccaggccggcagcgagaaggactacgtggactctgtgaagggcagattcaccatcagccgggacaacgccaagaagtccctgtacctccagatgaacagcctgagagccgaggacaccgccgtgtactattgtgcctctggcgtgtacagcttcgactacagaggccagggcaccctggtcacagtctcttctggtaccggcggaggcggatctggcggcggaggtagcggtggcggaggatctgaattcgaccagagcgtcgtgacacagcctcctagcgtgtcagtggcccctggcaagaccgccagaatcacctgtggccggaacaacatcggcagcaagagcgtgcactggtatcagcagaagcccggccaggctcctgtgctggtggtgtacgacgacagcgacagacccagcggcatccccgagagattcagcggcagcaactccggcaataccgccaccctgaccatcagcagagtggaagccggcgacgaggccgactactactgccaagtgtgggacagcagcagcgatcacgtggtgtttggcggaggcaccaagctgacagtgctgggtctcgaggacctgaagaacgtgttcccacctgaggtggccgtgttcgagcctagcgaggccgagatcagccacacccagaaagccaccctcgtgtgcctggctaccggcttctaccccgaccatgtggaactgtcttggtgggtcaacggcaaagaggtgcacagcggcgtgtgtaccgacccccagccactgaaagaacagcccgccctgaacgacagccggtactgcctgagcagcagactgagagtgtccgccaccttctggcagaacccccggaaccacttcagatgccaggtgcagttctacggcctgagcgagaacgacgagtggacccaggacagagccaagcccgtgacccagatcgtgtctgccgaagcctggggcagagccgattgcggctttaccagcgagagctaccagcagggcgtgctgagcgccaccatcctgtacgagatcctgctgggcaaggccaccctgtacgccgtgctggtgtctgccctggtgctgatggctatggtcaagcggaaggacagccggggaagggccaagcgatctggatctggagcaacaaacttctcactactcaaacaagcaggtgacgtggaggagaatcccgggcctactagtatggactggatttggcgcatccttttccttgtcggcgctgctaccggcgcgcattccgggccccagctccagctgcaagagtctggacctggcctggtcaagcctagcgagacactgagcctgacctgtaccgtgtccggcgatagcatcagcagcggcgattactactggggctggatcagacagcctcctggcaaaggactggaatggatcggccacatctactacagcggcgtgacctactacaaccccagcctgaagtccagagtgaccatcagcgtggacaccagccggaaccagttctccctgaagctgtctagcgtgacagccgccgataccgccgtgtactactgcaccagagaggacagcagcaactggcggagtagaggccagggaacactggtcacagttagctctggatccggcggaggcggaagtggaggcggaggatctggcggcggaggctctttcgaagtgcaactggtgcagtctggcggaggggtcatgcggcctggcggatctctgagactgtcttgtgccgccagcggcttcaccttcgacgactacggcatgagctgggtgcgccaggcccctggaaaaggcctggaatgggtgtccggcatcaactggaatggcggcagcaccggctacgccgattctgtgcggggcagattcaccatcagccgggacaacgccaagaacagcctgtacctgcagatgaactccctgcgggccgaggacaccgccctgtactattgcgccagagagcggggctacggctaccacgaccctcacgattattggggccagggcacccttgttaccgtgtcctctacgcgtatccagaaccctgatcctgccgtgtaccagctgcgggatagcaagagcagcgacaagagcgtgtgtctgttcaccgacttcgacagccagaccaacgtgtcccagagcaaggactccgacgtgtacatcaccgataagtgcgtgctggacatgcggagcatggacttcaagagcaactccgccgtggcctggtccaacaagtccgatttcgcctgcgccaacgccttcaacaacagcattatccccgaggacacattcttcccaagccccgagagcagctgcgacgtgaagctggtggaaaagagcttcgagacagacaccaacctgaacttccagaacctgagcgtgatcggcttcagaatcctgctgctgaaagtggccggctttaacctgctgatgaccctgcggctgtggtccagc

SEQ ID NO: 2441 - DNA, 2724 bp, Artificial Sequence
  Synthetic Polynucloetide
atggccttaccagtgaccgccttgctcctgccgctggccttgctgctccacgccgccaggccggaagtgcagctggttgaatctggcggaggactggttcagcctggcggatctctgagactgtcttgtgccgccagcggcttcagcttcagcgacttttggatgagctgggtccgacaggcccctggcaaaggacttgaatgggtcgccacaatcagccaggccggcagcgagaaggactacgtggactctgtgaagggcagattcaccatcagccgggacaacgccaagaagtccctgtacctccagatgaacagcctgagagccgaggacaccgccgtgtactattgtgcctctggcgtgtacagcttcgactacagaggccagggcaccctggtcacagtctcttctggtaccggcggaggcggatctggcggcggaggtagcggtggcggaggatctgaattcgaacagaaactcatcagtgaagaagacctggaattccaggctgtcgtgacacagcctcctagcgcctctggcacaccaggccagagagtgaccatctcctgtagcggcagcagcagcaacatcggcagcaacaccgtgaactggtatcagcaggtgcccggcaccgctcccaagctgctgatctacagcaacaaccagcggcccagcggcgtgcccgatagattttctggcagcaagagcggcaccagcgccagcctggctatctctggactccagtccgaggacgaggccgactactattgcgccgcctgggacgatagcctgaacggctgggtgttcggcggaggcaccaagctgacagtgctgctcgaggacctgaagaacgtgttcccacctgaggtggccgtgttcgagcctagcgaggccgagatcagccacacccagaaagccaccctcgtgtgcctggctaccggcttctaccccgaccatgtggaactgtcttggtgggtcaacggcaaagaggtgcacagcggcgtgtgtaccgacccccagccactgaaagaacagcccgccctgaacgacagccggtactgcctgagcagcagactgagagtgtccgccaccttctggcagaacccccggaaccacttcagatgccaggtgcagttctacggcctgagcgagaacgacgagtggacccaggacagagccaagcccgtgacccagatcgtgtctgccgaagcctggggcagagccgattgcggctttaccagcgagagctaccagcagggcgtgctgagcgccaccatcctgtacgagatcctgctgggcaaggccaccctgtacgccgtgctggtgtctgccctggtgctgatggctatggtcaagcggaaggacagccggggaagggccaagcgatctggatctggagcaacaaacttctcactactcaaacaagcaggtgacgtggaggagaatcccgggcctactagtatggactggatttggcgcatccttttccttgtcggcgctgctaccggcgcgcattccgggccccagctccagctgcaagagtctggacctggcctggtcaagcctagcgagacactgagcctgacctgtaccgtgtccggcgatagcatcagcagcggcgattactactggggctggatcagacagcctcctggcaaaggactggaatggatcggccacatctactacagcggcgtgacctactacaaccccagcctgaagtccagagtgaccatcagcgtggacaccagccggaaccagttctccctgaagctgtctagcgtgacagccgccgataccgccgtgtactactgcaccagagaggacagcagcaactggcggagtagaggccagggaacactggtcacagttagctctggatccggcggaggcggaagtggaggcggaggatctggcggcggaggctctttcgaacagatgcaactggtgcagagcggagccgaagtgaaagagcctggcgagagcctgcggatctcctgcaagggcagcggctacagcttcaccaatttctggatctcttgggtgcgccagatgcccggcaagggcctggaatggatgggcagagtggaccccggctactcctacagcacctacagccctagcttccagggccacgtgaccatcagcgccgacaagagcaccagcaccgcctacctccagtggaacagcctgaaggccagcgacaccgccatgtactactgcgccagagtgcagtacagcggctattacgattggttcgacccctggggccagggcacactcgtgacagtgtcaagcacgcgtatccagaaccctgatcctgccgtgtaccagctgcgggatagcaagagcagcgacaagagcgtgtgtctgttcaccgacttcgacagccagaccaacgtgtcccagagcaaggactccgacgtgtacatcaccgataagtgcgtgctggacatgcggagcatggacttcaagagcaactccgccgtggcctggtccaacaagtccgatttcgcctgcgccaacgccttcaacaacagcattatccccgaggacacattcttcccaagccccgagagcagctgcgacgtgaagctggtggaaaagagcttcgagacagacaccaacctgaacttccagaacctgagcgtgatcggcttcagaatcctgctgctgaaagtggccggctttaacctgctgatgaccctgcggctgtggtccagc

SEQ ID NO: 2442 - DNA, 2706 bp, Artificial Sequence
  Synthetic Polynucloetide
atggccttaccagtgaccgccttgctcctgccgctggccttgctgctccacgccgccaggccggaagtgcagctggttgaatctggcggaggactggttcagcctggcggatctctgagactgtcttgtgccgccagcggcttcagcttcagcgacttttggatgagctgggtccgacaggcccctggcaaaggacttgaatgggtcgccacaatcagccaggccggcagcgagaaggactacgtggactctgtgaagggcagattcaccatcagccgggacaacgccaagaagtccctgtacctccagatgaacagcctgagagccgaggacaccgccgtgtactattgtgcctctggcgtgtacagcttcgactacagaggccagggcaccctggtcacagtctcttctggtaccggcggaggcggatctggcggcggaggtagcggtggcggaggatctgaattcgaacagaaactcatcagtgaagaagacctggaattcgacatccagatgacccagagccccagcacactgagcgccagcgtgggcgacagagtgaccatcacctgtcgggccagccagaacatcaacaagtggctggcctggtatcagcagaggcccggaaaagccccccagctgctgatctacaaggccagcagcctggaaagcggcgtgcccagcagattttctggcagcggctctggcaccgagtacaccctgaccatcagctccctccagcccgacgacttcgccacctactactgccagcagtacaacagctacgccaccttcggccagggcaccaaggtggaaatcaagagactcgaggacctgaagaacgtgttcccacctgaggtggccgtgttcgagcctagcgaggccgagatcagccacacccagaaagccaccctcgtgtgcctggctaccggcttctaccccgaccatgtggaactgtcttggtgggtcaacggcaaagaggtgcacagcggcgtgtgtaccgacccccagccactgaaagaacagcccgccctgaacgacagccggtactgcctgagcagcagactgagagtgtccgccaccttctggcagaacccccggaaccacttcagatgccaggtgcagttctacggcctgagcgagaacgacgagtggacccaggacagagccaagcccgtgacccagatcgtgtctgccgaagcctggggcagagccgattgcggctttaccagcgagagctaccagcagggcgtgctgagcgccaccatcctgtacgagatcctgctgggcaaggccaccctgtacgccgtgctggtgtctgccctggtgctgatggctatggtcaagcggaaggacagccggggaagggccaagcgatctggatctggagcaacaaacttctcactactcaaacaagcaggtgacgtggaggagaatcccgggcctactagtatggactggatttggcgcatccttttccttgtcggcgctgctaccggcgcgcattccgggccccagctccagctgcaagagtctggacctggcctggtcaagcctagcgagacactgagcctgacctgtaccgtgtccggcgatagcatcagcagcggcgattactactggggctggatcagacagcctcctggcaaaggactggaatggatcggccacatctactacagcggcgtgacctactacaaccccagcctgaagtccagagtgaccatcagcgtggacaccagccggaaccagttctccctgaagctgtctagcgtgacagccgccgataccgccgtgtactactgcaccagagaggacagcagcaactggcggagtagaggccagggaacactggtcacagttagctctggatccggcggaggcggaagtggaggcggaggatctggcggcggaggctctttcgaacaggtgcagctggtgcagtctggggccgaagtgaagaagcctggcgagagcctgaagatcagctgcaagggctccggctacaacttctctaacaagtggatcggctgggtgcgccagctgcctggcagaggactggaatggatcgccatcatctaccccggctacagcgacatcacctacagccccagcttccagggccgcgtgacaatcagcgccgacaccagcatcaacaccgcctacctgcactggcacagcctgaaggccagcgacaccgccatgtactactgcgtgcggcatacagccctggctggcttcgattattggggcctgggcaccctcgtgaccgtgtctagtacgcgtatccagaaccctgatcctgccgtgtaccagctgcgggatagcaagagcagcgacaagagcgtgtgtctgttcaccgacttcgacagccagaccaacgtgtcccagagcaaggactccgacgtgtacatcaccgataagtgcgtgctggacatgcggagcatggacttcaagagcaactccgccgtggcctggtccaacaagtccgatttcgcctgcgccaacgccttcaacaacagcattatccccgaggacacattcttcccaagccccgagagcagctgcgacgtgaagctggtggaaaagagcttcgagacagacaccaacctgaacttccagaacctgagcgtgatcggcttcagaatcctgctgctgaaagtggccggctttaacctgctgatgaccctgcggctgtggtccagc

SEQ ID NO: 2443 - DNA, 2679 bp, Artificial Sequence
  Synthetic Polynucloetide
atggccttaccagtgaccgccttgctcctgccgctggccttgctgctccacgccgccaggccggaagtgcagctggttgaatctggcggaggactggttcagcctggcggatctctgagactgtcttgtgccgccagcggcttcagcttcagcgacttttggatgagctgggtccgacaggcccctggcaaaggacttgaatgggtcgccacaatcagccaggccggcagcgagaaggactacgtggactctgtgaagggcagattcaccatcagccgggacaacgccaagaagtccctgtacctccagatgaacagcctgagagccgaggacaccgccgtgtactattgtgcctctggcgtgtacagcttcgactacagaggccagggcaccctggtcacagtctcttctggtaccggcggaggcggatctggcggcggaggtagcggtggcggaggatctgaattcatcgtgctgacacagagccctgcttctctggccgtgtctctgggacagagagccaccatcagctgtagagccagcgagagcgtggacaactacggcaacaccttcatgcactggtatcagcagaagcccggccagcctcctaagctgctgatctacagagccagcaacctggaaagcggcatccccgccagattttctggcagcggcagcagaaccgacttcaccctgaccatcaatcccgtggaagccgacgacgtggcaacctactactgccagcagagcaacgaggaccctcctacatttggagccggcaccaagctggaactgaaactcgaggacctgaagaacgtgttcccacctgaggtggccgtgttcgagcctagcgaggccgagatcagccacacccagaaagccaccctcgtgtgcctggctaccggcttctaccccgaccatgtggaactgtcttggtgggtcaacggcaaagaggtgcacagcggcgtgtgtaccgacccccagccactgaaagaacagcccgccctgaacgacagccggtactgcctgagcagcagactgagagtgtccgccaccttctggcagaacccccggaaccacttcagatgccaggtgcagttctacggcctgagcgagaacgacgagtggacccaggacagagccaagcccgtgacccagatcgtgtctgccgaagcctggggcagagccgattgcggctttaccagcgagagctaccagcagggcgtgctgagcgccaccatcctgtacgagatcctgctgggcaaggccaccctgtacgccgtgctggtgtctgccctggtgctgatggctatggtcaagcggaaggacagccggggaagggccaagcgatctggatctggagcaacaaacttctcactactcaaacaagcaggtgacgtggaggagaatcccgggcctactagtatggactggatttggcgcatccttttccttgtcggcgctgctaccggcgcgcattccgggccccagctccagctgcaagagtctggacctggcctggtcaagcctagcgagacactgagcctgacctgtaccgtgtccggcgatagcatcagcagcggcgattactactggggctggatcagacagcctcctggcaaaggactggaatggatcggccacatctactacagcggcgtgacctactacaaccccagcctgaagtccagagtgaccatcagcgtggacaccagccggaaccagttctccctgaagctgtctagcgtgacagccgccgataccgccgtgtactactgcaccagagaggacagcagcaactggcggagtagaggccagggaacactggtcacagttagctctggatccggcggaggcggaagtggaggcggaggatctggcggcggaggctctttcgaacagattcagctggtgcagtctggccccgagctgaagaaacctggcgagacagtgaagatcagctgcaaggccagcggctacatcttcaccaattacggcatgaactgggtcaagcaggcccctggcaagagcttcaagtggatgggctggatcaacacctacaccggcgagagcacatacagcgccgacttcaagggcagattcgccttcagcctggaaaccagcgccagcacagcctacctgcacatcaacgacctgaagaacgaggacaccgccacctacttttgcgccagaagcggcggctacgaccctatggattattggggccagggcaccagcgtgaccgtttcttctacgcgtatccagaaccctgatcctgccgtgtaccagctgcgggatagcaagagcagcgacaagagcgtgtgtctgttcaccgacttcgacagccagaccaacgtgtcccagagcaaggactccgacgtgtacatcaccgataagtgcgtgctggacatgcggagcatggacttcaagagcaactccgccgtggcctggtccaacaagtccgatttcgcctgcgccaacgccttcaacaacagcattatccccgaggacacattcttcccaagccccgagagcagctgcgacgtgaagctggtggaaaagagcttcgagacagacaccaacctgaacttccagaacctgagcgtgatcggcttcagaatcctgctgctgaaagtggccggctttaacctgctgatgaccctgcggctgtggtccagc

SEQ ID NO: 2444 - DNA, 2676 bp, Artificial Sequence
  Synthetic Polynucloetide
atggccttaccagtgaccgccttgctcctgccgctggccttgctgctccacgccgccaggccggaagtgcagctggttgaatctggcggaggactggttcagcctggcggatctctgagactgtcttgtgccgccagcggcttcagcttcagcgacttttggatgagctgggtccgacaggcccctggcaaaggacttgaatgggtcgccacaatcagccaggccggcagcgagaaggactacgtggactctgtgaagggcagattcaccatcagccgggacaacgccaagaagtccctgtacctccagatgaacagcctgagagccgaggacaccgccgtgtactattgtgcctctggcgtgtacagcttcgactacagaggccagggcaccctggtcacagtctcttctggtaccggcggaggcggatctggcggcggaggtagcggtggcggaggatctgaattcgagatcgtgctgacacagagccctggcaccctgagcctgtctccaggcgaaagagccacactgagctgtcgggccagccagagcgtgtccaatacctacctggcctggtatcaccagaggcccggacaggctccccggctgctgatctatggcgcttctagcagagccaccggcatccccgatagattcagcggctctggcagcggcaccgacttcgccctgacaatcagctccctggaacccgaggacttcgccgtgtactactgccagcagtacagcaactcctggaccttcggccagggcaccaaggtggaaatcaagagactcgaggacctgaagaacgtgttcccacctgaggtggccgtgttcgagcctagcgaggccgagatcagccacacccagaaagccaccctcgtgtgcctggctaccggcttctaccccgaccatgtggaactgtcttggtgggtcaacggcaaagaggtgcacagcggcgtgtgtaccgacccccagccactgaaagaacagcccgccctgaacgacagccggtactgcctgagcagcagactgagagtgtccgccaccttctggcagaacccccggaaccacttcagatgccaggtgcagttctacggcctgagcgagaacgacgagtggacccaggacagagccaagcccgtgacccagatcgtgtctgccgaagcctggggcagagccgattgcggctttaccagcgagagctaccagcagggcgtgctgagcgccaccatcctgtacgagatcctgctgggcaaggccaccctgtacgccgtgctggtgtctgccctggtgctgatggctatggtcaagcggaaggacagccggggaagggccaagcgatctggatctggagcaacaaacttctcactactcaaacaagcaggtgacgtggaggagaatcccgggcctactagtatggactggatttggcgcatccttttccttgtcggcgctgctaccggcgcgcattccgggccccagctccagctgcaagagtctggacctggcctggtcaagcctagcgagacactgagcctgacctgtaccgtgtccggcgatagcatcagcagcggcgattactactggggctggatcagacagcctcctggcaaaggactggaatggatcggccacatctactacagcggcgtgacctactacaaccccagcctgaagtccagagtgaccatcagcgtggacaccagccggaaccagttctccctgaagctgtctagcgtgacagccgccgataccgccgtgtactactgcaccagagaggacagcagcaactggcggagtagaggccagggaacactggtcacagttagctctggatccggcggaggcggaagtggaggcggaggatctggcggcggaggctctttcgaacaggtgcaactggtggaatctggcgggggagtggtgcagcctggcagaagcctgagactgtcttgtgccgccagcggcttcaccttcagcagctacgacatgcactgggtgcgccaggcccctggcaaaggactggaatgggtggccgtgatctcctacgacggcaccaacgagtattacgccgacagcgtgaagggccggttcaccatctccagagacaccagcaagaacaccctgtacctccagatgaacagcctgcgggccgaggacacagccgtgtattattgcgccagagagcggtacttcgactggtccttcgactactggggccagggaaccctggtgtccgtgtctagtacgcgtatccagaaccctgatcctgccgtgtaccagctgcgggatagcaagagcagcgacaagagcgtgtgtctgttcaccgacttcgacagccagaccaacgtgtcccagagcaaggactccgacgtgtacatcaccgataagtgcgtgctggacatgcggagcatggacttcaagagcaactccgccgtggcctggtccaacaagtccgatttcgcctgcgccaacgccttcaacaacagcattatccccgaggacacattcttcccaagccccgagagcagctgcgacgtgaagctggtggaaaagagcttcgagacagacaccaacctgaacttccagaacctgagcgtgatcggcttcagaatcctgctgctgaaagtggccggctttaacctgctgatgaccctgcggctgtggtccagc

SEQ ID NO: 2445 - DNA, 2673 bp, Artificial Sequence
  Synthetic Polynucloetide
atggccttaccagtgaccgccttgctcctgccgctggccttgctgctccacgccgccaggccggaagtgcagctggttgaatctggcggaggactggttcagcctggcggatctctgagactgtcttgtgccgccagcggcttcagcttcagcgacttttggatgagctgggtccgacaggcccctggcaaaggacttgaatgggtcgccacaatcagccaggccggcagcgagaaggactacgtggactctgtgaagggcagattcaccatcagccgggacaacgccaagaagtccctgtacctccagatgaacagcctgagagccgaggacaccgccgtgtactattgtgcctctggcgtgtacagcttcgactacagaggccagggcaccctggtcacagtctcttctggtaccggcggaggcggatctggcggcggaggtagcggtggcggaggatctgaattcgagctgacacaggaccctgctgtgtctgttgccctgggccagacagtgcggattacctgtcaaggcgacagcctgagaagcaactacgccaactggtatcagcagaagcccggacaggctcccgtgctggttatctacggccagaacaacagacccagcggcatccccgatagattcagcggctctagctctggcaataccgccagcctgacaatcactggcgctcaggctgccgatgaggccgactactactgcgatagcagagtgtccaccggcaatcacgtggtgtttggcggcggaacaaagctgacagtgctcggacaactcgaggacctgaagaacgtgttcccacctgaggtggccgtgttcgagcctagcgaggccgagatcagccacacccagaaagccaccctcgtgtgcctggctaccggcttctaccccgaccatgtggaactgtcttggtgggtcaacggcaaagaggtgcacagcggcgtgtgtaccgacccccagccactgaaagaacagcccgccctgaacgacagccggtactgcctgagcagcagactgagagtgtccgccaccttctggcagaacccccggaaccacttcagatgccaggtgcagttctacggcctgagcgagaacgacgagtggacccaggacagagccaagcccgtgacccagatcgtgtctgccgaagcctggggcagagccgattgcggctttaccagcgagagctaccagcagggcgtgctgagcgccaccatcctgtacgagatcctgctgggcaaggccaccctgtacgccgtgctggtgtctgccctggtgctgatggctatggtcaagcggaaggacagccggggaagggccaagcgatctggatctggagcaacaaacttctcactactcaaacaagcaggtgacgtggaggagaatcccgggcctactagtatggactggatttggcgcatccttttccttgtcggcgctgctaccggcgcgcattccgggccccagctccagctgcaagagtctggacctggcctggtcaagcctagcgagacactgagcctgacctgtaccgtgtccggcgatagcatcagcagcggcgattactactggggctggatcagacagcctcctggcaaaggactggaatggatcggccacatctactacagcggcgtgacctactacaaccccagcctgaagtccagagtgaccatcagcgtggacaccagccggaaccagttctccctgaagctgtctagcgtgacagccgccgataccgccgtgtactactgcaccagagaggacagcagcaactggcggagtagaggccagggaacactggtcacagttagctctggatccggcggaggcggaagtggaggcggaggatctggcggcggaggctctttcgaagaagttcagctggtgcagagcggagccgaagtgaagaaacctggggcctctgtgaaggtgtcctgcaaggcttccggctacacctttaccagctacgccatgcactgggtccgacaggcacctggacaacggcttgaatggatgggctggatcaacgccggcaacggcaacaccaagtacagccagaaattccagggccgcgtgaccatcaccagagatacaagcgccagcaccgcctacatggaactgtctagcctgagatccgaggacaccgccgtgtactactgtgccagagacatcagctacggcagcttcgactattggggccagggcacactggtcaccgttagctctacgcgtatccagaaccctgatcctgccgtgtaccagctgcgggatagcaagagcagcgacaagagcgtgtgtctgttcaccgacttcgacagccagaccaacgtgtcccagagcaaggactccgacgtgtacatcaccgataagtgcgtgctggacatgcggagcatggacttcaagagcaactccgccgtggcctggtccaacaagtccgatttcgcctgcgccaacgccttcaacaacagcattatccccgaggacacattcttcccaagccccgagagcagctgcgacgtgaagctggtggaaaagagcttcgagacagacaccaacctgaacttccagaacctgagcgtgatcggcttcagaatcctgctgctgaaagtggccggctttaacctgctgatgaccctgcggctgtggtccagc

SEQ ID NO: 2446 - DNA, 2679 bp, Artificial Sequence
  Synthetic Polynucloetide
atggccttaccagtgaccgccttgctcctgccgctggccttgctgctccacgccgccaggccggaagtgcagctggttgaatctggcggaggactggttcagcctggcggatctctgagactgtcttgtgccgccagcggcttcagcttcagcgacttttggatgagctgggtccgacaggcccctggcaaaggacttgaatgggtcgccacaatcagccaggccggcagcgagaaggactacgtggactctgtgaagggcagattcaccatcagccgggacaacgccaagaagtccctgtacctccagatgaacagcctgagagccgaggacaccgccgtgtactattgtgcctctggcgtgtacagcttcgactacagaggccagggcaccctggtcacagtctcttctggtaccggcggaggcggatctggcggcggaggtagcggtggcggaggatctgaattcgacatcgtgctgacacagacaccagccacactgagcgtgacacctggcgattctgtgtccctgagctgtagagccagccagagcatcagcaacaacctgcactggtatcagcagaagtcccacgagagccccagactgctgattaagaacgccagccagtctatcagcggcatccccagcaagtttagcggctctggcagcggcaccgacttcaccctgagaatcaacagcgtggaaaccgaggacttcgggatgtacttctgccagcagagcaatagctggccctacacatttggctccggcaccaagctggaaatcaaactcgaggacctgaagaacgtgttcccacctgaggtggccgtgttcgagcctagcgaggccgagatcagccacacccagaaagccaccctcgtgtgcctggctaccggcttctaccccgaccatgtggaactgtcttggtgggtcaacggcaaagaggtgcacagcggcgtgtgtaccgacccccagccactgaaagaacagcccgccctgaacgacagccggtactgcctgagcagcagactgagagtgtccgccaccttctggcagaacccccggaaccacttcagatgccaggtgcagttctacggcctgagcgagaacgacgagtggacccaggacagagccaagcccgtgacccagatcgtgtctgccgaagcctggggcagagccgattgcggctttaccagcgagagctaccagcagggcgtgctgagcgccaccatcctgtacgagatcctgctgggcaaggccaccctgtacgccgtgctggtgtctgccctggtgctgatggctatggtcaagcggaaggacagccggggaagggccaagcgatctggatctggagcaacaaacttctcactactcaaacaagcaggtgacgtggaggagaatcccgggcctactagtatggactggatttggcgcatccttttccttgtcggcgctgctaccggcgcgcattccgggccccagctccagctgcaagagtctggacctggcctggtcaagcctagcgagacactgagcctgacctgtaccgtgtccggcgatagcatcagcagcggcgattactactggggctggatcagacagcctcctggcaaaggactggaatggatcggccacatctactacagcggcgtgacctactacaaccccagcctgaagtccagagtgaccatcagcgtggacaccagccggaaccagttctccctgaagctgtctagcgtgacagccgccgataccgccgtgtactactgcaccagagaggacagcagcaactggcggagtagaggccagggaacactggtcacagttagctctggatccggcggaggcggaagtggaggcggaggatctggcggcggaggctctttcgaacaagtgaagctgcaacagagcggacccgagctggttaagccaggcgcttccgtgaagattagctgcaaggccagcggctacagcttcaccggctactacatgcactgggtcaagcagagccacggcaacatcctggactggatcggctacatctacccctacaacggcgtgtccagctacaaccagaagttcaagggcaaagccactctgaccgtggacaagagcagcagcaccgcctacatggaactgagaagcctgaccagcgaggacagcgccgtgtactattgtgccagagagcggggcctgtaccagctcagagcaatggattattggggccagggcaccagcgtgaccgtttcttctacgcgtatccagaaccctgatcctgccgtgtaccagctgcgggatagcaagagcagcgacaagagcgtgtgtctgttcaccgacttcgacagccagaccaacgtgtcccagagcaaggactccgacgtgtacatcaccgataagtgcgtgctggacatgcggagcatggacttcaagagcaactccgccgtggcctggtccaacaagtccgatttcgcctgcgccaacgccttcaacaacagcattatccccgaggacacattcttcccaagccccgagagcagctgcgacgtgaagctggtggaaaagagcttcgagacagacaccaacctgaacttccagaacctgagcgtgatcggcttcagaatcctgctgctgaaagtggccggctttaacctgctgatgaccctgcggctgtggtccagc

SEQ ID NO: 2447 - DNA, 2652 bp, Artificial Sequence
  Synthetic Polynucloetide
atggccttaccagtgaccgccttgctcctgccgctggccttgctgctccacgccgccaggccggaagtgcagctggttgaatctggcggaggactggttcagcctggcggatctctgagactgtcttgtgccgccagcggcttcagcttcagcgacttttggatgagctgggtccgacaggcccctggcaaaggacttgaatgggtcgccacaatcagccaggccggcagcgagaaggactacgtggactctgtgaagggcagattcaccatcagccgggacaacgccaagaagtccctgtacctccagatgaacagcctgagagccgaggacaccgccgtgtactattgtgcctctggcgtgtacagcttcgactacagaggccagggcaccctggtcacagtctcttctggtaccggcggaggcggatctggcggcggaggtagcggtggcggaggatctgaattcgacatcgtgatgacacagacccctgccatcatgagcgcctctccaggccagaaagtgaccatcacatgtagcgccagcagcagcgtgaactacatgcactggtatcagcagaagctgggcagcagccccaagctgtggatctacgataccagcaaactggcccctggcgtgccagccagattttctggttctggcagcggcaccagctacagcctgacaatcagcagcatggaagccgaggatgccgccagctacttctgccatcagtggtctagctacccctacacctttggctccggcaccaagctggaaatcaaactcgaggacctgaagaacgtgttcccacctgaggtggccgtgttcgagcctagcgaggccgagatcagccacacccagaaagccaccctcgtgtgcctggctaccggcttctaccccgaccatgtggaactgtcttggtgggtcaacggcaaagaggtgcacagcggcgtgtgtaccgacccccagccactgaaagaacagcccgccctgaacgacagccggtactgcctgagcagcagactgagagtgtccgccaccttctggcagaacccccggaaccacttcagatgccaggtgcagttctacggcctgagcgagaacgacgagtggacccaggacagagccaagcccgtgacccagatcgtgtctgccgaagcctggggcagagccgattgcggctttaccagcgagagctaccagcagggcgtgctgagcgccaccatcctgtacgagatcctgctgggcaaggccaccctgtacgccgtgctggtgtctgccctggtgctgatggctatggtcaagcggaaggacagccggggaagggccaagcgatctggatctggagcaacaaacttctcactactcaaacaagcaggtgacgtggaggagaatcccgggcctactagtatggactggatttggcgcatccttttccttgtcggcgctgctaccggcgcgcattccgggccccagctccagctgcaagagtctggacctggcctggtcaagcctagcgagacactgagcctgacctgtaccgtgtccggcgatagcatcagcagcggcgattactactggggctggatcagacagcctcctggcaaaggactggaatggatcggccacatctactacagcggcgtgacctactacaaccccagcctgaagtccagagtgaccatcagcgtggacaccagccggaaccagttctccctgaagctgtctagcgtgacagccgccgataccgccgtgtactactgcaccagagaggacagcagcaactggcggagtagaggccagggaacactggtcacagttagctctggatccggcggaggcggaagtggaggcggaggatctggcggcggaggctctttcgaagaagttcagctccaagagtctggccccgacctggtcaagcctagccaaagcctgagcctgacctgtaccgtgaccggctacagcatcacaagcggctatggatggcactggatcagacagttccccggcaacaaactggaatggatgggctacatccactacagcggcagcaccacctacaatcccagcctgaagtcccggatcagcatcagcagagacaccagcaagaaccagttcttcctgcaactgaacagcgtgaccaccgaggacaccgccacctactattgtgctcggagcctgagatattggggccagggcacaaccctgaccgtgtcatctacgcgtatccagaaccctgatcctgccgtgtaccagctgcgggatagcaagagcagcgacaagagcgtgtgtctgttcaccgacttcgacagccagaccaacgtgtcccagagcaaggactccgacgtgtacatcaccgataagtgcgtgctggacatgcggagcatggacttcaagagcaactccgccgtggcctggtccaacaagtccgatttcgcctgcgccaacgccttcaacaacagcattatccccgaggacacattcttcccaagccccgagagcagctgcgacgtgaagctggtggaaaagagcttcgagacagacaccaacctgaacttccagaacctgagcgtgatcggcttcagaatcctgctgctgaaagtggccggctttaacctgctgatgaccctgcggctgtggtccagc

SEQ ID NO: 2448 - DNA, 2661 bp, Artificial Sequence
  Synthetic Polynucloetide
atggccttaccagtgaccgccttgctcctgccgctggccttgctgctccacgccgccaggccggaagtgcagctggttgaatctggcggaggactggttcagcctggcggatctctgagactgtcttgtgccgccagcggcttcagcttcagcgacttttggatgagctgggtccgacaggcccctggcaaaggacttgaatgggtcgccacaatcagccaggccggcagcgagaaggactacgtggactctgtgaagggcagattcaccatcagccgggacaacgccaagaagtccctgtacctccagatgaacagcctgagagccgaggacaccgccgtgtactattgtgcctctggcgtgtacagcttcgactacagaggccagggcaccctggtcacagtctcttctggtaccggcggaggcggatctggcggcggaggtagcggtggcggaggatctgaattcgacatccagatgacacagagccctagcagcctgtctgccagcgtgggagacagagtgaccatcacctgtagcgccaccagcagcatcagctacatgcactggtatcagcagaagcccggcaaggcccctaaaggctggatctacgataccagcaaactggcccacggcgtgcccagcagattttctggttctggcagcggcaccgacttcaccctgacaatatctagcctccagcctgaggacttcgccacctactactgccaccagagaagaagctaccccttcaccttcggccagggcaccaaggtggaaatcaaactcgaggacctgaagaacgtgttcccacctgaggtggccgtgttcgagcctagcgaggccgagatcagccacacccagaaagccaccctcgtgtgcctggctaccggcttctaccccgaccatgtggaactgtcttggtgggtcaacggcaaagaggtgcacagcggcgtgtgtaccgacccccagccactgaaagaacagcccgccctgaacgacagccggtactgcctgagcagcagactgagagtgtccgccaccttctggcagaacccccggaaccacttcagatgccaggtgcagttctacggcctgagcgagaacgacgagtggacccaggacagagccaagcccgtgacccagatcgtgtctgccgaagcctggggcagagccgattgcggctttaccagcgagagctaccagcagggcgtgctgagcgccaccatcctgtacgagatcctgctgggcaaggccaccctgtacgccgtgctggtgtctgccctggtgctgatggctatggtcaagcggaaggacagccggggaagggccaagcgatctggatctggagcaacaaacttctcactactcaaacaagcaggtgacgtggaggagaatcccgggcctactagtatggactggatttggcgcatccttttccttgtcggcgctgctaccggcgcgcattccgggccccagctccagctgcaagagtctggacctggcctggtcaagcctagcgagacactgagcctgacctgtaccgtgtccggcgatagcatcagcagcggcgattactactggggctggatcagacagcctcctggcaaaggactggaatggatcggccacatctactacagcggcgtgacctactacaaccccagcctgaagtccagagtgaccatcagcgtggacaccagccggaaccagttctccctgaagctgtctagcgtgacagccgccgataccgccgtgtactactgcaccagagaggacagcagcaactggcggagtagaggccagggaacactggtcacagttagctctggatccggcggaggcggaagtggaggcggaggatctggcggcggaggctctttcgaagaagtgcaactggttcagagcggagccgaagtgaagaaacctggggcctctgtgaaggtgtcctgcaaggcttccggctacacctttaccaatttctggattcactgggtccgacaggctccaggccaaggactggaatggatcggagagatcgaccccagcgacagctacaccaactacaaccagaaattcaaaggccgggtcaccatcaccagagacaccagcacaagcaccgcctacctggaactgagcagcctgagaagcgaggacaccgccgtgtactactgcgccagggaaatcaccaccgtggattattggggccagggaaccctggtcaccgtgtcatctacgcgtatccagaaccctgatcctgccgtgtaccagctgcgggatagcaagagcagcgacaagagcgtgtgtctgttcaccgacttcgacagccagaccaacgtgtcccagagcaaggactccgacgtgtacatcaccgataagtgcgtgctggacatgcggagcatggacttcaagagcaactccgccgtggcctggtccaacaagtccgatttcgcctgcgccaacgccttcaacaacagcattatccccgaggacacattcttcccaagccccgagagcagctgcgacgtgaagctggtggaaaagagcttcgagacagacaccaacctgaacttccagaacctgagcgtgatcggcttcagaatcctgctgctgaaagtggccggctttaacctgctgatgaccctgcggctgtggtccagc

SEQ ID NO: 2449 - DNA, 2682 bp, Artificial Sequence
  Synthetic Polynucloetide
atggccttaccagtgaccgccttgctcctgccgctggccttgctgctccacgccgccaggccggaagtgcagctggttgaatctggcggaggactggttcagcctggcggatctctgagactgtcttgtgccgccagcggcttcagcttcagcgacttttggatgagctgggtccgacaggcccctggcaaaggacttgaatgggtcgccacaatcagccaggccggcagcgagaaggactacgtggactctgtgaagggcagattcaccatcagccgggacaacgccaagaagtccctgtacctccagatgaacagcctgagagccgaggacaccgccgtgtactattgtgcctctggcgtgtacagcttcgactacagaggccagggcaccctggtcacagtctcttctggtaccggcggaggcggatctggcggcggaggtagcggtggcggaggatctgaattcgacatccagatgacacagagccctagcagcctgtctgccagcgtgggagacagagtgaccatcacatgcaaggccagccagggcttcaacaaatacgtggcctggtatcagcagaagcccggcaaggctcctaagctgctgatctactacaccagcacactccagcctggcgtgcccagcagattttctggctctggcagcggcagagactacaccctgacaatatccagcctccagccagaggacttcgccacctactactgtctccagtacggcaacctgctgtacgcctttggacagggcaccaaggtggaaatcaagagactcgaggacctgaagaacgtgttcccacctgaggtggccgtgttcgagcctagcgaggccgagatcagccacacccagaaagccaccctcgtgtgcctggctaccggcttctaccccgaccatgtggaactgtcttggtgggtcaacggcaaagaggtgcacagcggcgtgtgtaccgacccccagccactgaaagaacagcccgccctgaacgacagccggtactgcctgagcagcagactgagagtgtccgccaccttctggcagaacccccggaaccacttcagatgccaggtgcagttctacggcctgagcgagaacgacgagtggacccaggacagagccaagcccgtgacccagatcgtgtctgccgaagcctggggcagagccgattgcggctttaccagcgagagctaccagcagggcgtgctgagcgccaccatcctgtacgagatcctgctgggcaaggccaccctgtacgccgtgctggtgtctgccctggtgctgatggctatggtcaagcggaaggacagccggggaagggccaagcgatctggatctggagcaacaaacttctcactactcaaacaagcaggtgacgtggaggagaatcccgggcctactagtatggactggatttggcgcatccttttccttgtcggcgctgctaccggcgcgcattccgggccccagctccagctgcaagagtctggacctggcctggtcaagcctagcgagacactgagcctgacctgtaccgtgtccggcgatagcatcagcagcggcgattactactggggctggatcagacagcctcctggcaaaggactggaatggatcggccacatctactacagcggcgtgacctactacaaccccagcctgaagtccagagtgaccatcagcgtggacaccagccggaaccagttctccctgaagctgtctagcgtgacagccgccgataccgccgtgtactactgcaccagagaggacagcagcaactggcggagtagaggccagggaacactggtcacagttagctctggatccggcggaggcggaagtggaggcggaggatctggcggcggaggctctttcgaagaagttcagcttgtgcagagcggagccgaagtgaagaaacctggggcctctgtgaaggtgtcctgcaaagccagcggctacacctttaccagctactggatcggctgggtccgacaggctcctggacaaggactggaatggatcggcgacatctatcccggcggaggctacaccaactacaacgagaagttcaagggccgcgtgacaatcaccagagacacctctacaagcaccgcctacctggaactgagcagcctgagaagcgaggacaccgccgtgtactactgcgccagactggatggcagcagctacagaggcgctatggattcttggggccagggcacactggtcaccgtttcttctacgcgtatccagaaccctgatcctgccgtgtaccagctgcgggatagcaagagcagcgacaagagcgtgtgtctgttcaccgacttcgacagccagaccaacgtgtcccagagcaaggactccgacgtgtacatcaccgataagtgcgtgctggacatgcggagcatggacttcaagagcaactccgccgtggcctggtccaacaagtccgatttcgcctgcgccaacgccttcaacaacagcattatccccgaggacacattcttcccaagccccgagagcagctgcgacgtgaagctggtggaaaagagcttcgagacagacaccaacctgaacttccagaacctgagcgtgatcggcttcagaatcctgctgctgaaagtggccggctttaacctgctgatgaccctgcggctgtggtccagc

SEQ ID NO: 2450 - DNA, 2670 bp, Artificial Sequence
  Synthetic Polynucloetide
atggccttaccagtgaccgccttgctcctgccgctggccttgctgctccacgccgccaggccggaagtgcagctggttgaatctggcggaggactggttcagcctggcggatctctgagactgtcttgtgccgccagcggcttcagcttcagcgacttttggatgagctgggtccgacaggcccctggcaaaggacttgaatgggtcgccacaatcagccaggccggcagcgagaaggactacgtggactctgtgaagggcagattcaccatcagccgggacaacgccaagaagtccctgtacctccagatgaacagcctgagagccgaggacaccgccgtgtactattgtgcctctggcgtgtacagcttcgactacagaggccagggcaccctggtcacagtctcttctggtaccggcggaggcggatctggcggcggaggtagcggtggcggaggatctgaattcgacatccagatgacacagagccctagcagcctgtctgccagcgtgggagacagagtgaccatcacctgtagagccagccaggacatccggtactacctgaactggtatcagcagaagcccggcaaggcccctaagctgctgatctatgtggcctccagcctccagagcggagtgccttctagattttctggcagcggctccggcaccgagtttaccctgacagtgtctagcttgcagcccgaggacttcgccacctactactgcctgcaagtgtacagcacccctcggacctttggacagggcaccaaggtggaaatcaaactcgaggacctgaagaacgtgttcccacctgaggtggccgtgttcgagcctagcgaggccgagatcagccacacccagaaagccaccctcgtgtgcctggctaccggcttctaccccgaccatgtggaactgtcttggtgggtcaacggcaaagaggtgcacagcggcgtgtgtaccgacccccagccactgaaagaacagcccgccctgaacgacagccggtactgcctgagcagcagactgagagtgtccgccaccttctggcagaacccccggaaccacttcagatgccaggtgcagttctacggcctgagcgagaacgacgagtggacccaggacagagccaagcccgtgacccagatcgtgtctgccgaagcctggggcagagccgattgcggctttaccagcgagagctaccagcagggcgtgctgagcgccaccatcctgtacgagatcctgctgggcaaggccaccctgtacgccgtgctggtgtctgccctggtgctgatggctatggtcaagcggaaggacagccggggaagggccaagcgatctggatctggagcaacaaacttctcactactcaaacaagcaggtgacgtggaggagaatcccgggcctactagtatggactggatttggcgcatccttttccttgtcggcgctgctaccggcgcgcattccgggccccagctccagctgcaagagtctggacctggcctggtcaagcctagcgagacactgagcctgacctgtaccgtgtccggcgatagcatcagcagcggcgattactactggggctggatcagacagcctcctggcaaaggactggaatggatcggccacatctactacagcggcgtgacctactacaaccccagcctgaagtccagagtgaccatcagcgtggacaccagccggaaccagttctccctgaagctgtctagcgtgacagccgccgataccgccgtgtactactgcaccagagaggacagcagcaactggcggagtagaggccagggaacactggtcacagttagctctggatccggcggaggcggaagtggaggcggaggatctggcggcggaggctctttcgaagaagtgcagcttgttgaatctggcggcggactggctaagcctggcggatctctgagactgtcttgtgccgccagcggcttccggttcaccttcaacaactactacatggactgggtccgacaggcccctggacaaggacttgaatgggtgtccagaatcagcagcagcggcgaccctacttggtacgccgattctgtgaagggcagattcaccatcagcagagagaacgccaagaacaccctgttcctccagatgaactccctgagagccgaggacaccgccgtgtactattgtgcctctctgaccaccggcagcgattcttggggacagggcgtgctggttaccgtgtcatctacgcgtatccagaaccctgatcctgccgtgtaccagctgcgggatagcaagagcagcgacaagagcgtgtgtctgttcaccgacttcgacagccagaccaacgtgtcccagagcaaggactccgacgtgtacatcaccgataagtgcgtgctggacatgcggagcatggacttcaagagcaactccgccgtggcctggtccaacaagtccgatttcgcctgcgccaacgccttcaacaacagcattatccccgaggacacattcttcccaagccccgagagcagctgcgacgtgaagctggtggaaaagagcttcgagacagacaccaacctgaacttccagaacctgagcgtgatcggcttcagaatcctgctgctgaaagtggccggctttaacctgctgatgaccctgcggctgtggtccagc

SEQ ID NO: 2451 - DNA, 2673 bp, Artificial Sequence
  Synthetic Polynucloetide
atggccttaccagtgaccgccttgctcctgccgctggccttgctgctccacgccgccaggccggaagtgcagctggttgaatctggcggaggactggttcagcctggcggatctctgagactgtcttgtgccgccagcggcttcagcttcagcgacttttggatgagctgggtccgacaggcccctggcaaaggacttgaatgggtcgccacaatcagccaggccggcagcgagaaggactacgtggactctgtgaagggcagattcaccatcagccgggacaacgccaagaagtccctgtacctccagatgaacagcctgagagccgaggacaccgccgtgtactattgtgcctctggcgtgtacagcttcgactacagaggccagggcaccctggtcacagtctcttctggtaccggcggaggcggatctggcggcggaggtagcggtggcggaggatctgaattcgagatcgtgatgacacagagccccgccacactgagtgtgtctccaggcgaaagagccacactgtcctgtagagccagccagagcgtgtccagaaacctggcctggtatcagcagaagcctggacaggctccccggctgttgatctacggcgcttctacaagagccaccggcattcccgccagattttctggctctggcagcggcaccgagttcaccctgacaatcggaagcctccagagcgaggacttcgccgtgtactactgccagcagtacaagacctggcctcggacctttggacagggcaccaacgtggaaatcaaactcgaggacctgaagaacgtgttcccacctgaggtggccgtgttcgagcctagcgaggccgagatcagccacacccagaaagccaccctcgtgtgcctggctaccggcttctaccccgaccatgtggaactgtcttggtgggtcaacggcaaagaggtgcacagcggcgtgtgtaccgacccccagccactgaaagaacagcccgccctgaacgacagccggtactgcctgagcagcagactgagagtgtccgccaccttctggcagaacccccggaaccacttcagatgccaggtgcagttctacggcctgagcgagaacgacgagtggacccaggacagagccaagcccgtgacccagatcgtgtctgccgaagcctggggcagagccgattgcggctttaccagcgagagctaccagcagggcgtgctgagcgccaccatcctgtacgagatcctgctgggcaaggccaccctgtacgccgtgctggtgtctgccctggtgctgatggctatggtcaagcggaaggacagccggggaagggccaagcgatctggatctggagcaacaaacttctcactactcaaacaagcaggtgacgtggaggagaatcccgggcctactagtatggactggatttggcgcatccttttccttgtcggcgctgctaccggcgcgcattccgggccccagctccagctgcaagagtctggacctggcctggtcaagcctagcgagacactgagcctgacctgtaccgtgtccggcgatagcatcagcagcggcgattactactggggctggatcagacagcctcctggcaaaggactggaatggatcggccacatctactacagcggcgtgacctactacaaccccagcctgaagtccagagtgaccatcagcgtggacaccagccggaaccagttctccctgaagctgtctagcgtgacagccgccgataccgccgtgtactactgcaccagagaggacagcagcaactggcggagtagaggccagggaacactggtcacagttagctctggatccggcggaggcggaagtggaggcggaggatctggcggcggaggctctttcgaacaagttcagctgcaacaatggggagccggcctgctgaagcctagcgaaacactgtctctgacctgcgccgtgttcggcggctctttcagcggctactactggtcctggatcagacagcctcctggcaaaggactggaatggatcggcgagatcaaccaccggggcaacaccaacgacaaccccagcctgaaaagcagagtgaccatcagcgtggacaccagcaagaaccagttcgccctgaagctgagcagcgtgacagccgctgataccgccgtgtattattgcgccagagagcggggctacacctacggcaatttcgatcactggggccagggcaccctggtcacagtttcttctacgcgtatccagaaccctgatcctgccgtgtaccagctgcgggatagcaagagcagcgacaagagcgtgtgtctgttcaccgacttcgacagccagaccaacgtgtcccagagcaaggactccgacgtgtacatcaccgataagtgcgtgctggacatgcggagcatggacttcaagagcaactccgccgtggcctggtccaacaagtccgatttcgcctgcgccaacgccttcaacaacagcattatccccgaggacacattcttcccaagccccgagagcagctgcgacgtgaagctggtggaaaagagcttcgagacagacaccaacctgaacttccagaacctgagcgtgatcggcttcagaatcctgctgctgaaagtggccggctttaacctgctgatgaccctgcggctgtggtccagc

SEQ ID NO: 2452 - DNA, 2676 bp, Artificial Sequence
  Synthetic Polynucloetide
atggccttaccagtgaccgccttgctcctgccgctggccttgctgctccacgccgccaggccggaagtgcagctggttgaatctggcggaggactggttcagcctggcggatctctgagactgtcttgtgccgccagcggcttcagcttcagcgacttttggatgagctgggtccgacaggcccctggcaaaggacttgaatgggtcgccacaatcagccaggccggcagcgagaaggactacgtggactctgtgaagggcagattcaccatcagccgggacaacgccaagaagtccctgtacctccagatgaacagcctgagagccgaggacaccgccgtgtactattgtgcctctggcgtgtacagcttcgactacagaggccagggcaccctggtcacagtctcttctggtaccggcggaggcggatctggcggcggaggtagcggtggcggaggatctgaattcgagatcgtgatgacccctagcagcgccacactgagtgtgtctccaggcgaaagagccacactgtcctgtagagccagccagagcgtgtccagaaacctggcctggtatcagcagaagcctggacaggctccccggctgttgatctacggcgcttctacaagagccaccggcattcccgccagattttctggctctggcagcggcaccgagttcaccctgacaatctctagcctccagagcgaggacttcgccgtgtactactgccaccagtacagcaactggatgtgcagcttcggccagggcaccaagctggaaatcaaactcgaggacctgaagaacgtgttcccacctgaggtggccgtgttcgagcctagcgaggccgagatcagccacacccagaaagccaccctcgtgtgcctggctaccggcttctaccccgaccatgtggaactgtcttggtgggtcaacggcaaagaggtgcacagcggcgtgtgtaccgacccccagccactgaaagaacagcccgccctgaacgacagccggtactgcctgagcagcagactgagagtgtccgccaccttctggcagaacccccggaaccacttcagatgccaggtgcagttctacggcctgagcgagaacgacgagtggacccaggacagagccaagcccgtgacccagatcgtgtctgccgaagcctggggcagagccgattgcggctttaccagcgagagctaccagcagggcgtgctgagcgccaccatcctgtacgagatcctgctgggcaaggccaccctgtacgccgtgctggtgtctgccctggtgctgatggctatggtcaagcggaaggacagccggggaagggccaagcgatctggatctggagcaacaaacttctcactactcaaacaagcaggtgacgtggaggagaatcccgggcctactagtatggactggatttggcgcatccttttccttgtcggcgctgctaccggcgcgcattccgggccccagctccagctgcaagagtctggacctggcctggtcaagcctagcgagacactgagcctgacctgtaccgtgtccggcgatagcatcagcagcggcgattactactggggctggatcagacagcctcctggcaaaggactggaatggatcggccacatctactacagcggcgtgacctactacaaccccagcctgaagtccagagtgaccatcagcgtggacaccagccggaaccagttctccctgaagctgtctagcgtgacagccgccgataccgccgtgtactactgcaccagagaggacagcagcaactggcggagtagaggccagggaacactggtcacagttagctctggatccggcggaggcggaagtggaggcggaggatctggcggcggaggctctttcgaagaagttcagctccttgagtcaggtggcggcctggttcaacctggcggatctctgagactgagctgtgccgccagcggcttcacctttagcagatacgccatgaactgggtccgacaggcccctggcaaaggactggaatgggtgtccggcatctctggaagcggcggcagaacctactacgccgattctgtgaagggcagattcaccatcagccgggacaacagcaagaacaccctgtacctccagatgaacagcctgagagccgaggacacagccgtgtattattgcgccaaggaccgggacttttggagcggcccttttgactattggggccagggaaccctggtcaccgttagctctacgcgtatccagaaccctgatcctgccgtgtaccagctgcgggatagcaagagcagcgacaagagcgtgtgtctgttcaccgacttcgacagccagaccaacgtgtcccagagcaaggactccgacgtgtacatcaccgataagtgcgtgctggacatgcggagcatggacttcaagagcaactccgccgtggcctggtccaacaagtccgatttcgcctgcgccaacgccttcaacaacagcattatccccgaggacacattcttcccaagccccgagagcagctgcgacgtgaagctggtggaaaagagcttcgagacagacaccaacctgaacttccagaacctgagcgtgatcggcttcagaatcctgctgctgaaagtggccggctttaacctgctgatgaccctgcggctgtggtccagc

SEQ ID NO: 2453 - DNA, 2691 bp, Artificial Sequence
  Synthetic Polynucloetide
atggccttaccagtgaccgccttgctcctgccgctggccttgctgctccacgccgccaggccggaagtgcagctggttgaatctggcggaggactggttcagcctggcggatctctgagactgtcttgtgccgccagcggcttcagcttcagcgacttttggatgagctgggtccgacaggcccctggcaaaggacttgaatgggtcgccacaatcagccaggccggcagcgagaaggactacgtggactctgtgaagggcagattcaccatcagccgggacaacgccaagaagtccctgtacctccagatgaacagcctgagagccgaggacaccgccgtgtactattgtgcctctggcgtgtacagcttcgactacagaggccagggcaccctggtcacagtctcttctggtaccggcggaggcggatctggcggcggaggtagcggtggcggaggatctgaattcgacatccagatgacccagagccccagcagcctgtctgccagcgtgggcgacagagtgaccatcacatgcaaggccagcaagaacatcagaagctacctggcctggtatcagcagaagcccggcaaggcccccaagctgctgatctacagcggcagcacactgcacagcggcgtgcccagcagattttccggctctggcagcggcaccgacttcaccctgaccatctctagcctccagcccgaggacttcgccacctactactgccagcagcaccacgagtaccccctgacattcggccagggcaccaaggtggaaatcaagagactcgaggacctgaagaacgtgttcccacctgaggtggccgtgttcgagcctagcgaggccgagatcagccacacccagaaagccaccctcgtgtgcctggctaccggcttctaccccgaccatgtggaactgtcttggtgggtcaacggcaaagaggtgcacagcggcgtgtgtaccgacccccagccactgaaagaacagcccgccctgaacgacagccggtactgcctgagcagcagactgagagtgtccgccaccttctggcagaacccccggaaccacttcagatgccaggtgcagttctacggcctgagcgagaacgacgagtggacccaggacagagccaagcccgtgacccagatcgtgtctgccgaagcctggggcagagccgattgcggctttaccagcgagagctaccagcagggcgtgctgagcgccaccatcctgtacgagatcctgctgggcaaggccaccctgtacgccgtgctggtgtctgccctggtgctgatggctatggtcaagcggaaggacagccggggaagggccaagcgatctggatctggagcaacaaacttctcactactcaaacaagcaggtgacgtggaggagaatcccgggcctactagtatggactggatttggcgcatccttttccttgtcggcgctgctaccggcgcgcattccgggccccagctccagctgcaagagtctggacctggcctggtcaagcctagcgagacactgagcctgacctgtaccgtgtccggcgatagcatcagcagcggcgattactactggggctggatcagacagcctcctggcaaaggactggaatggatcggccacatctactacagcggcgtgacctactacaaccccagcctgaagtccagagtgaccatcagcgtggacaccagccggaaccagttctccctgaagctgtctagcgtgacagccgccgataccgccgtgtactactgcaccagagaggacagcagcaactggcggagtagaggccagggaacactggtcacagttagctctggatccggcggaggcggaagtggaggcggaggatctggcggcggaggctctttcgaacaggtgcaactccaggaatctggccccggactcgtgaagcccagcgagacactgagcctgacctgtaccgtgtccggctacaccatcaccagcggctacgactggtcctggatcagacagcctcctggcaagggcctggaatggatcggctacatcaactacggcggctccaccaactacaagcccagcctgggaagccgcgtgacaatcagcgtggacacctccaagaaccagttcagcctgaagctgagcagcgtgacagccgccgataccgccgtgtactactgcgcccggtacaacgagtacaagagctacatctacgattggtacttcgacttctggggccagggaaccctcgtgaccgtgtctagtacgcgtatccagaaccctgatcctgccgtgtaccagctgcgggatagcaagagcagcgacaagagcgtgtgtctgttcaccgacttcgacagccagaccaacgtgtcccagagcaaggactccgacgtgtacatcaccgataagtgcgtgctggacatgcggagcatggacttcaagagcaactccgccgtggcctggtccaacaagtccgatttcgcctgcgccaacgccttcaacaacagcattatccccgaggacacattcttcccaagccccgagagcagctgcgacgtgaagctggtggaaaagagcttcgagacagacaccaacctgaacttccagaacctgagcgtgatcggcttcagaatcctgctgctgaaagtggccggctttaacctgctgatgaccctgcggctgtggtccagc

SEQ ID NO: 2454 - DNA, 2697 bp, Artificial Sequence
  Synthetic Polynucloetide
atggccttaccagtgaccgccttgctcctgccgctggccttgctgctccacgccgccaggccggaagtgcagctggttgaatctggcggaggactggttcagcctggcggatctctgagactgtcttgtgccgccagcggcttcagcttcagcgacttttggatgagctgggtccgacaggcccctggcaaaggacttgaatgggtcgccacaatcagccaggccggcagcgagaaggactacgtggactctgtgaagggcagattcaccatcagccgggacaacgccaagaagtccctgtacctccagatgaacagcctgagagccgaggacaccgccgtgtactattgtgcctctggcgtgtacagcttcgactacagaggccagggcaccctggtcacagtctcttctggtaccggcggaggcggatctggcggcggaggtagcggtggcggaggatctgaattccagtctgtggtcacacagcctccatccgtgtctgctgcccctggacagaaagtgaccatctcctgtagcggcagcagcagcaacatcggcaacaactacgtgtcctggtatcagcagctccccggcacagctcccaaactgctgatctacgacaacaacaagcggcccagcggcatccccgatagattttctggcagcaagagcggcaccagcgccacactgggaattaccggacttcagacaggcgacgaggccgactactactgtggcacatgggatggcagcctgtacaccatgcttttcggcggaggcaccaagctgacagtgcttctcgaggacctgaagaacgtgttcccacctgaggtggccgtgttcgagcctagcgaggccgagatcagccacacccagaaagccaccctcgtgtgcctggctaccggcttctaccccgaccatgtggaactgtcttggtgggtcaacggcaaagaggtgcacagcggcgtgtgtaccgacccccagccactgaaagaacagcccgccctgaacgacagccggtactgcctgagcagcagactgagagtgtccgccaccttctggcagaacccccggaaccacttcagatgccaggtgcagttctacggcctgagcgagaacgacgagtggacccaggacagagccaagcccgtgacccagatcgtgtctgccgaagcctggggcagagccgattgcggctttaccagcgagagctaccagcagggcgtgctgagcgccaccatcctgtacgagatcctgctgggcaaggccaccctgtacgccgtgctggtgtctgccctggtgctgatggctatggtcaagcggaaggacagccggggaagggccaagcgatctggatctggagcaacaaacttctcactactcaaacaagcaggtgacgtggaggagaatcccgggcctactagtatggactggatttggcgcatccttttccttgtcggcgctgctaccggcgcgcattccgggccccagctccagctgcaagagtctggacctggcctggtcaagcctagcgagacactgagcctgacctgtaccgtgtccggcgatagcatcagcagcggcgattactactggggctggatcagacagcctcctggcaaaggactggaatggatcggccacatctactacagcggcgtgacctactacaaccccagcctgaagtccagagtgaccatcagcgtggacaccagccggaaccagttctccctgaagctgtctagcgtgacagccgccgataccgccgtgtactactgcaccagagaggacagcagcaactggcggagtagaggccagggaacactggtcacagttagctctggatccggcggaggcggaagtggaggcggaggatctggcggcggaggctctttcgaagaagtgcaactggtggaatctggcggcggactggttaagcctggcggatctctgagactgtcttgtgccgccagcggcttcaccttcagcaatgcctggatgagctgggttcgacaggcccctggaaaaggactggaatgggtcggattcatccggtccaaagcctacggcggcaccacagaatatgccgcctctgtgaagggcagattcaccatcagccgggacgacagcaagtctatcgcctacctccagatgaacaacctgaaaaccgaggacaccgccgtgtactactgcgccagagatggcctgtacagcagctcttggtacgacagcgattactggggccagggcacactggtcacagtgtcatctacgcgtatccagaaccctgatcctgccgtgtaccagctgcgggatagcaagagcagcgacaagagcgtgtgtctgttcaccgacttcgacagccagaccaacgtgtcccagagcaaggactccgacgtgtacatcaccgataagtgcgtgctggacatgcggagcatggacttcaagagcaactccgccgtggcctggtccaacaagtccgatttcgcctgcgccaacgccttcaacaacagcattatccccgaggacacattcttcccaagccccgagagcagctgcgacgtgaagctggtggaaaagagcttcgagacagacaccaacctgaacttccagaacctgagcgtgatcggcttcagaatcctgctgctgaaagtggccggctttaacctgctgatgaccctgcggctgtggtccagc

SEQ ID NO: 2455 - DNA, 2712 bp, Artificial Sequence
  Synthetic Polynucloetide
atggccttaccagtgaccgccttgctcctgccgctggccttgctgctccacgccgccaggccggaagtgcagctggttgaatctggcggaggactggttcagcctggcggatctctgagactgtcttgtgccgccagcggcttcagcttcagcgacttttggatgagctgggtccgacaggcccctggcaaaggacttgaatgggtcgccacaatcagccaggccggcagcgagaaggactacgtggactctgtgaagggcagattcaccatcagccgggacaacgccaagaagtccctgtacctccagatgaacagcctgagagccgaggacaccgccgtgtactattgtgcctctggcgtgtacagcttcgactacagaggccagggcaccctggtcacagtctcttctggtaccggcggaggcggatctggcggcggaggtagcggtggcggaggatctgaattccagtctgtgctgacacagcctcctagtgtgtctggcgctcctggacagagagtgaccatctcttgtaccggcagcagcagcaatatcggagccggctatgacgtgcactggtatcagcagctccctggcacagcccctaaactgctgatcttcggcaacagcaacagacccagcggcgtgcccgatagattcagcggctttaagagcggcacaagcgccagcctggctatcactggactgcaagccgaggacgaggccgactacttctgccagagctacgatagcagcctgagcggcagcggagtgtttggcacaggcaccaaagtgacagtgcttggcctcgaggacctgaagaacgtgttcccacctgaggtggccgtgttcgagcctagcgaggccgagatcagccacacccagaaagccaccctcgtgtgcctggctaccggcttctaccccgaccatgtggaactgtcttggtgggtcaacggcaaagaggtgcacagcggcgtgtgtaccgacccccagccactgaaagaacagcccgccctgaacgacagccggtactgcctgagcagcagactgagagtgtccgccaccttctggcagaacccccggaaccacttcagatgccaggtgcagttctacggcctgagcgagaacgacgagtggacccaggacagagccaagcccgtgacccagatcgtgtctgccgaagcctggggcagagccgattgcggctttaccagcgagagctaccagcagggcgtgctgagcgccaccatcctgtacgagatcctgctgggcaaggccaccctgtacgccgtgctggtgtctgccctggtgctgatggctatggtcaagcggaaggacagccggggaagggccaagcgatctggatctggagcaacaaacttctcactactcaaacaagcaggtgacgtggaggagaatcccgggcctactagtatggactggatttggcgcatccttttccttgtcggcgctgctaccggcgcgcattccgggccccagctccagctgcaagagtctggacctggcctggtcaagcctagcgagacactgagcctgacctgtaccgtgtccggcgatagcatcagcagcggcgattactactggggctggatcagacagcctcctggcaaaggactggaatggatcggccacatctactacagcggcgtgacctactacaaccccagcctgaagtccagagtgaccatcagcgtggacaccagccggaaccagttctccctgaagctgtctagcgtgacagccgccgataccgccgtgtactactgcaccagagaggacagcagcaactggcggagtagaggccagggaacactggtcacagttagctctggatccggcggaggcggaagtggaggcggaggatctggcggcggaggctctttcgaacaaatgcaactggttcaaagcggcggtggcctggtgcaacctggaagaagtctgagactgagctgtgccgccagcggcttcaccttcgatgattacgccatgcactgggtccgacaggcccctggaaaaggactggaatgggtgtccggcatctcctggaatagcggctctatcggctacgccgacagcgtgaagggcagattcaccatcagccgggacaacgccaagaacagcctgtacctccagatgaactccctgagagccgaggatacagccctgtactactgcgccaaggacatccacagcggcagctactacggcctgctgtactacgctatggacgtgtggggccagggcacaaccgtgacagtttcttctacgcgtatccagaaccctgatcctgccgtgtaccagctgcgggatagcaagagcagcgacaagagcgtgtgtctgttcaccgacttcgacagccagaccaacgtgtcccagagcaaggactccgacgtgtacatcaccgataagtgcgtgctggacatgcggagcatggacttcaagagcaactccgccgtggcctggtccaacaagtccgatttcgcctgcgccaacgccttcaacaacagcattatccccgaggacacattcttcccaagccccgagagcagctgcgacgtgaagctggtggaaaagagcttcgagacagacaccaacctgaacttccagaacctgagcgtgatcggcttcagaatcctgctgctgaaagtggccggctttaacctgctgatgaccctgcggctgtggtccagc

SEQ ID NO: 2456 - DNA, 2712 bp, Artificial Sequence
  Synthetic Polynucloetide
atggccttaccagtgaccgccttgctcctgccgctggccttgctgctccacgccgccaggccggaagtgcagctggttgaatctggcggaggactggttcagcctggcggatctctgagactgtcttgtgccgccagcggcttcagcttcagcgacttttggatgagctgggtccgacaggcccctggcaaaggacttgaatgggtcgccacaatcagccaggccggcagcgagaaggactacgtggactctgtgaagggcagattcaccatcagccgggacaacgccaagaagtccctgtacctccagatgaacagcctgagagccgaggacaccgccgtgtactattgtgcctctggcgtgtacagcttcgactacagaggccagggcaccctggtcacagtctcttctggtaccggcggaggcggatctggcggcggaggtagcggtggcggaggatctgaattcctgcctgttctgacacagcctccatctgcctctggcacacctggacagagagtgaccatcagctgtagcggcagaagcagcaacatcggcagcaacagcgtgaactggtacagacagcttcctggcgctgcccctaagctgctgatctacagcaacaaccagcggcctcctggcgtgccagtcagattttctggcagcaagagcggcacaagcgccagcctggctatttctggactccagtctgaggacgaggccacctactactgtgccacctgggacgacaacctgaacgtgcactacgtgttcggcaccggcaccaaagtgacagtgcttggaagtagactcgaggacctgaagaacgtgttcccacctgaggtggccgtgttcgagcctagcgaggccgagatcagccacacccagaaagccaccctcgtgtgcctggctaccggcttctaccccgaccatgtggaactgtcttggtgggtcaacggcaaagaggtgcacagcggcgtgtgtaccgacccccagccactgaaagaacagcccgccctgaacgacagccggtactgcctgagcagcagactgagagtgtccgccaccttctggcagaacccccggaaccacttcagatgccaggtgcagttctacggcctgagcgagaacgacgagtggacccaggacagagccaagcccgtgacccagatcgtgtctgccgaagcctggggcagagccgattgcggctttaccagcgagagctaccagcagggcgtgctgagcgccaccatcctgtacgagatcctgctgggcaaggccaccctgtacgccgtgctggtgtctgccctggtgctgatggctatggtcaagcggaaggacagccggggaagggccaagcgatctggatctggagcaacaaacttctcactactcaaacaagcaggtgacgtggaggagaatcccgggcctactagtatggactggatttggcgcatccttttccttgtcggcgctgctaccggcgcgcattccgggccccagctccagctgcaagagtctggacctggcctggtcaagcctagcgagacactgagcctgacctgtaccgtgtccggcgatagcatcagcagcggcgattactactggggctggatcagacagcctcctggcaaaggactggaatggatcggccacatctactacagcggcgtgacctactacaaccccagcctgaagtccagagtgaccatcagcgtggacaccagccggaaccagttctccctgaagctgtctagcgtgacagccgccgataccgccgtgtactactgcaccagagaggacagcagcaactggcggagtagaggccagggaacactggtcacagttagctctggatccggcggaggcggaagtggaggcggaggatctggcggcggaggctctttcgaacttgaaatggctcaggtgcagctggtgcagagcggagccgaagtgaagaaacctggcagcagcgtgaaggtgtcctgcaaagcttctggcggcaccttcagcagctacgccatctcttgggttcgacaggcccctggacaaggactggaatggatgggcagaatcatccccatcctgggaatcgccaactacgcccagaaattccagggcagagtgacaatcaccgccgacaagagcaccagcaccgcctacatggaactgagcagcctgagaagcgaggacaccgccgtgtactattgtgcaagaggcggctactacagccacgacatgtggagcgaagattggggccagggcacactggtcacagtgtcatctacgcgtatccagaaccctgatcctgccgtgtaccagctgcgggatagcaagagcagcgacaagagcgtgtgtctgttcaccgacttcgacagccagaccaacgtgtcccagagcaaggactccgacgtgtacatcaccgataagtgcgtgctggacatgcggagcatggacttcaagagcaactccgccgtggcctggtccaacaagtccgatttcgcctgcgccaacgccttcaacaacagcattatccccgaggacacattcttcccaagccccgagagcagctgcgacgtgaagctggtggaaaagagcttcgagacagacaccaacctgaacttccagaacctgagcgtgatcggcttcagaatcctgctgctgaaagtggccggctttaacctgctgatgaccctgcggctgtggtccagc

SEQ ID NO: 2457 - DNA, 2694 bp, Artificial Sequence
  Synthetic Polynucloetide
atggccttaccagtgaccgccttgctcctgccgctggccttgctgctccacgccgccaggccggaagtgcagctggttgaatctggcggaggactggttcagcctggcggatctctgagactgtcttgtgccgccagcggcttcagcttcagcgacttttggatgagctgggtccgacaggcccctggcaaaggacttgaatgggtcgccacaatcagccaggccggcagcgagaaggactacgtggactctgtgaagggcagattcaccatcagccgggacaacgccaagaagtccctgtacctccagatgaacagcctgagagccgaggacaccgccgtgtactattgtgcctctggcgtgtacagcttcgactacagaggccagggcaccctggtcacagtctcttctggtaccggcggaggcggatctggcggcggaggtagcggtggcggaggatctgaattcgacttcgtgatgacacagagccctgatagcctggccgtgtctctcggcgagcgagtgaccatgagctgcaagtctagccagagcctgctgaacagcggcaaccagaagaactacctgacctggtatcagcagaagcccggccagcctcctaagctgctgatctactgggccagcaccagagaaagcggcgtgcccgatagattttctggctctggcagcggcaccgacttcaccctgacaatttctagcctgcaagccgaggacgtggccgtgtactactgccagaacgactacagctacccctacaccttcggccagggcaccaagctggaaatcaaactcgaggacctgaagaacgtgttcccacctgaggtggccgtgttcgagcctagcgaggccgagatcagccacacccagaaagccaccctcgtgtgcctggctaccggcttctaccccgaccatgtggaactgtcttggtgggtcaacggcaaagaggtgcacagcggcgtgtgtaccgacccccagccactgaaagaacagcccgccctgaacgacagccggtactgcctgagcagcagactgagagtgtccgccaccttctggcagaacccccggaaccacttcagatgccaggtgcagttctacggcctgagcgagaacgacgagtggacccaggacagagccaagcccgtgacccagatcgtgtctgccgaagcctggggcagagccgattgcggctttaccagcgagagctaccagcagggcgtgctgagcgccaccatcctgtacgagatcctgctgggcaaggccaccctgtacgccgtgctggtgtctgccctggtgctgatggctatggtcaagcggaaggacagccggggaagggccaagcgatctggatctggagcaacaaacttctcactactcaaacaagcaggtgacgtggaggagaatcccgggcctactagtatggactggatttggcgcatccttttccttgtcggcgctgctaccggcgcgcattccgggccccagctccagctgcaagagtctggacctggcctggtcaagcctagcgagacactgagcctgacctgtaccgtgtccggcgatagcatcagcagcggcgattactactggggctggatcagacagcctcctggcaaaggactggaatggatcggccacatctactacagcggcgtgacctactacaaccccagcctgaagtccagagtgaccatcagcgtggacaccagccggaaccagttctccctgaagctgtctagcgtgacagccgccgataccgccgtgtactactgcaccagagaggacagcagcaactggcggagtagaggccagggaacactggtcacagttagctctggatccggcggaggcggaagtggaggcggaggatctggcggcggaggctctttcgaagaagtgcaactggttcagagcggagccgagctgaagaaacctggggccagcgtgaaggtgtcctgtaaagccagcggctacacctttaccgactactacatgaaatgggtccgacaggccccaggccagggactcgaatggatcggcgatattatccccagcaacggggccaccttctacaaccagaaattcaagggccgcgtgaccatcaccgtggacaagagcacaagcaccgcctacatggaactgagcagcctgagaagcgaggacaccgccgtgtattattgcgccagaagccatctgctgcgggccagttggttcgcctattggggacagggaaccctggtcaccgttagctctacgcgtatccagaaccctgatcctgccgtgtaccagctgcgggatagcaagagcagcgacaagagcgtgtgtctgttcaccgacttcgacagccagaccaacgtgtcccagagcaaggactccgacgtgtacatcaccgataagtgcgtgctggacatgcggagcatggacttcaagagcaactccgccgtggcctggtccaacaagtccgatttcgcctgcgccaacgccttcaacaacagcattatccccgaggacacattcttcccaagccccgagagcagctgcgacgtgaagctggtggaaaagagcttcgagacagacaccaacctgaacttccagaacctgagcgtgatcggcttcagaatcctgctgctgaaagtggccggctttaacctgctgatgaccctgcggctgtggtccagc

SEQ ID NO: 2458 - DNA, 2694 bp, Artificial Sequence
  Synthetic Polynucloetide
atggccttaccagtgaccgccttgctcctgccgctggccttgctgctccacgccgccaggccggaagtgcagctggttgaatctggcggaggactggttcagcctggcggatctctgagactgtcttgtgccgccagcggcttcagcttcagcgacttttggatgagctgggtccgacaggcccctggcaaaggacttgaatgggtcgccacaatcagccaggccggcagcgagaaggactacgtggactctgtgaagggcagattcaccatcagccgggacaacgccaagaagtccctgtacctccagatgaacagcctgagagccgaggacaccgccgtgtactattgtgcctctggcgtgtacagcttcgactacagaggccagggcaccctggtcacagtctcttctggtaccggcggaggcggatctggcggcggaggtagcggtggcggaggatctgaattcgacttcgtgatgacacagagccctgatagcctggccgtgtctctcggcgagcgagtgaccatgagctgcaagtctagccagagcctgctgaacagcggcaaccagaagaactacctgacctggtatcagcagaagcccggccagcctcctaagctgctgatctactgggccagcaccagagaaagcggcgtgcccgatagattttctggctctggcagcggcaccgacttcaccctgacaatttctagcctgcaagccgaggacgtggccgtgtactactgccagaacgactacagctacccctacaccttcggccagggcaccaagctggaaatcaaactcgaggacctgaagaacgtgttcccacctgaggtggccgtgttcgagcctagcgaggccgagatcagccacacccagaaagccaccctcgtgtgcctggctaccggcttctaccccgaccatgtggaactgtcttggtgggtcaacggcaaagaggtgcacagcggcgtgtgtaccgacccccagccactgaaagaacagcccgccctgaacgacagccggtactgcctgagcagcagactgagagtgtccgccaccttctggcagaacccccggaaccacttcagatgccaggtgcagttctacggcctgagcgagaacgacgagtggacccaggacagagccaagcccgtgacccagatcgtgtctgccgaagcctggggcagagccgattgcggctttaccagcgagagctaccagcagggcgtgctgagcgccaccatcctgtacgagatcctgctgggcaaggccaccctgtacgccgtgctggtgtctgccctggtgctgatggctatggtcaagcggaaggacagccggggaagggccaagcgatctggatctggagcaacaaacttctcactactcaaacaagcaggtgacgtggaggagaatcccgggcctactagtatggactggatttggcgcatccttttccttgtcggcgctgctaccggcgcgcattccgggccccagctccagctgcaagagtctggacctggcctggtcaagcctagcgagacactgagcctgacctgtaccgtgtccggcgatagcatcagcagcggcgattactactggggctggatcagacagcctcctggcaaaggactggaatggatcggccacatctactacagcggcgtgacctactacaaccccagcctgaagtccagagtgaccatcagcgtggacaccagccggaaccagttctccctgaagctgtctagcgtgacagccgccgataccgccgtgtactactgcaccagagaggacagcagcaactggcggagtagaggccagggaacactggtcacagttagctctggatccggcggaggcggaagtggaggcggaggatctggcggcggaggctctttcgaacaagtgcaactggttcagagcggagccgagctgaagaaacctggggccagcgtgaaggtgtcctgtaaagccagcggctacacctttaccgactactacatgaaatgggtccgacaggccccaggccagggactcgaatggatcggcgatattatccccagcaacggggccaccttctacaaccagaaattcaagggccgcgtgaccatcaccgtggacaagagcacaagcaccgcctacatggaactgagcagcctgagaagcgaggacaccgccgtgtattattgcgccagaagccatctgctgcgggccagttggttcgcctattggggacagggaaccctggtcaccgttagctctacgcgtatccagaaccctgatcctgccgtgtaccagctgcgggatagcaagagcagcgacaagagcgtgtgtctgttcaccgacttcgacagccagaccaacgtgtcccagagcaaggactccgacgtgtacatcaccgataagtgcgtgctggacatgcggagcatggacttcaagagcaactccgccgtggcctggtccaacaagtccgatttcgcctgcgccaacgccttcaacaacagcattatccccgaggacacattcttcccaagccccgagagcagctgcgacgtgaagctggtggaaaagagcttcgagacagacaccaacctgaacttccagaacctgagcgtgatcggcttcagaatcctgctgctgaaagtggccggctttaacctgctgatgaccctgcggctgtggtccagc

SEQ ID NO: 2459 - DNA, 2664 bp, Artificial Sequence
  Synthetic Polynucloetide
atggccttaccagtgaccgccttgctcctgccgctggccttgctgctccacgccgccaggccggaagtgcagctggttgaatctggcggaggactggttcagcctggcggatctctgagactgtcttgtgccgccagcggcttcagcttcagcgacttttggatgagctgggtccgacaggcccctggcaaaggacttgaatgggtcgccacaatcagccaggccggcagcgagaaggactacgtggactctgtgaagggcagattcaccatcagccgggacaacgccaagaagtccctgtacctccagatgaacagcctgagagccgaggacaccgccgtgtactattgtgcctctggcgtgtacagcttcgactacagaggccagggcaccctggtcacagtctcttctggtaccggcggaggcggatctggcggcggaggtagcggtggcggaggatctgaattcgacgtgcagatcacacagagccctagctacctggctgcctctcctggcgagacaatcaccatcaactgtcgggccagcaagagcatcagcaaggacctggcctggtatcaagagaagcccggcaagaccaacaagctgctgatctacagcggcagcacactccagtctggcatccccagcagattttccggctctggcagcggcaccgatttcaccctgaccataagcagcctggaacctgaggacttcgccatgtactactgccagcagcacaacaagtacccctacacctttggcggaggcaccaagctggaaatcaagagactcgaggacctgaagaacgtgttcccacctgaggtggccgtgttcgagcctagcgaggccgagatcagccacacccagaaagccaccctcgtgtgcctggctaccggcttctaccccgaccatgtggaactgtcttggtgggtcaacggcaaagaggtgcacagcggcgtgtgtaccgacccccagccactgaaagaacagcccgccctgaacgacagccggtactgcctgagcagcagactgagagtgtccgccaccttctggcagaacccccggaaccacttcagatgccaggtgcagttctacggcctgagcgagaacgacgagtggacccaggacagagccaagcccgtgacccagatcgtgtctgccgaagcctggggcagagccgattgcggctttaccagcgagagctaccagcagggcgtgctgagcgccaccatcctgtacgagatcctgctgggcaaggccaccctgtacgccgtgctggtgtctgccctggtgctgatggctatggtcaagcggaaggacagccggggaagggccaagcgatctggatctggagcaacaaacttctcactactcaaacaagcaggtgacgtggaggagaatcccgggcctactagtatggactggatttggcgcatccttttccttgtcggcgctgctaccggcgcgcattccgggccccagctccagctgcaagagtctggacctggcctggtcaagcctagcgagacactgagcctgacctgtaccgtgtccggcgatagcatcagcagcggcgattactactggggctggatcagacagcctcctggcaaaggactggaatggatcggccacatctactacagcggcgtgacctactacaaccccagcctgaagtccagagtgaccatcagcgtggacaccagccggaaccagttctccctgaagctgtctagcgtgacagccgccgataccgccgtgtactactgcaccagagaggacagcagcaactggcggagtagaggccagggaacactggtcacagttagctctggatccggcggaggcggaagtggaggcggaggatctggcggcggaggctctttcgaacaagttcaactgcaacagcctggggccgagcttgttagacctggcgcttctgtgaagctgagctgcaaggccagcggctacaccttcaccagctactggatgaactgggtcaagcagcggcctgaccagggcctcgaatggatcggcagaatcgacccctacgacagcgagacacactacaaccagaagttcaaggacaaggccatcctgaccgtggacaagagcagctccaccgcctacatgcaactgagcagcctgacctctgaggatagcgccgtgtactattgcgccagaggcaactgggacgactattggggccagggcacaaccctgacagtgtctagtacgcgtatccagaaccctgatcctgccgtgtaccagctgcgggatagcaagagcagcgacaagagcgtgtgtctgttcaccgacttcgacagccagaccaacgtgtcccagagcaaggactccgacgtgtacatcaccgataagtgcgtgctggacatgcggagcatggacttcaagagcaactccgccgtggcctggtccaacaagtccgatttcgcctgcgccaacgccttcaacaacagcattatccccgaggacacattcttcccaagccccgagagcagctgcgacgtgaagctggtggaaaagagcttcgagacagacaccaacctgaacttccagaacctgagcgtgatcggcttcagaatcctgctgctgaaagtggccggctttaacctgctgatgaccctgcggctgtggtccagc

SEQ ID NO: 2460 - DNA, 2670 bp, Artificial Sequence
  Synthetic Polynucloetide
atggccttaccagtgaccgccttgctcctgccgctggccttgctgctccacgccgccaggccggaagtgcagctggttgaatctggcggaggactggttcagcctggcggatctctgagactgtcttgtgccgccagcggcttcagcttcagcgacttttggatgagctgggtccgacaggcccctggcaaaggacttgaatgggtcgccacaatcagccaggccggcagcgagaaggactacgtggactctgtgaagggcagattcaccatcagccgggacaacgccaagaagtccctgtacctccagatgaacagcctgagagccgaggacaccgccgtgtactattgtgcctctggcgtgtacagcttcgactacagaggccagggcaccctggtcacagtctcttctggtaccggcggaggcggatctggcggcggaggtagcggtggcggaggatctgaattcgagatcgtgctgacacagagccctaccagcatgacagcctctccaggcgagcaagtgaccatcacctgtagagccagcagcagcatcaactacatgcactggtatcagcagaagcctggcgcaagccccagaccttggatctacgagacaagcaagctggcctccggcgtgcccgatagattttctggatctgccagcggcaccagctacagcctgaccatcaacaacatggaagccgaggacgccgccacctactactgccagcagtggaattacccctcctggacctttggcggaggcaccaagctggaacttaaactcgaggacctgaagaacgtgttcccacctgaggtggccgtgttcgagcctagcgaggccgagatcagccacacccagaaagccaccctcgtgtgcctggctaccggcttctaccccgaccatgtggaactgtcttggtgggtcaacggcaaagaggtgcacagcggcgtgtgtaccgacccccagccactgaaagaacagcccgccctgaacgacagccggtactgcctgagcagcagactgagagtgtccgccaccttctggcagaacccccggaaccacttcagatgccaggtgcagttctacggcctgagcgagaacgacgagtggacccaggacagagccaagcccgtgacccagatcgtgtctgccgaagcctggggcagagccgattgcggctttaccagcgagagctaccagcagggcgtgctgagcgccaccatcctgtacgagatcctgctgggcaaggccaccctgtacgccgtgctggtgtctgccctggtgctgatggctatggtcaagcggaaggacagccggggaagggccaagcgatctggatctggagcaacaaacttctcactactcaaacaagcaggtgacgtggaggagaatcccgggcctactagtatggactggatttggcgcatccttttccttgtcggcgctgctaccggcgcgcattccgggccccagctccagctgcaagagtctggacctggcctggtcaagcctagcgagacactgagcctgacctgtaccgtgtccggcgatagcatcagcagcggcgattactactggggctggatcagacagcctcctggcaaaggactggaatggatcggccacatctactacagcggcgtgacctactacaaccccagcctgaagtccagagtgaccatcagcgtggacaccagccggaaccagttctccctgaagctgtctagcgtgacagccgccgataccgccgtgtactactgcaccagagaggacagcagcaactggcggagtagaggccagggaacactggtcacagttagctctggatccggcggaggcggaagtggaggcggaggatctggcggcggaggctctttcgaagaagtgcagctcgttgagtctggtggcggactggttcagcctggaagaagcctgaagctgagctgtgccgccagcggcttcaccttcagcgactacaatatggcctgggtccgacaggcccctaagaaaggactggaatgggtcgccaccatcctgtacgatggcggcagaacctactaccggggcagcgtgaagggcagattcaccatcagcagagacaacgccaagagcaccctgtacctgcggatggactctctgagaagcgaggataccgccacatattactgtgccacacacagccggggcaccgactactttgattattggggccagggcgtgatggttaccgtgtctagtacgcgtatccagaaccctgatcctgccgtgtaccagctgcgggatagcaagagcagcgacaagagcgtgtgtctgttcaccgacttcgacagccagaccaacgtgtcccagagcaaggactccgacgtgtacatcaccgataagtgcgtgctggacatgcggagcatggacttcaagagcaactccgccgtggcctggtccaacaagtccgatttcgcctgcgccaacgccttcaacaacagcattatccccgaggacacattcttcccaagccccgagagcagctgcgacgtgaagctggtggaaaagagcttcgagacagacaccaacctgaacttccagaacctgagcgtgatcggcttcagaatcctgctgctgaaagtggccggctttaacctgctgatgaccctgcggctgtggtccagc

SEQ ID NO: 2461 - DNA, 2697 bp, Artificial Sequence
  Synthetic Polynucloetide
atggccttaccagtgaccgccttgctcctgccgctggccttgctgctccacgccgccaggccggaagtgcagctggttgaatctggcggaggactggttcagcctggcggatctctgagactgtcttgtgccgccagcggcttcagcttcagcgacttttggatgagctgggtccgacaggcccctggcaaaggacttgaatgggtcgccacaatcagccaggccggcagcgagaaggactacgtggactctgtgaagggcagattcaccatcagccgggacaacgccaagaagtccctgtacctccagatgaacagcctgagagccgaggacaccgccgtgtactattgtgcctctggcgtgtacagcttcgactacagaggccagggcaccctggtcacagtctcttctggtaccggcggaggcggatctggcggcggaggtagcggtggcggaggatctgaattcgacatcgtgatgacacagagcccttctagcctggccgtgtctgagggcgagacagtgaccatcaactgcaagagcagccagagcttcctgtctagcggcgacggcaagaattacgtggcctggtatcagtacaagcccggacagagccccaagctgctgatctactgggccagcacaagacagagcggcgtgcccgatagattcatcggctctggcagcggcaccgacttcaccctgacaatctctacagtgcaggccgaggacctggctatctactactgccagcagtattacgacacccctctgacctttggctccggcaccaagctggaaatcaaactcgaggacctgaagaacgtgttcccacctgaggtggccgtgttcgagcctagcgaggccgagatcagccacacccagaaagccaccctcgtgtgcctggctaccggcttctaccccgaccatgtggaactgtcttggtgggtcaacggcaaagaggtgcacagcggcgtgtgtaccgacccccagccactgaaagaacagcccgccctgaacgacagccggtactgcctgagcagcagactgagagtgtccgccaccttctggcagaacccccggaaccacttcagatgccaggtgcagttctacggcctgagcgagaacgacgagtggacccaggacagagccaagcccgtgacccagatcgtgtctgccgaagcctggggcagagccgattgcggctttaccagcgagagctaccagcagggcgtgctgagcgccaccatcctgtacgagatcctgctgggcaaggccaccctgtacgccgtgctggtgtctgccctggtgctgatggctatggtcaagcggaaggacagccggggaagggccaagcgatctggatctggagcaacaaacttctcactactcaaacaagcaggtgacgtggaggagaatcccgggcctactagtatggactggatttggcgcatccttttccttgtcggcgctgctaccggcgcgcattccgggccccagctccagctgcaagagtctggacctggcctggtcaagcctagcgagacactgagcctgacctgtaccgtgtccggcgatagcatcagcagcggcgattactactggggctggatcagacagcctcctggcaaaggactggaatggatcggccacatctactacagcggcgtgacctactacaaccccagcctgaagtccagagtgaccatcagcgtggacaccagccggaaccagttctccctgaagctgtctagcgtgacagccgccgataccgccgtgtactactgcaccagagaggacagcagcaactggcggagtagaggccagggaacactggtcacagttagctctggatccggcggaggcggaagtggaggcggaggatctggcggcggaggctctttcgaagaagtgaagctgcaagagtctggccccagcctggtgcagagtagccaaacactgagcctgacctgtaccgtgtccggctttagcctgaccagctaccacatccactgggtccgacagacccctggcaaaggactggaatggatgggcgtgatgtggagcgacggcgacaccagctataacagcgccctgaagtcccggctgagcatcagcagagatacaagccagagccaggtgttcctgaagatgaacagcctccagaccgaggacaccgccacctactattgtgccagaggctactacagcagctacctgtacctttggttcgcctattggggccagggcaccctggttacagtcagctctacgcgtatccagaaccctgatcctgccgtgtaccagctgcgggatagcaagagcagcgacaagagcgtgtgtctgttcaccgacttcgacagccagaccaacgtgtcccagagcaaggactccgacgtgtacatcaccgataagtgcgtgctggacatgcggagcatggacttcaagagcaactccgccgtggcctggtccaacaagtccgatttcgcctgcgccaacgccttcaacaacagcattatccccgaggacacattcttcccaagccccgagagcagctgcgacgtgaagctggtggaaaagagcttcgagacagacaccaacctgaacttccagaacctgagcgtgatcggcttcagaatcctgctgctgaaagtggccggctttaacctgctgatgaccctgcggctgtggtccagc

SEQ ID NO: 2462 - DNA, 2709 bp, Artificial Sequence
  Synthetic Polynucloetide
atggccttaccagtgaccgccttgctcctgccgctggccttgctgctccacgccgccaggccggaagtgcagctggttgaatctggcggaggactggttcagcctggcggatctctgagactgtcttgtgccgccagcggcttcagcttcagcgacttttggatgagctgggtccgacaggcccctggcaaaggacttgaatgggtcgccacaatcagccaggccggcagcgagaaggactacgtggactctgtgaagggcagattcaccatcagccgggacaacgccaagaagtccctgtacctccagatgaacagcctgagagccgaggacaccgccgtgtactattgtgcctctggcgtgtacagcttcgactacagaggccagggcaccctggtcacagtctcttctggtaccggcggaggcggatctggcggcggaggtagcggtggcggaggatctgaattcgacgtgctgatgacccagacacctgtgtctctgccagtgtctctcggaggccaggtgtccatctcctgtagaagcagccagagcctggtgcactccgacggcgatacctacctgcactggtatctccagaagcctggacagagccctcagctcctgatctaccgggtgtccaacagattcagcggcgtgcccgatagattttccggcagcggctctggcaccgacttcaccctgaagatcagcagagtggaacccgaggacctgggcctgtactactgtctccagaccacacacttcccaccttggacctttggcggaggcaccaagctggaaatgaaactcgaggacctgaagaacgtgttcccacctgaggtggccgtgttcgagcctagcgaggccgagatcagccacacccagaaagccaccctcgtgtgcctggctaccggcttctaccccgaccatgtggaactgtcttggtgggtcaacggcaaagaggtgcacagcggcgtgtgtaccgacccccagccactgaaagaacagcccgccctgaacgacagccggtactgcctgagcagcagactgagagtgtccgccaccttctggcagaacccccggaaccacttcagatgccaggtgcagttctacggcctgagcgagaacgacgagtggacccaggacagagccaagcccgtgacccagatcgtgtctgccgaagcctggggcagagccgattgcggctttaccagcgagagctaccagcagggcgtgctgagcgccaccatcctgtacgagatcctgctgggcaaggccaccctgtacgccgtgctggtgtctgccctggtgctgatggctatggtcaagcggaaggacagccggggaagggccaagcgatctggatctggagcaacaaacttctcactactcaaacaagcaggtgacgtggaggagaatcccgggcctactagtatggactggatttggcgcatccttttccttgtcggcgctgctaccggcgcgcattccgggccccagctccagctgcaagagtctggacctggcctggtcaagcctagcgagacactgagcctgacctgtaccgtgtccggcgatagcatcagcagcggcgattactactggggctggatcagacagcctcctggcaaaggactggaatggatcggccacatctactacagcggcgtgacctactacaaccccagcctgaagtccagagtgaccatcagcgtggacaccagccggaaccagttctccctgaagctgtctagcgtgacagccgccgataccgccgtgtactactgcaccagagaggacagcagcaactggcggagtagaggccagggaacactggtcacagttagctctggatccggcggaggcggaagtggaggcggaggatctggcggcggaggctctttcgaacaggttcagctccagcagtctggacccgagcttagaaggccaggatctagcgtcagactgagctgcaaggccagcggctaccggatcaaggacttcctgatccactggattaagaacagacccgagcacggcctggaatggatcggatggattgaccctgaggacggcgagactaagtacgcccagaagttccagaccaaggccacactgaccgccgacacctctagcaacaccgcctacatgcaactgagcagcctgaccagcgaggacaccgccacctacttttgtgctagatggggcgacgtgtactacggcctgatgagaggccatgtgatggatgcctggggccagggaacaagcgtgacagtctcttctacgcgtatccagaaccctgatcctgccgtgtaccagctgcgggatagcaagagcagcgacaagagcgtgtgtctgttcaccgacttcgacagccagaccaacgtgtcccagagcaaggactccgacgtgtacatcaccgataagtgcgtgctggacatgcggagcatggacttcaagagcaactccgccgtggcctggtccaacaagtccgatttcgcctgcgccaacgccttcaacaacagcattatccccgaggacacattcttcccaagccccgagagcagctgcgacgtgaagctggtggaaaagagcttcgagacagacaccaacctgaacttccagaacctgagcgtgatcggcttcagaatcctgctgctgaaagtggccggctttaacctgctgatgaccctgcggctgtggtccagc

SEQ ID NO: 2463 - DNA, 2694 bp, Artificial Sequence
  Synthetic Polynucloetide
atggccttaccagtgaccgccttgctcctgccgctggccttgctgctccacgccgccaggccggaagtgcagctggttgaatctggcggaggactggttcagcctggcggatctctgagactgtcttgtgccgccagcggcttcagcttcagcgacttttggatgagctgggtccgacaggcccctggcaaaggacttgaatgggtcgccacaatcagccaggccggcagcgagaaggactacgtggactctgtgaagggcagattcaccatcagccgggacaacgccaagaagtccctgtacctccagatgaacagcctgagagccgaggacaccgccgtgtactattgtgcctctggcgtgtacagcttcgactacagaggccagggcaccctggtcacagtctcttctggtaccggcggaggcggatctggcggcggaggtagcggtggcggaggatctgaattcgacatcgtgatgacacagagccccgccacactgtcactgtctccaggcgaaagagccacactgagctgtcggagcagcaagagcctccagaacgtgaacggcaacacctacctgtactggttccagcagaagcccggccagtctcctcagctcctgatctacagaatgagcaacctgaacagcggcgtgcccgacagattttctggcagcggaagcggcaccgagttcaccctgaccataagcagcctggaacctgaggacttcgccgtgtactactgtatgcagcacctggaataccccatcaccttcggagccggcaccaagctggaaatcaaactcgaggacctgaagaacgtgttcccacctgaggtggccgtgttcgagcctagcgaggccgagatcagccacacccagaaagccaccctcgtgtgcctggctaccggcttctaccccgaccatgtggaactgtcttggtgggtcaacggcaaagaggtgcacagcggcgtgtgtaccgacccccagccactgaaagaacagcccgccctgaacgacagccggtactgcctgagcagcagactgagagtgtccgccaccttctggcagaacccccggaaccacttcagatgccaggtgcagttctacggcctgagcgagaacgacgagtggacccaggacagagccaagcccgtgacccagatcgtgtctgccgaagcctggggcagagccgattgcggctttaccagcgagagctaccagcagggcgtgctgagcgccaccatcctgtacgagatcctgctgggcaaggccaccctgtacgccgtgctggtgtctgccctggtgctgatggctatggtcaagcggaaggacagccggggaagggccaagcgatctggatctggagcaacaaacttctcactactcaaacaagcaggtgacgtggaggagaatcccgggcctactagtatggactggatttggcgcatccttttccttgtcggcgctgctaccggcgcgcattccgggccccagctccagctgcaagagtctggacctggcctggtcaagcctagcgagacactgagcctgacctgtaccgtgtccggcgatagcatcagcagcggcgattactactggggctggatcagacagcctcctggcaaaggactggaatggatcggccacatctactacagcggcgtgacctactacaaccccagcctgaagtccagagtgaccatcagcgtggacaccagccggaaccagttctccctgaagctgtctagcgtgacagccgccgataccgccgtgtactactgcaccagagaggacagcagcaactggcggagtagaggccagggaacactggtcacagttagctctggatccggcggaggcggaagtggaggcggaggatctggcggcggaggctctttcgaagaagtgcaactggttgaatctggcggcggactggttaagcctggcggatctctgaagctgagctgtgccgccagcggctacacctttaccagctacgtgatgcactgggtccgacaggcccctggcaaaggacttgagtggatcggctacatcaacccctacaacgatggcaccaagtacaacgagaagttccagggcagagtgaccatcagctccgacaagagcatcagcaccgcctacatggaactgagcagcctgagaagcgaggataccgccatgtactattgcgccagaggcacctactactacggcaccagagtgttcgactactggggccagggaaccctggtcacagtctcttctacgcgtatccagaaccctgatcctgccgtgtaccagctgcgggatagcaagagcagcgacaagagcgtgtgtctgttcaccgacttcgacagccagaccaacgtgtcccagagcaaggactccgacgtgtacatcaccgataagtgcgtgctggacatgcggagcatggacttcaagagcaactccgccgtggcctggtccaacaagtccgatttcgcctgcgccaacgccttcaacaacagcattatccccgaggacacattcttcccaagccccgagagcagctgcgacgtgaagctggtggaaaagagcttcgagacagacaccaacctgaacttccagaacctgagcgtgatcggcttcagaatcctgctgctgaaagtggccggctttaacctgctgatgaccctgcggctgtggtccagc

SEQ ID NO: 2464 - DNA, 2682 bp, Artificial Sequence
  Synthetic Polynucloetide
atggccttaccagtgaccgccttgctcctgccgctggccttgctgctccacgccgccaggccggaagtgcagctggttgaatctggcggaggactggttcagcctggcggatctctgagactgtcttgtgccgccagcggcttcagcttcagcgacttttggatgagctgggtccgacaggcccctggcaaaggacttgaatgggtcgccacaatcagccaggccggcagcgagaaggactacgtggactctgtgaagggcagattcaccatcagccgggacaacgccaagaagtccctgtacctccagatgaacagcctgagagccgaggacaccgccgtgtactattgtgcctctggcgtgtacagcttcgactacagaggccagggcaccctggtcacagtctcttctggtaccggcggaggcggatctggcggcggaggtagcggtggcggaggatctgaattcgacatccagatgacacagagccctagcagcctgtctgccagcgtgggagacagagtgaccatcacatgcaaggccagcgaccacatcaacaactggctggcctggtatcagcagaagcctggacaggcccctaagctgctgatctacggcgctaccacactggaaacaggcgtgcccagcagattttctggcagcggctctggcaccgactacaccctgacaatatccagcctccagcctgaggacttcgccacctactactgtcagcagagctggaacaccccttggacattcggccagggcaccaagctggaaatcaagagactcgaggacctgaagaacgtgttcccacctgaggtggccgtgttcgagcctagcgaggccgagatcagccacacccagaaagccaccctcgtgtgcctggctaccggcttctaccccgaccatgtggaactgtcttggtgggtcaacggcaaagaggtgcacagcggcgtgtgtaccgacccccagccactgaaagaacagcccgccctgaacgacagccggtactgcctgagcagcagactgagagtgtccgccaccttctggcagaacccccggaaccacttcagatgccaggtgcagttctacggcctgagcgagaacgacgagtggacccaggacagagccaagcccgtgacccagatcgtgtctgccgaagcctggggcagagccgattgcggctttaccagcgagagctaccagcagggcgtgctgagcgccaccatcctgtacgagatcctgctgggcaaggccaccctgtacgccgtgctggtgtctgccctggtgctgatggctatggtcaagcggaaggacagccggggaagggccaagcgatctggatctggagcaacaaacttctcactactcaaacaagcaggtgacgtggaggagaatcccgggcctactagtatggactggatttggcgcatccttttccttgtcggcgctgctaccggcgcgcattccgggccccagctccagctgcaagagtctggacctggcctggtcaagcctagcgagacactgagcctgacctgtaccgtgtccggcgatagcatcagcagcggcgattactactggggctggatcagacagcctcctggcaaaggactggaatggatcggccacatctactacagcggcgtgacctactacaaccccagcctgaagtccagagtgaccatcagcgtggacaccagccggaaccagttctccctgaagctgtctagcgtgacagccgccgataccgccgtgtactactgcaccagagaggacagcagcaactggcggagtagaggccagggaacactggtcacagttagctctggatccggcggaggcggaagtggaggcggaggatctggcggcggaggctctttcgaacaagttcagcttcaacagcctggcgctgagctggtcaaacctggcgcttctgtgaagatgagctgcaaagccagcggctacgccttcagcagctactggatcaactggatgaagcagaaacccggccagggactcgaatggatcggccaaatctatcccggcgacggcgacaccaactacaacggcaagttcaagggcagagccacactgaccgccgatacctctagcagcacagcctacatgcagctgagcagcctgaccagcgaagatagcgccgtgtacttctgtgcccggtccatcacaacagtcgtgggctgcgctatggactattggggccagggaacaagcgtgaccgtgtctagtacgcgtatccagaaccctgatcctgccgtgtaccagctgcgggatagcaagagcagcgacaagagcgtgtgtctgttcaccgacttcgacagccagaccaacgtgtcccagagcaaggactccgacgtgtacatcaccgataagtgcgtgctggacatgcggagcatggacttcaagagcaactccgccgtggcctggtccaacaagtccgatttcgcctgcgccaacgccttcaacaacagcattatccccgaggacacattcttcccaagccccgagagcagctgcgacgtgaagctggtggaaaagagcttcgagacagacaccaacctgaacttccagaacctgagcgtgatcggcttcagaatcctgctgctgaaagtggccggctttaacctgctgatgaccctgcggctgtggtccagc

SEQ ID NO: 2465 - DNA, 2688 bp, Artificial Sequence
  Synthetic Polynucloetide
atggccttaccagtgaccgccttgctcctgccgctggccttgctgctccacgccgccaggccggaagtgcagctggttgaatctggcggaggactggttcagcctggcggatctctgagactgtcttgtgccgccagcggcttcagcttcagcgacttttggatgagctgggtccgacaggcccctggcaaaggacttgaatgggtcgccacaatcagccaggccggcagcgagaaggactacgtggactctgtgaagggcagattcaccatcagccgggacaacgccaagaagtccctgtacctccagatgaacagcctgagagccgaggacaccgccgtgtactattgtgcctctggcgtgtacagcttcgactacagaggccagggcaccctggtcacagtctcttctggtaccggcggaggcggatctggcggcggaggtagcggtggcggaggatctgaattccagatcgtgctgtctcagtctcctgccatcctgagcgcttccccaggcgagaaagtgaccatgacctgtagagccagcagcagcgtgtcctacatgcactggtatcagcagaagcccggcagcagccctaagccttggatctacgccaccagcaatctggcctctggcgtgccagccagattttctggctctggcagcggcaccagctacagcttcacaatcagcagagtggaagccgaggacgccgccacctactattgtcagcagtggaccttcaatcctcctaccttcggcggaggcacccggctggaaatcaaaagaacagtggctgctctcgaggacctgaagaacgtgttcccacctgaggtggccgtgttcgagcctagcgaggccgagatcagccacacccagaaagccaccctcgtgtgcctggctaccggcttctaccccgaccatgtggaactgtcttggtgggtcaacggcaaagaggtgcacagcggcgtgtgtaccgacccccagccactgaaagaacagcccgccctgaacgacagccggtactgcctgagcagcagactgagagtgtccgccaccttctggcagaacccccggaaccacttcagatgccaggtgcagttctacggcctgagcgagaacgacgagtggacccaggacagagccaagcccgtgacccagatcgtgtctgccgaagcctggggcagagccgattgcggctttaccagcgagagctaccagcagggcgtgctgagcgccaccatcctgtacgagatcctgctgggcaaggccaccctgtacgccgtgctggtgtctgccctggtgctgatggctatggtcaagcggaaggacagccggggaagggccaagcgatctggatctggagcaacaaacttctcactactcaaacaagcaggtgacgtggaggagaatcccgggcctactagtatggactggatttggcgcatccttttccttgtcggcgctgctaccggcgcgcattccgggccccagctccagctgcaagagtctggacctggcctggtcaagcctagcgagacactgagcctgacctgtaccgtgtccggcgatagcatcagcagcggcgattactactggggctggatcagacagcctcctggcaaaggactggaatggatcggccacatctactacagcggcgtgacctactacaaccccagcctgaagtccagagtgaccatcagcgtggacaccagccggaaccagttctccctgaagctgtctagcgtgacagccgccgataccgccgtgtactactgcaccagagaggacagcagcaactggcggagtagaggccagggaacactggtcacagttagctctggatccggcggaggcggaagtggaggcggaggatctggcggcggaggctctttcgaacaggcttatctgcaacagagcggagccgaactcgtcagacctggcgcttctgtgaagatgagctgcaaggccagcggctacaccttcaccagctataatatgcactgggtcaagcagacccctcggcagggactcgaatggatcggcggaatctatcccggcaacggcgacacctcctacaaccagaagttcaagggcaaagccacactgaccgtgggcaagagcagcagcaccgcctatatgcagctcagcagcctgaccagcgaggacagcgccgtgtacttctgcgccagatacgactacaactacgctatggactactggggccagggcaccagcgtgacagttagctctgccagcacgcgtatccagaaccctgatcctgccgtgtaccagctgcgggatagcaagagcagcgacaagagcgtgtgtctgttcaccgacttcgacagccagaccaacgtgtcccagagcaaggactccgacgtgtacatcaccgataagtgcgtgctggacatgcggagcatggacttcaagagcaactccgccgtggcctggtccaacaagtccgatttcgcctgcgccaacgccttcaacaacagcattatccccgaggacacattcttcccaagccccgagagcagctgcgacgtgaagctggtggaaaagagcttcgagacagacaccaacctgaacttccagaacctgagcgtgatcggcttcagaatcctgctgctgaaagtggccggctttaacctgctgatgaccctgcggctgtggtccagc

SEQ ID NO: 2466 - DNA, 2682 bp, Artificial Sequence
  Synthetic Polynucloetide
atggccttaccagtgaccgccttgctcctgccgctggccttgctgctccacgccgccaggccggaagtgcagctggttgaatctggcggaggactggttcagcctggcggatctctgagactgtcttgtgccgccagcggcttcagcttcagcgacttttggatgagctgggtccgacaggcccctggcaaaggacttgaatgggtcgccacaatcagccaggccggcagcgagaaggactacgtggactctgtgaagggcagattcaccatcagccgggacaacgccaagaagtccctgtacctccagatgaacagcctgagagccgaggacaccgccgtgtactattgtgcctctggcgtgtacagcttcgactacagaggccagggcaccctggtcacagtctcttctggtaccggcggaggcggatctggcggcggaggtagcggtggcggaggatctgaattcgagatcgtgctgacacagagccctgccaccctgtctctgagccctggcgaaagagccaccctgagctgtagagccagccagagcgtgtccagctacctggcctggtatcagcagaagcccggccaggctccccggctgctgatctacgatgccagcaatagagccaccggcatccccgccagattttccggctctggcagcggcaccgacttcaccctgaccatcagctccctggaacccgaggacttcgccgtgtactactgccagcagcggagcaactggcccatcacattcggccagggcacccggctggaaatcaaactcgaggacctgaagaacgtgttcccacctgaggtggccgtgttcgagcctagcgaggccgagatcagccacacccagaaagccaccctcgtgtgcctggctaccggcttctaccccgaccatgtggaactgtcttggtgggtcaacggcaaagaggtgcacagcggcgtgtgtaccgacccccagccactgaaagaacagcccgccctgaacgacagccggtactgcctgagcagcagactgagagtgtccgccaccttctggcagaacccccggaaccacttcagatgccaggtgcagttctacggcctgagcgagaacgacgagtggacccaggacagagccaagcccgtgacccagatcgtgtctgccgaagcctggggcagagccgattgcggctttaccagcgagagctaccagcagggcgtgctgagcgccaccatcctgtacgagatcctgctgggcaaggccaccctgtacgccgtgctggtgtctgccctggtgctgatggctatggtcaagcggaaggacagccggggaagggccaagcgatctggatctggagcaacaaacttctcactactcaaacaagcaggtgacgtggaggagaatcccgggcctactagtatggactggatttggcgcatccttttccttgtcggcgctgctaccggcgcgcattccgggccccagctccagctgcaagagtctggacctggcctggtcaagcctagcgagacactgagcctgacctgtaccgtgtccggcgatagcatcagcagcggcgattactactggggctggatcagacagcctcctggcaaaggactggaatggatcggccacatctactacagcggcgtgacctactacaaccccagcctgaagtccagagtgaccatcagcgtggacaccagccggaaccagttctccctgaagctgtctagcgtgacagccgccgataccgccgtgtactactgcaccagagaggacagcagcaactggcggagtagaggccagggaacactggtcacagttagctctggatccggcggaggcggaagtggaggcggaggatctggcggcggaggctctttcgaagaggtgcagcttgttgagtctggcggaggactggtgcagcccgatagaagcctgagactgtcttgtgccgccagcggcttcaccttccacgattatgccatgcactgggtccgacaggcccctggcaaaggacttgaatgggtgtccaccatctcttggaacagcggcacaatcggctacgccgactctgtgaagggcagattcaccatcagccgggacaacgccaagaacagcctgtacctccagatgaactccctgagagccgaggacacagccctgtactactgcgccaaggacatccagtacggcaactactactacggcatggacgtgtggggccagggcacaacagtgacagtctcttctacgcgtatccagaaccctgatcctgccgtgtaccagctgcgggatagcaagagcagcgacaagagcgtgtgtctgttcaccgacttcgacagccagaccaacgtgtcccagagcaaggactccgacgtgtacatcaccgataagtgcgtgctggacatgcggagcatggacttcaagagcaactccgccgtggcctggtccaacaagtccgatttcgcctgcgccaacgccttcaacaacagcattatccccgaggacacattcttcccaagccccgagagcagctgcgacgtgaagctggtggaaaagagcttcgagacagacaccaacctgaacttccagaacctgagcgtgatcggcttcagaatcctgctgctgaaagtggccggctttaacctgctgatgaccctgcggctgtggtccagc

SEQ ID NO: 2467 - DNA, 2667 bp, Artificial Sequence
  Synthetic Polynucloetide
atggccttaccagtgaccgccttgctcctgccgctggccttgctgctccacgccgccaggccggaagtgcagctggttgaatctggcggaggactggttcagcctggcggatctctgagactgtcttgtgccgccagcggcttcagcttcagcgacttttggatgagctgggtccgacaggcccctggcaaaggacttgaatgggtcgccacaatcagccaggccggcagcgagaaggactacgtggactctgtgaagggcagattcaccatcagccgggacaacgccaagaagtccctgtacctccagatgaacagcctgagagccgaggacaccgccgtgtactattgtgcctctggcgtgtacagcttcgactacagaggccagggcaccctggtcacagtctcttctggtaccggcggaggcggatctggcggcggaggtagcggtggcggaggatctgaattcgacatccagatgacacagagccctagcagcctgtctgccagcgtgggagatagagtgaccatcaactgcaaggccagccaggacatcaacagctacctgagctggttccagcagaagcctggcaaggcccctaagacactgatctaccgggccaacagactggtggatggcgtgccaagcagattttctggcagcggcagcggccaggattacaccctgacaatatccagcctccagcctgaggacttcgccacctactactgcctccagtacgacgagttccctctgacctttggcggaggcaccaaggtggaaatcaaactcgaggacctgaagaacgtgttcccacctgaggtggccgtgttcgagcctagcgaggccgagatcagccacacccagaaagccaccctcgtgtgcctggctaccggcttctaccccgaccatgtggaactgtcttggtgggtcaacggcaaagaggtgcacagcggcgtgtgtaccgacccccagccactgaaagaacagcccgccctgaacgacagccggtactgcctgagcagcagactgagagtgtccgccaccttctggcagaacccccggaaccacttcagatgccaggtgcagttctacggcctgagcgagaacgacgagtggacccaggacagagccaagcccgtgacccagatcgtgtctgccgaagcctggggcagagccgattgcggctttaccagcgagagctaccagcagggcgtgctgagcgccaccatcctgtacgagatcctgctgggcaaggccaccctgtacgccgtgctggtgtctgccctggtgctgatggctatggtcaagcggaaggacagccggggaagggccaagcgatctggatctggagcaacaaacttctcactactcaaacaagcaggtgacgtggaggagaatcccgggcctactagtatggactggatttggcgcatccttttccttgtcggcgctgctaccggcgcgcattccgggccccagctccagctgcaagagtctggacctggcctggtcaagcctagcgagacactgagcctgacctgtaccgtgtccggcgatagcatcagcagcggcgattactactggggctggatcagacagcctcctggcaaaggactggaatggatcggccacatctactacagcggcgtgacctactacaaccccagcctgaagtccagagtgaccatcagcgtggacaccagccggaaccagttctccctgaagctgtctagcgtgacagccgccgataccgccgtgtactactgcaccagagaggacagcagcaactggcggagtagaggccagggaacactggtcacagttagctctggatccggcggaggcggaagtggaggcggaggatctggcggcggaggctctttcgaacaggtgcaactggtgcagtctggggccgaagtgaagaaacctggggcctctgtgaaggtgtcctgcaaagccagcggctacacctttaccaactacgacatcaactgggtccgacaggctccaggccaaggactggaatggatcggctggatctatcctggcgacggcagcaccaagtacaacgagaagttcaaggccaaggccacactgaccgccgataccagcacaagcaccgcctacatggaactgcggagcctgagaagcgacgacaccgccgtgtactattgtgcctccggctacgaggacgctatggactattggggccagggcaccaccgtgacagtgtctagtacgcgtatccagaaccctgatcctgccgtgtaccagctgcgggatagcaagagcagcgacaagagcgtgtgtctgttcaccgacttcgacagccagaccaacgtgtcccagagcaaggactccgacgtgtacatcaccgataagtgcgtgctggacatgcggagcatggacttcaagagcaactccgccgtggcctggtccaacaagtccgatttcgcctgcgccaacgccttcaacaacagcattatccccgaggacacattcttcccaagccccgagagcagctgcgacgtgaagctggtggaaaagagcttcgagacagacaccaacctgaacttccagaacctgagcgtgatcggcttcagaatcctgctgctgaaagtggccggctttaacctgctgatgaccctgcggctgtggtccagc

SEQ ID NO: 2468 - DNA, 2673 bp, Artificial Sequence
  Synthetic Polynucloetide
atggccttaccagtgaccgccttgctcctgccgctggccttgctgctccacgccgccaggccggaagtgcagctggttgaatctggcggaggactggttcagcctggcggatctctgagactgtcttgtgccgccagcggcttcagcttcagcgacttttggatgagctgggtccgacaggcccctggcaaaggacttgaatgggtcgccacaatcagccaggccggcagcgagaaggactacgtggactctgtgaagggcagattcaccatcagccgggacaacgccaagaagtccctgtacctccagatgaacagcctgagagccgaggacaccgccgtgtactattgtgcctctggcgtgtacagcttcgactacagaggccagggcaccctggtcacagtctcttctggtaccggcggaggcggatctggcggcggaggtagcggtggcggaggatctgaattcgacatcgtgatgacccagacacctctgagcctgagcgtgacacctggacagcctgccagcattagctgcaagagcagccagtctctgctggacggcgacggcaagacctacctgaattggctgctccagaagcctggacagagccctcagcggctgatctacctggtgtccaagctggatagcggcgtgcccgatagattttctggcagcggctctggcaccgacttcaccctgaagatcagcagagtggaagccgaggacgtgggcgtgtactactgttggcagggcacacacttccccagaacattcggccagggcacaaagctggaaatcaaactcgaggacctgaagaacgtgttcccacctgaggtggccgtgttcgagcctagcgaggccgagatcagccacacccagaaagccaccctcgtgtgcctggctaccggcttctaccccgaccatgtggaactgtcttggtgggtcaacggcaaagaggtgcacagcggcgtgtgtaccgacccccagccactgaaagaacagcccgccctgaacgacagccggtactgcctgagcagcagactgagagtgtccgccaccttctggcagaacccccggaaccacttcagatgccaggtgcagttctacggcctgagcgagaacgacgagtggacccaggacagagccaagcccgtgacccagatcgtgtctgccgaagcctggggcagagccgattgcggctttaccagcgagagctaccagcagggcgtgctgagcgccaccatcctgtacgagatcctgctgggcaaggccaccctgtacgccgtgctggtgtctgccctggtgctgatggctatggtcaagcggaaggacagccggggaagggccaagcgatctggatctggagcaacaaacttctcactactcaaacaagcaggtgacgtggaggagaatcccgggcctactagtatggactggatttggcgcatccttttccttgtcggcgctgctaccggcgcgcattccgggccccagctccagctgcaagagtctggacctggcctggtcaagcctagcgagacactgagcctgacctgtaccgtgtccggcgatagcatcagcagcggcgattactactggggctggatcagacagcctcctggcaaaggactggaatggatcggccacatctactacagcggcgtgacctactacaaccccagcctgaagtccagagtgaccatcagcgtggacaccagccggaaccagttctccctgaagctgtctagcgtgacagccgccgataccgccgtgtactactgcaccagagaggacagcagcaactggcggagtagaggccagggaacactggtcacagttagctctggatccggcggaggcggaagtggaggcggaggatctggcggcggaggctctttcgaacaagtgcaactggttcagagcggagccgaagtgaagaaacctggggcctctgtgaaggtgtcctgcaaggccagcggctacaccttcaaggacacctacatccactgggtccgacaggcccctggacaaggacttgagtggatgggcagaatcgaccccgccaacggcaacaccaaatacgaccccaagttccagggcagagtgaccatgaccagagacaccagcatcagcaccgcctacatggaactgagccggctgagatccgatgacaccgccgtgtactattgcgctagaagaggcggagtggattggggccagggaacactggttaccgtgtctagtacgcgtatccagaaccctgatcctgccgtgtaccagctgcgggatagcaagagcagcgacaagagcgtgtgtctgttcaccgacttcgacagccagaccaacgtgtcccagagcaaggactccgacgtgtacatcaccgataagtgcgtgctggacatgcggagcatggacttcaagagcaactccgccgtggcctggtccaacaagtccgatttcgcctgcgccaacgccttcaacaacagcattatccccgaggacacattcttcccaagccccgagagcagctgcgacgtgaagctggtggaaaagagcttcgagacagacaccaacctgaacttccagaacctgagcgtgatcggcttcagaatcctgctgctgaaagtggccggctttaacctgctgatgaccctgcggctgtggtccagc

SEQ ID NO: 2469 - DNA, 2676 bp, Artificial Sequence
  Synthetic Polynucloetide
atggccttaccagtgaccgccttgctcctgccgctggccttgctgctccacgccgccaggccggaagtgcagctggttgaatctggcggaggactggttcagcctggcggatctctgagactgtcttgtgccgccagcggcttcagcttcagcgacttttggatgagctgggtccgacaggcccctggcaaaggacttgaatgggtcgccacaatcagccaggccggcagcgagaaggactacgtggactctgtgaagggcagattcaccatcagccgggacaacgccaagaagtccctgtacctccagatgaacagcctgagagccgaggacaccgccgtgtactattgtgcctctggcgtgtacagcttcgactacagaggccagggcaccctggtcacagtctcttctggtaccggcggaggcggatctggcggcggaggtagcggtggcggaggatctgaattcgacatccagatgacacagagccctagcagcctgtctgccagcgtgggagacagagtgaccatcacatgcaaggccagccaggatgtgtctacagccgtggcctggttccagcagaagcctggaaaagcccctaagctgctgatctacagccccagctacagatacaccggcgtgcccagcagattttctggcagcggctctggcaccgacttcaccctgacaatatccagcctccagcctgaggacttcacctactactgccagcagctctacagcaccccttacacattcggccagggcaccaaggtggaaatcaaactcgaggacctgaagaacgtgttcccacctgaggtggccgtgttcgagcctagcgaggccgagatcagccacacccagaaagccaccctcgtgtgcctggctaccggcttctaccccgaccatgtggaactgtcttggtgggtcaacggcaaagaggtgcacagcggcgtgtgtaccgacccccagccactgaaagaacagcccgccctgaacgacagccggtactgcctgagcagcagactgagagtgtccgccaccttctggcagaacccccggaaccacttcagatgccaggtgcagttctacggcctgagcgagaacgacgagtggacccaggacagagccaagcccgtgacccagatcgtgtctgccgaagcctggggcagagccgattgcggctttaccagcgagagctaccagcagggcgtgctgagcgccaccatcctgtacgagatcctgctgggcaaggccaccctgtacgccgtgctggtgtctgccctggtgctgatggctatggtcaagcggaaggacagccggggaagggccaagcgatctggatctggagcaacaaacttctcactactcaaacaagcaggtgacgtggaggagaatcccgggcctactagtatggactggatttggcgcatccttttccttgtcggcgctgctaccggcgcgcattccgggccccagctccagctgcaagagtctggacctggcctggtcaagcctagcgagacactgagcctgacctgtaccgtgtccggcgatagcatcagcagcggcgattactactggggctggatcagacagcctcctggcaaaggactggaatggatcggccacatctactacagcggcgtgacctactacaaccccagcctgaagtccagagtgaccatcagcgtggacaccagccggaaccagttctccctgaagctgtctagcgtgacagccgccgataccgccgtgtactactgcaccagagaggacagcagcaactggcggagtagaggccagggaacactggtcacagttagctctggatccggcggaggcggaagtggaggcggaggatctggcggcggaggctctttcgaagaagtgcaactggttcagagcggagccgaagtgaagaaacctggggcctctgtgaaggtgtcctgcaaagccagcggctacacctttaccgactactacctggacgtggtcgtgcggcaagctcctggacaaggactggaatggatcggcagagtgaacccctacaacggcggcaccatctacaaccagaaattcaagggaagagtgaccctgaccagagacaccagcacctccacagcctacctggaactgagcagcctgagaagcgaagataccgccgtgtactactgcgccagggaccactacagatatgaccctctgctggactactggggccagggaaccctggttacagtgtctagtacgcgtatccagaaccctgatcctgccgtgtaccagctgcgggatagcaagagcagcgacaagagcgtgtgtctgttcaccgacttcgacagccagaccaacgtgtcccagagcaaggactccgacgtgtacatcaccgataagtgcgtgctggacatgcggagcatggacttcaagagcaactccgccgtggcctggtccaacaagtccgatttcgcctgcgccaacgccttcaacaacagcattatccccgaggacacattcttcccaagccccgagagcagctgcgacgtgaagctggtggaaaagagcttcgagacagacaccaacctgaacttccagaacctgagcgtgatcggcttcagaatcctgctgctgaaagtggccggctttaacctgctgatgaccctgcggctgtggtccagc

SEQ ID NO: 2470 - DNA, 2694 bp, Artificial Sequence
  Synthetic Polynucloetide
atggccttaccagtgaccgccttgctcctgccgctggccttgctgctccacgccgccaggccggaagtgcagctggttgaatctggcggaggactggttcagcctggcggatctctgagactgtcttgtgccgccagcggcttcagcttcagcgacttttggatgagctgggtccgacaggcccctggcaaaggacttgaatgggtcgccacaatcagccaggccggcagcgagaaggactacgtggactctgtgaagggcagattcaccatcagccgggacaacgccaagaagtccctgtacctccagatgaacagcctgagagccgaggacaccgccgtgtactattgtgcctctggcgtgtacagcttcgactacagaggccagggcaccctggtcacagtctcttctggtaccggcggaggcggatctggcggcggaggtagcggtggcggaggatctgaattcgacatccagatgacacagagccctagcagcctgtctgccagcgtgggagacagagtgaccatcacctgtagagccagccagagcgtgtccaccagcagctacaactacatgcactggtatcagcagaagcccggcaagcctcctaagctgctgattaagtacgccagcaacctggaaagcggcgtgcccagcagattttctggcagcggctctggcaccgacttcaccctgacaatatccagcctccagcctgaggacttcgccacctactactgtcagcactcctgggagatccctctgacattcggccagggcaccaaggtggaaatcaaactcgaggacctgaagaacgtgttcccacctgaggtggccgtgttcgagcctagcgaggccgagatcagccacacccagaaagccaccctcgtgtgcctggctaccggcttctaccccgaccatgtggaactgtcttggtgggtcaacggcaaagaggtgcacagcggcgtgtgtaccgacccccagccactgaaagaacagcccgccctgaacgacagccggtactgcctgagcagcagactgagagtgtccgccaccttctggcagaacccccggaaccacttcagatgccaggtgcagttctacggcctgagcgagaacgacgagtggacccaggacagagccaagcccgtgacccagatcgtgtctgccgaagcctggggcagagccgattgcggctttaccagcgagagctaccagcagggcgtgctgagcgccaccatcctgtacgagatcctgctgggcaaggccaccctgtacgccgtgctggtgtctgccctggtgctgatggctatggtcaagcggaaggacagccggggaagggccaagcgatctggatctggagcaacaaacttctcactactcaaacaagcaggtgacgtggaggagaatcccgggcctactagtatggactggatttggcgcatccttttccttgtcggcgctgctaccggcgcgcattccgggccccagctccagctgcaagagtctggacctggcctggtcaagcctagcgagacactgagcctgacctgtaccgtgtccggcgatagcatcagcagcggcgattactactggggctggatcagacagcctcctggcaaaggactggaatggatcggccacatctactacagcggcgtgacctactacaaccccagcctgaagtccagagtgaccatcagcgtggacaccagccggaaccagttctccctgaagctgtctagcgtgacagccgccgataccgccgtgtactactgcaccagagaggacagcagcaactggcggagtagaggccagggaacactggtcacagttagctctggatccggcggaggcggaagtggaggcggaggatctggcggcggaggctctttcgaagaagtgcaactggttcagagcggagccgaagtgaagaaacctggggcctctgtgaaggtgtcctgcaaggccagcggctacagcttcaccgactattatatgcactgggtccgacaggctccaggccagggacttgagtggatcggcagaatcaacccctacaacggcgctgccttctacagccagaacttcaaggatagagtgaccctgaccgtggacaccagcaccagcacagcctacctggaactgagcagcctgagaagcgaggacaccgccgtgtactactgcgccattgagagaggcgctgacctggaaggctacgctatggattattggggccagggaaccctggtcaccgtgtcatctacgcgtatccagaaccctgatcctgccgtgtaccagctgcgggatagcaagagcagcgacaagagcgtgtgtctgttcaccgacttcgacagccagaccaacgtgtcccagagcaaggactccgacgtgtacatcaccgataagtgcgtgctggacatgcggagcatggacttcaagagcaactccgccgtggcctggtccaacaagtccgatttcgcctgcgccaacgccttcaacaacagcattatccccgaggacacattcttcccaagccccgagagcagctgcgacgtgaagctggtggaaaagagcttcgagacagacaccaacctgaacttccagaacctgagcgtgatcggcttcagaatcctgctgctgaaagtggccggctttaacctgctgatgaccctgcggctgtggtccagc

SEQ ID NO: 2471 - DNA, 2688 bp, Artificial Sequence
  Synthetic Polynucloetide
atggccttaccagtgaccgccttgctcctgccgctggccttgctgctccacgccgccaggccggaagtgcagctggttgaatctggcggaggactggttcagcctggcggatctctgagactgtcttgtgccgccagcggcttcagcttcagcgacttttggatgagctgggtccgacaggcccctggcaaaggacttgaatgggtcgccacaatcagccaggccggcagcgagaaggactacgtggactctgtgaagggcagattcaccatcagccgggacaacgccaagaagtccctgtacctccagatgaacagcctgagagccgaggacaccgccgtgtactattgtgcctctggcgtgtacagcttcgactacagaggccagggcaccctggtcacagtctcttctggtaccggcggaggcggatctggcggcggaggtagcggtggcggaggatctgaattcgagatcgtgctgacacagtctccagccacactgagcgcttctccaggcgagagagtgaccctgacctgtagagccagcagcaacgtgatctccagctacgtgcactggtatcagcagaagcctggcagcagccccagactgtttctgtacagcaccagcaatctggcctccggcgtgccaagcagattttctggctctggcagcggcaccgacttcacctttaccatctctagcctggaagccgaggacgccgccacctactactgtcagcagtacagcggctaccctctgaccttcggccagggcacaagactggaaatcaaactcgaggacctgaagaacgtgttcccacctgaggtggccgtgttcgagcctagcgaggccgagatcagccacacccagaaagccaccctcgtgtgcctggctaccggcttctaccccgaccatgtggaactgtcttggtgggtcaacggcaaagaggtgcacagcggcgtgtgtaccgacccccagccactgaaagaacagcccgccctgaacgacagccggtactgcctgagcagcagactgagagtgtccgccaccttctggcagaacccccggaaccacttcagatgccaggtgcagttctacggcctgagcgagaacgacgagtggacccaggacagagccaagcccgtgacccagatcgtgtctgccgaagcctggggcagagccgattgcggctttaccagcgagagctaccagcagggcgtgctgagcgccaccatcctgtacgagatcctgctgggcaaggccaccctgtacgccgtgctggtgtctgccctggtgctgatggctatggtcaagcggaaggacagccggggaagggccaagcgatctggatctggagcaacaaacttctcactactcaaacaagcaggtgacgtggaggagaatcccgggcctactagtatggactggatttggcgcatccttttccttgtcggcgctgctaccggcgcgcattccgggccccagctccagctgcaagagtctggacctggcctggtcaagcctagcgagacactgagcctgacctgtaccgtgtccggcgatagcatcagcagcggcgattactactggggctggatcagacagcctcctggcaaaggactggaatggatcggccacatctactacagcggcgtgacctactacaaccccagcctgaagtccagagtgaccatcagcgtggacaccagccggaaccagttctccctgaagctgtctagcgtgacagccgccgataccgccgtgtactactgcaccagagaggacagcagcaactggcggagtagaggccagggaacactggtcacagttagctctggatccggcggaggcggaagtggaggcggaggatctggcggcggaggctctttcgaacaagttcagctgcaagagtctggccctggcctggtcaagcctagcgaaacactgagcctgacctgcgccgtgtctggctactctatcaccagcgcctactattggaactggatcagacagcctcctggcaaaggactggaatggatcggctacatcagctacgacggcagaaacaactacaaccccagcctgaagaaccggatcaccatcaatcccgacaccagcaagaaccagttcagcctccagctgaacagcgtgacccctgaggataccgccgtgtactactgtgccagagaaggcgactacgacgtgggcaactactacgctatggactactggggccagggaaccctggtcacagtctcttctacgcgtatccagaaccctgatcctgccgtgtaccagctgcgggatagcaagagcagcgacaagagcgtgtgtctgttcaccgacttcgacagccagaccaacgtgtcccagagcaaggactccgacgtgtacatcaccgataagtgcgtgctggacatgcggagcatggacttcaagagcaactccgccgtggcctggtccaacaagtccgatttcgcctgcgccaacgccttcaacaacagcattatccccgaggacacattcttcccaagccccgagagcagctgcgacgtgaagctggtggaaaagagcttcgagacagacaccaacctgaacttccagaacctgagcgtgatcggcttcagaatcctgctgctgaaagtggccggctttaacctgctgatgaccctgcggctgtggtccagc

SEQ ID NO: 2472 - DNA, 2688 bp, Artificial Sequence
  Synthetic Polynucloetide
atggccttaccagtgaccgccttgctcctgccgctggccttgctgctccacgccgccaggccggaagtgcagctggttgaatctggcggaggactggttcagcctggcggatctctgagactgtcttgtgccgccagcggcttcagcttcagcgacttttggatgagctgggtccgacaggcccctggcaaaggacttgaatgggtcgccacaatcagccaggccggcagcgagaaggactacgtggactctgtgaagggcagattcaccatcagccgggacaacgccaagaagtccctgtacctccagatgaacagcctgagagccgaggacaccgccgtgtactattgtgcctctggcgtgtacagcttcgactacagaggccagggcaccctggtcacagtctcttctggtaccggcggaggcggatctggcggcggaggtagcggtggcggaggatctgaattcgagatcgtgctgacacagtctcccgccacactgtcactgtctccaggcgaaagagccacactgagctgtagagccagcagcaacgtgatctccagctacgtgcactggtatcagcagaagcctggacaggcccctcggctgctgatctacagcacaagcaatctggcctctggcatccccgccagattttctggctctggaagcggcaccgacttcaccctgaccataagcagcctggaacctgaggacttcgccgtgtactactgccagcagtatagcggctaccctctgaccttcggccagggcacaagactggaaatcaaactcgaggacctgaagaacgtgttcccacctgaggtggccgtgttcgagcctagcgaggccgagatcagccacacccagaaagccaccctcgtgtgcctggctaccggcttctaccccgaccatgtggaactgtcttggtgggtcaacggcaaagaggtgcacagcggcgtgtgtaccgacccccagccactgaaagaacagcccgccctgaacgacagccggtactgcctgagcagcagactgagagtgtccgccaccttctggcagaacccccggaaccacttcagatgccaggtgcagttctacggcctgagcgagaacgacgagtggacccaggacagagccaagcccgtgacccagatcgtgtctgccgaagcctggggcagagccgattgcggctttaccagcgagagctaccagcagggcgtgctgagcgccaccatcctgtacgagatcctgctgggcaaggccaccctgtacgccgtgctggtgtctgccctggtgctgatggctatggtcaagcggaaggacagccggggaagggccaagcgatctggatctggagcaacaaacttctcactactcaaacaagcaggtgacgtggaggagaatcccgggcctactagtatggactggatttggcgcatccttttccttgtcggcgctgctaccggcgcgcattccgggccccagctccagctgcaagagtctggacctggcctggtcaagcctagcgagacactgagcctgacctgtaccgtgtccggcgatagcatcagcagcggcgattactactggggctggatcagacagcctcctggcaaaggactggaatggatcggccacatctactacagcggcgtgacctactacaaccccagcctgaagtccagagtgaccatcagcgtggacaccagccggaaccagttctccctgaagctgtctagcgtgacagccgccgataccgccgtgtactactgcaccagagaggacagcagcaactggcggagtagaggccagggaacactggtcacagttagctctggatccggcggaggcggaagtggaggcggaggatctggcggcggaggctctttcgaagaagtgcaactggtggaaagtggcggcggactggtgcaacctggaagaagcctgagactgtcctgtgccgccagcggctactctatcacaagcgcctactactggaactgggtccgacaggctcctggcaaaggactggaatgggtgtcctacatcagctacgacggcagaaacaactacaaccccagcctgaagaaccgcttcaccatcagccgggacaacgccaagaagtccctgtacctccagatgaacagcctgagagccgaggacacagccctgtactattgcgccaaagagggcgactacgacgtcggcaactactacgctatggactactggggccagggaaccaccgtgactgtctcttctacgcgtatccagaaccctgatcctgccgtgtaccagctgcgggatagcaagagcagcgacaagagcgtgtgtctgttcaccgacttcgacagccagaccaacgtgtcccagagcaaggactccgacgtgtacatcaccgataagtgcgtgctggacatgcggagcatggacttcaagagcaactccgccgtggcctggtccaacaagtccgatttcgcctgcgccaacgccttcaacaacagcattatccccgaggacacattcttcccaagccccgagagcagctgcgacgtgaagctggtggaaaagagcttcgagacagacaccaacctgaacttccagaacctgagcgtgatcggcttcagaatcctgctgctgaaagtggccggctttaacctgctgatgaccctgcggctgtggtccagc

SEQ ID NO: 2473 - DNA, 2685 bp, Artificial Sequence
  Synthetic Polynucloetide
atggccttaccagtgaccgccttgctcctgccgctggccttgctgctccacgccgccaggccggaagtgcagctggttgaatctggcggaggactggttcagcctggcggatctctgagactgtcttgtgccgccagcggcttcagcttcagcgacttttggatgagctgggtccgacaggcccctggcaaaggacttgaatgggtcgccacaatcagccaggccggcagcgagaaggactacgtggactctgtgaagggcagattcaccatcagccgggacaacgccaagaagtccctgtacctccagatgaacagcctgagagccgaggacaccgccgtgtactattgtgcctctggcgtgtacagcttcgactacagaggccagggcaccctggtcacagtctcttctggtaccggcggaggcggatctggcggcggaggtagcggtggcggaggatctgaattcgacgtggtcatgacacagaccccactgagcctgcctgtgtctctgggagatcaggccagcatctcctgtagaagcagccagagcctggtgcacagcaacggcaacacctacctgcggtggtatctccagaagcctggacagagccccaaggtgctgatctacaaggtgtccaacagagtgtccggcgtgcccgatagattttctggcagcggctctggcaccgacttcaccctgaagatcaatagagtggaagccgaggacctgggcgtgtacttctgtagccagagcacccatgtgccttggacctttggcggaggcaccaagctggaaatcaagctcgaggacctgaagaacgtgttcccacctgaggtggccgtgttcgagcctagcgaggccgagatcagccacacccagaaagccaccctcgtgtgcctggctaccggcttctaccccgaccatgtggaactgtcttggtgggtcaacggcaaagaggtgcacagcggcgtgtgtaccgacccccagccactgaaagaacagcccgccctgaacgacagccggtactgcctgagcagcagactgagagtgtccgccaccttctggcagaacccccggaaccacttcagatgccaggtgcagttctacggcctgagcgagaacgacgagtggacccaggacagagccaagcccgtgacccagatcgtgtctgccgaagcctggggcagagccgattgcggctttaccagcgagagctaccagcagggcgtgctgagcgccaccatcctgtacgagatcctgctgggcaaggccaccctgtacgccgtgctggtgtctgccctggtgctgatggctatggtcaagcggaaggacagccggggaagggccaagcgatctggatctggagcaacaaacttctcactactcaaacaagcaggtgacgtggaggagaatcccgggcctactagtatggactggatttggcgcatccttttccttgtcggcgctgctaccggcgcgcattccgggccccagctccagctgcaagagtctggacctggcctggtcaagcctagcgagacactgagcctgacctgtaccgtgtccggcgatagcatcagcagcggcgattactactggggctggatcagacagcctcctggcaaaggactggaatggatcggccacatctactacagcggcgtgacctactacaaccccagcctgaagtccagagtgaccatcagcgtggacaccagccggaaccagttctccctgaagctgtctagcgtgacagccgccgataccgccgtgtactactgcaccagagaggacagcagcaactggcggagtagaggccagggaacactggtcacagttagctctggatccggcggaggcggaagtggaggcggaggatctggcggcggaggctctttcgaaggcgtgaagctggacgagacaggcggaggacttgttcaacctggcggagccatgaagctgagctgtgtgaccagcggctttaccttcggccactactggatgaactgggtccgacagtcccctgagaaaggactggaatgggtcgcccagttcagaaacaagccctacaactacgaaacctactacagcgacagcgtgaagggcagattcaccatcagccgggacgacagcaagtccagcgtgtacctccagatgaacaacctgcgcgtggaagataccggcatctactactgtaccggggccagctacggcatggaatatctcggccagggcaccagcgtgaccgtgtctacaacgcgtatccagaaccctgatcctgccgtgtaccagctgcgggatagcaagagcagcgacaagagcgtgtgtctgttcaccgacttcgacagccagaccaacgtgtcccagagcaaggactccgacgtgtacatcaccgataagtgcgtgctggacatgcggagcatggacttcaagagcaactccgccgtggcctggtccaacaagtccgatttcgcctgcgccaacgccttcaacaacagcattatccccgaggacacattcttcccaagccccgagagcagctgcgacgtgaagctggtggaaaagagcttcgagacagacaccaacctgaacttccagaacctgagcgtgatcggcttcagaatcctgctgctgaaagtggccggctttaacctgctgatgaccctgcggctgtggtccagc

SEQ ID NO: 2474 - DNA, 2703 bp, Artificial Sequence
  Synthetic Polynucloetide
atggccttaccagtgaccgccttgctcctgccgctggccttgctgctccacgccgccaggccggaagtgcagctggttgaatctggcggaggactggttcagcctggcggatctctgagactgtcttgtgccgccagcggcttcagcttcagcgacttttggatgagctgggtccgacaggcccctggcaaaggacttgaatgggtcgccacaatcagccaggccggcagcgagaaggactacgtggactctgtgaagggcagattcaccatcagccgggacaacgccaagaagtccctgtacctccagatgaacagcctgagagccgaggacaccgccgtgtactattgtgcctctggcgtgtacagcttcgactacagaggccagggcaccctggtcacagtctcttctggtaccggcggaggcggatctggcggcggaggtagcggtggcggaggatctgaattccaggtgcaactggtggaatctggcggcaatctggttcagcctggcggctctctgagactgtcttgtgccgccagcggcttcaccttcggcagcttttctatgagctgggtccgacaagctcctggcggaggacttgaatgggtggcaggactgtctgccagaagcagcctgacacactacgccgactctgtgaagggcagattcaccatcagccgggacaacgccaagaacagcgtgtacctccagatgaacagcctgagagtggaagataccgccgtgtactactgcgccagaagaagctacgacagcagcggctactggggccacttctacagctacatggatgtgtggggccagggcaccctggttacagtttctctcgaggacctgaagaacgtgttcccacctgaggtggccgtgttcgagcctagcgaggccgagatcagccacacccagaaagccaccctcgtgtgcctggctaccggcttctaccccgaccatgtggaactgtcttggtgggtcaacggcaaagaggtgcacagcggcgtgtgtaccgacccccagccactgaaagaacagcccgccctgaacgacagccggtactgcctgagcagcagactgagagtgtccgccaccttctggcagaacccccggaaccacttcagatgccaggtgcagttctacggcctgagcgagaacgacgagtggacccaggacagagccaagcccgtgacccagatcgtgtctgccgaagcctggggcagagccgattgcggctttaccagcgagagctaccagcagggcgtgctgagcgccaccatcctgtacgagatcctgctgggcaaggccaccctgtacgccgtgctggtgtctgccctggtgctgatggctatggtcaagcggaaggacagccggggaagggccaagcgatctggatctggagcaacaaacttctcactactcaaacaagcaggtgacgtggaggagaatcccgggcctactagtatggactggatttggcgcatccttttccttgtcggcgctgctaccggcgcgcattccgggccccagctccagctgcaagagtctggacctggcctggtcaagcctagcgagacactgagcctgacctgtaccgtgtccggcgatagcatcagcagcggcgattactactggggctggatcagacagcctcctggcaaaggactggaatggatcggccacatctactacagcggcgtgacctactacaaccccagcctgaagtccagagtgaccatcagcgtggacaccagccggaaccagttctccctgaagctgtctagcgtgacagccgccgataccgccgtgtactactgcaccagagaggacagcagcaactggcggagtagaggccagggaacactggtcacagttagctctggatccggcggaggcggaagtggaggcggaggatctggcggcggaggctctttcgaatctgtgctgacccagcctagctccgtgtctgctgctcctggacagaaagtgaccatctcctgtagcggcagcaccagcaacatcggcaacaactacgtgtcctggtatcagcagcaccccggcaaggcccctaagctgatgatctacgacgtgtccaagaggcccagcggcgtgccagatagattttccggcagcaagagcggcaacagcgccagcctggatattagcggactccagtctgaggacgaggccgactactattgcgccgcctgggatgatagcctgagcgagtttctgtttggcaccggcaccaagctgacagtgcttggaacgcgtatccagaaccctgatcctgccgtgtaccagctgcgggatagcaagagcagcgacaagagcgtgtgtctgttcaccgacttcgacagccagaccaacgtgtcccagagcaaggactccgacgtgtacatcaccgataagtgcgtgctggacatgcggagcatggacttcaagagcaactccgccgtggcctggtccaacaagtccgatttcgcctgcgccaacgccttcaacaacagcattatccccgaggacacattcttcccaagccccgagagcagctgcgacgtgaagctggtggaaaagagcttcgagacagacaccaacctgaacttccagaacctgagcgtgatcggcttcagaatcctgctgctgaaagtggccggctttaacctgctgatgaccctgcggctgtggtccagc

SEQ ID NO: 2475 - DNA, 2688 bp, Artificial Sequence
  Synthetic Polynucloetide
atggccttaccagtgaccgccttgctcctgccgctggccttgctgctccacgccgccaggccggaagtgcagctggttgaatctggcggaggactggttcagcctggcggatctctgagactgtcttgtgccgccagcggcttcagcttcagcgacttttggatgagctgggtccgacaggcccctggcaaaggacttgaatgggtcgccacaatcagccaggccggcagcgagaaggactacgtggactctgtgaagggcagattcaccatcagccgggacaacgccaagaagtccctgtacctccagatgaacagcctgagagccgaggacaccgccgtgtactattgtgcctctggcgtgtacagcttcgactacagaggccagggcaccctggtcacagtctcttctggtaccggcggaggcggatctggcggcggaggtagcggtggcggaggatctgaattcgacgtggtcatgacacagagcccttctagcctgtctgccagcgtgggcgacagagtgacaatcacctgtcagagcagcctggacatcagccactacctgaactggtatcagcagaagcccggcaaggcccctaagctgctgatctacgacgccagcaatctggaaaccggcgtgcccagcagattttctggcagcggaagcggcacccacttcaccttcacaatatccagcctccagcctgaggacttcgccacctactactgccagcagtacgacaacctgcctctgacctttggcggaggcaccaagctggaaatcaagagactcgaggacctgaagaacgtgttcccacctgaggtggccgtgttcgagcctagcgaggccgagatcagccacacccagaaagccaccctcgtgtgcctggctaccggcttctaccccgaccatgtggaactgtcttggtgggtcaacggcaaagaggtgcacagcggcgtgtgtaccgacccccagccactgaaagaacagcccgccctgaacgacagccggtactgcctgagcagcagactgagagtgtccgccaccttctggcagaacccccggaaccacttcagatgccaggtgcagttctacggcctgagcgagaacgacgagtggacccaggacagagccaagcccgtgacccagatcgtgtctgccgaagcctggggcagagccgattgcggctttaccagcgagagctaccagcagggcgtgctgagcgccaccatcctgtacgagatcctgctgggcaaggccaccctgtacgccgtgctggtgtctgccctggtgctgatggctatggtcaagcggaaggacagccggggaagggccaagcgatctggatctggagcaacaaacttctcactactcaaacaagcaggtgacgtggaggagaatcccgggcctactagtatggactggatttggcgcatccttttccttgtcggcgctgctaccggcgcgcattccgggccccagctccagctgcaagagtctggacctggcctggtcaagcctagcgagacactgagcctgacctgtaccgtgtccggcgatagcatcagcagcggcgattactactggggctggatcagacagcctcctggcaaaggactggaatggatcggccacatctactacagcggcgtgacctactacaaccccagcctgaagtccagagtgaccatcagcgtggacaccagccggaaccagttctccctgaagctgtctagcgtgacagccgccgataccgccgtgtactactgcaccagagaggacagcagcaactggcggagtagaggccagggaacactggtcacagttagctctggatccggcggaggcggaagtggaggcggaggatctggcggcggaggctctttcgaacaagttcaactggttcaatcaggcggaggcgtggtgcaacctggtggctctctgagagtgtcttgtgctgcctctggcgtgaccctgagcgactatggaatgcactgggtccgacaggcccctggcaaaggacttgagtgggtcgccttcatcagaaacgacggcagcgacaagtattacgccgacagcgtgaagggcagattcaccatcagccgggacaacagcgagaaaaccgtgtctctccagatgtctagcctgagagccgaggacaccgccgtgtactactgtgccaagaatggcgagagcggccctctggactactggtatctggatctgtggggcagaggcaccctggtcacagtctcttctacgcgtatccagaaccctgatcctgccgtgtaccagctgcgggatagcaagagcagcgacaagagcgtgtgtctgttcaccgacttcgacagccagaccaacgtgtcccagagcaaggactccgacgtgtacatcaccgataagtgcgtgctggacatgcggagcatggacttcaagagcaactccgccgtggcctggtccaacaagtccgatttcgcctgcgccaacgccttcaacaacagcattatccccgaggacacattcttcccaagccccgagagcagctgcgacgtgaagctggtggaaaagagcttcgagacagacaccaacctgaacttccagaacctgagcgtgatcggcttcagaatcctgctgctgaaagtggccggctttaacctgctgatgaccctgcggctgtggtccagc

SEQ ID NO: 2476 - DNA, 2700 bp, Artificial Sequence
  Synthetic Polynucloetide
atggccttaccagtgaccgccttgctcctgccgctggccttgctgctccacgccgccaggccggaagtgcagctggttgaatctggcggaggactggttcagcctggcggatctctgagactgtcttgtgccgccagcggcttcagcttcagcgacttttggatgagctgggtccgacaggcccctggcaaaggacttgaatgggtcgccacaatcagccaggccggcagcgagaaggactacgtggactctgtgaagggcagattcaccatcagccgggacaacgccaagaagtccctgtacctccagatgaacagcctgagagccgaggacaccgccgtgtactattgtgcctctggcgtgtacagcttcgactacagaggccagggcaccctggtcacagtctcttctggtaccggcggaggcggatctggcggcggaggtagcggtggcggaggatctgaattcagctacgagctgacacagcctccatccgtgtctggcacacctggacagagagtggctatctcctgtagcggcagcagcagcaacatcggcaccagaatggtcacctggtatcagcacgtgccaggcacagcccctaagctgctgatcttcaacaacaaccagcggcctagcggcgtgcccgatagattttctgccagcaagagcggcacaagcgccagcctggctatcatcggactccagtctgacgacgaggccgactactactgtgccacctgggacgacaacgtgaagtcctacgtgttcggcaccggcaccaaagtgacagtgcttggaagtagactcgaggacctgaagaacgtgttcccacctgaggtggccgtgttcgagcctagcgaggccgagatcagccacacccagaaagccaccctcgtgtgcctggctaccggcttctaccccgaccatgtggaactgtcttggtgggtcaacggcaaagaggtgcacagcggcgtgtgtaccgacccccagccactgaaagaacagcccgccctgaacgacagccggtactgcctgagcagcagactgagagtgtccgccaccttctggcagaacccccggaaccacttcagatgccaggtgcagttctacggcctgagcgagaacgacgagtggacccaggacagagccaagcccgtgacccagatcgtgtctgccgaagcctggggcagagccgattgcggctttaccagcgagagctaccagcagggcgtgctgagcgccaccatcctgtacgagatcctgctgggcaaggccaccctgtacgccgtgctggtgtctgccctggtgctgatggctatggtcaagcggaaggacagccggggaagggccaagcgatctggatctggagcaacaaacttctcactactcaaacaagcaggtgacgtggaggagaatcccgggcctactagtatggactggatttggcgcatccttttccttgtcggcgctgctaccggcgcgcattccgggccccagctccagctgcaagagtctggacctggcctggtcaagcctagcgagacactgagcctgacctgtaccgtgtccggcgatagcatcagcagcggcgattactactggggctggatcagacagcctcctggcaaaggactggaatggatcggccacatctactacagcggcgtgacctactacaaccccagcctgaagtccagagtgaccatcagcgtggacaccagccggaaccagttctccctgaagctgtctagcgtgacagccgccgataccgccgtgtactactgcaccagagaggacagcagcaactggcggagtagaggccagggaacactggtcacagttagctctggatccggcggaggcggaagtggaggcggaggatctggcggcggaggctctttcgaacttgaaatggcccaggttcagctccagcagtggggagctggactgctgaagcctagcgagacactgagcctgacctgtgctgtgtacggcggcagcttcagcggctactactggtcctggatcagacagcctcctggcaaaggactggaatggatcggcgagatcaaccacagcggctccaccaactacaaccccagcctgaagtccagagtgaccatcagcgtggacaccagcaagaaccagttctccctgaagctgagcagcgtgacagccgctgataccgccgtgtactattgcgctagagcccctcagtcttggtacgtgggagatgtgtggggccagggcacactggttacagtgtcatctacgcgtatccagaaccctgatcctgccgtgtaccagctgcgggatagcaagagcagcgacaagagcgtgtgtctgttcaccgacttcgacagccagaccaacgtgtcccagagcaaggactccgacgtgtacatcaccgataagtgcgtgctggacatgcggagcatggacttcaagagcaactccgccgtggcctggtccaacaagtccgatttcgcctgcgccaacgccttcaacaacagcattatccccgaggacacattcttcccaagccccgagagcagctgcgacgtgaagctggtggaaaagagcttcgagacagacaccaacctgaacttccagaacctgagcgtgatcggcttcagaatcctgctgctgaaagtggccggctttaacctgctgatgaccctgcggctgtggtccagc

SEQ ID NO: 2477 - DNA, 2691 bp, Artificial Sequence
  Synthetic Polynucloetide
atggccttaccagtgaccgccttgctcctgccgctggccttgctgctccacgccgccaggccggaagtgcagctggttgaatctggcggaggactggttcagcctggcggatctctgagactgtcttgtgccgccagcggcttcagcttcagcgacttttggatgagctgggtccgacaggcccctggcaaaggacttgaatgggtcgccacaatcagccaggccggcagcgagaaggactacgtggactctgtgaagggcagattcaccatcagccgggacaacgccaagaagtccctgtacctccagatgaacagcctgagagccgaggacaccgccgtgtactattgtgcctctggcgtgtacagcttcgactacagaggccagggcaccctggtcacagtctcttctggtaccggcggaggcggatctggcggcggaggtagcggtggcggaggatctgaattccagtctgtgctgacacagcctcctagcctgtctgtggcccctggaaagacagccagcatcacatgcggcggcaacaacatcggcatgaagtccgtgcactggtatcagcagaggccaggacaggctcctgtgctggtcatctactacgacagcgacagaccctctggcatccccggcagattttccggcagcaactctggcaataccgccacactgaccatctccagagtggaagctggcgacgaggccgactactactgccaagtgtgggataccaccggcgatcaccctggctatgtgtttggcaccggcaccaaagtgacagtgcttctcgaggacctgaagaacgtgttcccacctgaggtggccgtgttcgagcctagcgaggccgagatcagccacacccagaaagccaccctcgtgtgcctggctaccggcttctaccccgaccatgtggaactgtcttggtgggtcaacggcaaagaggtgcacagcggcgtgtgtaccgacccccagccactgaaagaacagcccgccctgaacgacagccggtactgcctgagcagcagactgagagtgtccgccaccttctggcagaacccccggaaccacttcagatgccaggtgcagttctacggcctgagcgagaacgacgagtggacccaggacagagccaagcccgtgacccagatcgtgtctgccgaagcctggggcagagccgattgcggctttaccagcgagagctaccagcagggcgtgctgagcgccaccatcctgtacgagatcctgctgggcaaggccaccctgtacgccgtgctggtgtctgccctggtgctgatggctatggtcaagcggaaggacagccggggaagggccaagcgatctggatctggagcaacaaacttctcactactcaaacaagcaggtgacgtggaggagaatcccgggcctactagtatggactggatttggcgcatccttttccttgtcggcgctgctaccggcgcgcattccgggccccagctccagctgcaagagtctggacctggcctggtcaagcctagcgagacactgagcctgacctgtaccgtgtccggcgatagcatcagcagcggcgattactactggggctggatcagacagcctcctggcaaaggactggaatggatcggccacatctactacagcggcgtgacctactacaaccccagcctgaagtccagagtgaccatcagcgtggacaccagccggaaccagttctccctgaagctgtctagcgtgacagccgccgataccgccgtgtactactgcaccagagaggacagcagcaactggcggagtagaggccagggaacactggtcacagttagctctggatccggcggaggcggaagtggaggcggaggatctggcggcggaggctctttcgaacaagttcaactggttcagagcggagccgaagtgaagaaacctggcagcagcgtgaaggtgtcctgcaaagcaagcggcggcacctttagcagctacgccatctcttgggtccgacaggcacctggacaaggactggaatggatgggcggcatcatccccatcttcggcacagccaattacgcccagaaattccagggcagagtgaccatcaccgccgacgagtctacaagcaccgcctacatggaactgagcagcctgagaagcgaggacaccgccgtgtactattgtgccagaggcgtgtacggctacagcggctctgccccttatgatgagtggggccagggaaccctggtcaccgtttcttctacgcgtatccagaaccctgatcctgccgtgtaccagctgcgggatagcaagagcagcgacaagagcgtgtgtctgttcaccgacttcgacagccagaccaacgtgtcccagagcaaggactccgacgtgtacatcaccgataagtgcgtgctggacatgcggagcatggacttcaagagcaactccgccgtggcctggtccaacaagtccgatttcgcctgcgccaacgccttcaacaacagcattatccccgaggacacattcttcccaagccccgagagcagctgcgacgtgaagctggtggaaaagagcttcgagacagacaccaacctgaacttccagaacctgagcgtgatcggcttcagaatcctgctgctgaaagtggccggctttaacctgctgatgaccctgcggctgtggtccagc

SEQ ID NO: 2478 - DNA, 2685 bp, Artificial Sequence
  Synthetic Polynucloetide
atggccttaccagtgaccgccttgctcctgccgctggccttgctgctccacgccgccaggccggaagtgcagctggttgaatctggcggaggactggttcagcctggcggatctctgagactgtcttgtgccgccagcggcttcagcttcagcgacttttggatgagctgggtccgacaggcccctggcaaaggacttgaatgggtcgccacaatcagccaggccggcagcgagaaggactacgtggactctgtgaagggcagattcaccatcagccgggacaacgccaagaagtccctgtacctccagatgaacagcctgagagccgaggacaccgccgtgtactattgtgcctctggcgtgtacagcttcgactacagaggccagggcaccctggtcacagtctcttctggtaccggcggaggcggatctggcggcggaggtagcggtggcggaggatctgaattcgaggtgcaactggttgagtctggcggaggactggtgcagcctggaagaagcctgagactgtcttgtgccgccagcggcttcaccttcgacgattatgccatgcactgggtccgacaggcccctggcaaaggacttgaatgggtgtccggcatctcctggaacagcggctctatcggctacgccgattccgtgaagggcagattcaccatcagccgggacaacgccaagaacagcctgtacctccagatgaactccctgagagccgaggacacagccctgtactactgcgccaaagacaaaggcggaggctactacgacttttggagcggcagcgattattggggccagggcacactggtcacagtgtctagcctcgaggacctgaagaacgtgttcccacctgaggtggccgtgttcgagcctagcgaggccgagatcagccacacccagaaagccaccctcgtgtgcctggctaccggcttctaccccgaccatgtggaactgtcttggtgggtcaacggcaaagaggtgcacagcggcgtgtgtaccgacccccagccactgaaagaacagcccgccctgaacgacagccggtactgcctgagcagcagactgagagtgtccgccaccttctggcagaacccccggaaccacttcagatgccaggtgcagttctacggcctgagcgagaacgacgagtggacccaggacagagccaagcccgtgacccagatcgtgtctgccgaagcctggggcagagccgattgcggctttaccagcgagagctaccagcagggcgtgctgagcgccaccatcctgtacgagatcctgctgggcaaggccaccctgtacgccgtgctggtgtctgccctggtgctgatggctatggtcaagcggaaggacagccggggaagggccaagcgatctggatctggagcaacaaacttctcactactcaaacaagcaggtgacgtggaggagaatcccgggcctactagtatggactggatttggcgcatccttttccttgtcggcgctgctaccggcgcgcattccgggccccagctccagctgcaagagtctggacctggcctggtcaagcctagcgagacactgagcctgacctgtaccgtgtccggcgatagcatcagcagcggcgattactactggggctggatcagacagcctcctggcaaaggactggaatggatcggccacatctactacagcggcgtgacctactacaaccccagcctgaagtccagagtgaccatcagcgtggacaccagccggaaccagttctccctgaagctgtctagcgtgacagccgccgataccgccgtgtactactgcaccagagaggacagcagcaactggcggagtagaggccagggaacactggtcacagttagctctggatccggcggaggcggaagtggaggcggaggatctggcggcggaggctctttcgaatcttctgagctgacacaggaccctgccgtgtctgttgctctgggccagacagtgcggattacctgtcagggcgatagcctgagaagctactacgcctcctggtatcagcagaagccaggccaggctcctgtgctggtcatctacggcaagaacaacagacccagcggcatccccgatagattcagcggaagcagctctggcaataccgccagcctgacaattactggcgctcaggccgaggacgaggccgactactactgcaacagcagagatagcagcggctgggttttcggcggaggcacaaaactgacagtgctgacgcgtatccagaaccctgatcctgccgtgtaccagctgcgggatagcaagagcagcgacaagagcgtgtgtctgttcaccgacttcgacagccagaccaacgtgtcccagagcaaggactccgacgtgtacatcaccgataagtgcgtgctggacatgcggagcatggacttcaagagcaactccgccgtggcctggtccaacaagtccgatttcgcctgcgccaacgccttcaacaacagcattatccccgaggacacattcttcccaagccccgagagcagctgcgacgtgaagctggtggaaaagagcttcgagacagacaccaacctgaacttccagaacctgagcgtgatcggcttcagaatcctgctgctgaaagtggccggctttaacctgctgatgaccctgcggctgtggtccagc

SEQ ID NO: 2479 - DNA, 2712 bp, Artificial Sequence
  Synthetic Polynucloetide
atggccttaccagtgaccgccttgctcctgccgctggccttgctgctccacgccgccaggccggaagtgcagctggttgaatctggcggaggactggttcagcctggcggatctctgagactgtcttgtgccgccagcggcttcagcttcagcgacttttggatgagctgggtccgacaggcccctggcaaaggacttgaatgggtcgccacaatcagccaggccggcagcgagaaggactacgtggactctgtgaagggcagattcaccatcagccgggacaacgccaagaagtccctgtacctccagatgaacagcctgagagccgaggacaccgccgtgtactattgtgcctctggcgtgtacagcttcgactacagaggccagggcaccctggtcacagtctcttctggtaccggcggaggcggatctggcggcggaggtagcggtggcggaggatctgaattcgaagtgcagctccagcagtctggacctggcctggttaagcctagccagacactgagcctgacctgtgccatcagcggcgatagcgtgctgagcaacagcgacacctggaactggatcagacagagccctagcagaggactggaatggctgggcagaacctaccacagaagcacttggtacgacgactacgccagctctgtgcggggcagagtgtccatcaatgtggacaccagcaagaaccagtacagcctgcaactgaacgccgtgacacctgaggataccggcgtgtactactgcgccagagacagactccaggacggcaactcttggagcgacgcctttgatgtgtggggccagggcacaatggtcaccgtttctagcctcgaggacctgaagaacgtgttcccacctgaggtggccgtgttcgagcctagcgaggccgagatcagccacacccagaaagccaccctcgtgtgcctggctaccggcttctaccccgaccatgtggaactgtcttggtgggtcaacggcaaagaggtgcacagcggcgtgtgtaccgacccccagccactgaaagaacagcccgccctgaacgacagccggtactgcctgagcagcagactgagagtgtccgccaccttctggcagaacccccggaaccacttcagatgccaggtgcagttctacggcctgagcgagaacgacgagtggacccaggacagagccaagcccgtgacccagatcgtgtctgccgaagcctggggcagagccgattgcggctttaccagcgagagctaccagcagggcgtgctgagcgccaccatcctgtacgagatcctgctgggcaaggccaccctgtacgccgtgctggtgtctgccctggtgctgatggctatggtcaagcggaaggacagccggggaagggccaagcgatctggatctggagcaacaaacttctcactactcaaacaagcaggtgacgtggaggagaatcccgggcctactagtatggactggatttggcgcatccttttccttgtcggcgctgctaccggcgcgcattccgggccccagctccagctgcaagagtctggacctggcctggtcaagcctagcgagacactgagcctgacctgtaccgtgtccggcgatagcatcagcagcggcgattactactggggctggatcagacagcctcctggcaaaggactggaatggatcggccacatctactacagcggcgtgacctactacaaccccagcctgaagtccagagtgaccatcagcgtggacaccagccggaaccagttctccctgaagctgtctagcgtgacagccgccgataccgccgtgtactactgcaccagagaggacagcagcaactggcggagtagaggccagggaacactggtcacagttagctctggatccggcggaggcggaagtggaggcggaggatctggcggcggaggctctttcgaacaatctgctctgacacagcctgccagcgtgtcaggatctcctggacagagcatcaccatctcttgcaccggcaccagctctgatgtcggcggctacaattacgtgtcctggtatcagcagcaccccggcaaggcccctaagctgatgatctacgacgtgtccaacagacccagcggcgtgtccaatagattctccggcagcaagagcggcaacaccgccagcctgacaatttctggactgcaagccgaggacgaggccgactactactgtagcagctacaccagcagcagcacactggtgtacgtgttcggcacaggcaccaaagtgaccgtgcttacgcgtatccagaaccctgatcctgccgtgtaccagctgcgggatagcaagagcagcgacaagagcgtgtgtctgttcaccgacttcgacagccagaccaacgtgtcccagagcaaggactccgacgtgtacatcaccgataagtgcgtgctggacatgcggagcatggacttcaagagcaactccgccgtggcctggtccaacaagtccgatttcgcctgcgccaacgccttcaacaacagcattatccccgaggacacattcttcccaagccccgagagcagctgcgacgtgaagctggtggaaaagagcttcgagacagacaccaacctgaacttccagaacctgagcgtgatcggcttcagaatcctgctgctgaaagtggccggctttaacctgctgatgaccctgcggctgtggtccagc

SEQ ID NO: 2480 - DNA, 2646 bp, Artificial Sequence
  Synthetic Polynucloetide
atggccttaccagtgaccgccttgctcctgccgctggccttgctgctccacgccgccaggccggaagtgcagctggttgaatctggcggaggactggttcagcctggcggatctctgagactgtcttgtgccgccagcggcttcagcttcagcgacttttggatgagctgggtccgacaggcccctggcaaaggacttgaatgggtcgccacaatcagccaggccggcagcgagaaggactacgtggactctgtgaagggcagattcaccatcagccgggacaacgccaagaagtccctgtacctccagatgaacagcctgagagccgaggacaccgccgtgtactattgtgcctctggcgtgtacagcttcgactacagaggccagggcaccctggtcacagtctcttctggtaccggcggaggcggatctggcggcggaggtagcggtggcggaggatctgaattccaggtgcaactggttcagtctggggccgaagtgaagaaacctggggcctctgtgaaggtgtcctgcaaggcttccggctacacctttaccagctacgacatcaactgggtccgacaggccacaggccaaggactggaatggatgggctggatgaaccccaacagcggcaataccggctacgcccagaaattccagggcagagtgaccatgaccagaaacaccagcatcagcaccgcctacatggaactgagcagcctgagaagcgaggacaccgccgtgtactattgcgccagaggcgacagcaccaaggtggaaatcaaactcgaggacctgaagaacgtgttcccacctgaggtggccgtgttcgagcctagcgaggccgagatcagccacacccagaaagccaccctcgtgtgcctggctaccggcttctaccccgaccatgtggaactgtcttggtgggtcaacggcaaagaggtgcacagcggcgtgtgtaccgacccccagccactgaaagaacagcccgccctgaacgacagccggtactgcctgagcagcagactgagagtgtccgccaccttctggcagaacccccggaaccacttcagatgccaggtgcagttctacggcctgagcgagaacgacgagtggacccaggacagagccaagcccgtgacccagatcgtgtctgccgaagcctggggcagagccgattgcggctttaccagcgagagctaccagcagggcgtgctgagcgccaccatcctgtacgagatcctgctgggcaaggccaccctgtacgccgtgctggtgtctgccctggtgctgatggctatggtcaagcggaaggacagccggggaagggccaagcgatctggatctggagcaacaaacttctcactactcaaacaagcaggtgacgtggaggagaatcccgggcctactagtatggactggatttggcgcatccttttccttgtcggcgctgctaccggcgcgcattccgggccccagctccagctgcaagagtctggacctggcctggtcaagcctagcgagacactgagcctgacctgtaccgtgtccggcgatagcatcagcagcggcgattactactggggctggatcagacagcctcctggcaaaggactggaatggatcggccacatctactacagcggcgtgacctactacaaccccagcctgaagtccagagtgaccatcagcgtggacaccagccggaaccagttctccctgaagctgtctagcgtgacagccgccgataccgccgtgtactactgcaccagagaggacagcagcaactggcggagtagaggccagggaacactggtcacagttagctctggatccggcggaggcggaagtggaggcggaggatctggcggcggaggctctttcgaacaatctgtgctgacccagcctagatccgtgtctggctctcctggacagagcgtgaccatctcttgtaccggcaccagctctgatgtcggcggctacaattacgtgtcctggtatcagcagcaccccggcgaagcccctaagctgattatctacgacgccgacaagcggcccagcggcatcagcaatagattcagctctggcaagagcggcaacaccgccagcctgacaatcagcggactccaggtggaagatgaggccgactactactgctgctcctatgccggcggaagcacctgggttttcggaggcggtacaaaagtgaccgtgctgacgcgtatccagaaccctgatcctgccgtgtaccagctgcgggatagcaagagcagcgacaagagcgtgtgtctgttcaccgacttcgacagccagaccaacgtgtcccagagcaaggactccgacgtgtacatcaccgataagtgcgtgctggacatgcggagcatggacttcaagagcaactccgccgtggcctggtccaacaagtccgatttcgcctgcgccaacgccttcaacaacagcattatccccgaggacacattcttcccaagccccgagagcagctgcgacgtgaagctggtggaaaagagcttcgagacagacaccaacctgaacttccagaacctgagcgtgatcggcttcagaatcctgctgctgaaagtggccggctttaacctgctgatgaccctgcggctgtggtccagc

SEQ ID NO: 2481 - DNA, 2712 bp, Artificial Sequence
  Synthetic Polynucloetide
atggccttaccagtgaccgccttgctcctgccgctggccttgctgctccacgccgccaggccggaagtgcagctggttgaatctggcggaggactggttcagcctggcggatctctgagactgtcttgtgccgccagcggcttcagcttcagcgacttttggatgagctgggtccgacaggcccctggcaaaggacttgaatgggtcgccacaatcagccaggccggcagcgagaaggactacgtggactctgtgaagggcagattcaccatcagccgggacaacgccaagaagtccctgtacctccagatgaacagcctgagagccgaggacaccgccgtgtactattgtgcctctggcgtgtacagcttcgactacagaggccagggcaccctggtcacagtctcttctggtaccggcggaggcggatctggcggcggaggtagcggtggcggaggatctgaattcgaagtgcagctccagcagtctggacctggcctggttaagcctagccagacactgagcctgacctgtgccatcagcggcgatagcgtgtcctctaatagcgccgcctggaactggatcagacagagccctagcagaggactggaatggctgggcagaacctactaccgcagcaagtggtacagcgactacgccgtgtccgtgaagtcccggatcaccatcaatcccgacaccagcaagaaccagttcagcctgcaactgaacagcgtgacccctgaggataccgccgtgtactactgcgccagagatccctacgacttttggagcggctaccccgacgcctttgacatctggggacagggcacaatggtcaccgtttctagcctcgaggacctgaagaacgtgttcccacctgaggtggccgtgttcgagcctagcgaggccgagatcagccacacccagaaagccaccctcgtgtgcctggctaccggcttctaccccgaccatgtggaactgtcttggtgggtcaacggcaaagaggtgcacagcggcgtgtgtaccgacccccagccactgaaagaacagcccgccctgaacgacagccggtactgcctgagcagcagactgagagtgtccgccaccttctggcagaacccccggaaccacttcagatgccaggtgcagttctacggcctgagcgagaacgacgagtggacccaggacagagccaagcccgtgacccagatcgtgtctgccgaagcctggggcagagccgattgcggctttaccagcgagagctaccagcagggcgtgctgagcgccaccatcctgtacgagatcctgctgggcaaggccaccctgtacgccgtgctggtgtctgccctggtgctgatggctatggtcaagcggaaggacagccggggaagggccaagcgatctggatctggagcaacaaacttctcactactcaaacaagcaggtgacgtggaggagaatcccgggcctactagtatggactggatttggcgcatccttttccttgtcggcgctgctaccggcgcgcattccgggccccagctccagctgcaagagtctggacctggcctggtcaagcctagcgagacactgagcctgacctgtaccgtgtccggcgatagcatcagcagcggcgattactactggggctggatcagacagcctcctggcaaaggactggaatggatcggccacatctactacagcggcgtgacctactacaaccccagcctgaagtccagagtgaccatcagcgtggacaccagccggaaccagttctccctgaagctgtctagcgtgacagccgccgataccgccgtgtactactgcaccagagaggacagcagcaactggcggagtagaggccagggaacactggtcacagttagctctggatccggcggaggcggaagtggaggcggaggatctggcggcggaggctctttcgaacaatctgctctgacacagcctgccagcgtgtcaggatctcctggacagagcatcaccatctcttgcaccggcaccagctctgatgtcggcggctacaattacgtgtcctggtatcagcagcaccccggcaaggcccctaaagtgattatcagcgaagtgaacaacagacccagcggcgtgtcccacagattcagcggctctaagtctggcaacaccgccagcctgacaatctctggactgcaagccgaggacgaggccgactacttctgtagcagctacaccagcggcagaaccctgtacgtgttcggcacaggcagcaaagtgacagtgctgggaacgcgtatccagaaccctgatcctgccgtgtaccagctgcgggatagcaagagcagcgacaagagcgtgtgtctgttcaccgacttcgacagccagaccaacgtgtcccagagcaaggactccgacgtgtacatcaccgataagtgcgtgctggacatgcggagcatggacttcaagagcaactccgccgtggcctggtccaacaagtccgatttcgcctgcgccaacgccttcaacaacagcattatccccgaggacacattcttcccaagccccgagagcagctgcgacgtgaagctggtggaaaagagcttcgagacagacaccaacctgaacttccagaacctgagcgtgatcggcttcagaatcctgctgctgaaagtggccggctttaacctgctgatgaccctgcggctgtggtccagc

SEQ ID NO: 2482 - DNA, 2709 bp, Artificial Sequence
  Synthetic Polynucloetide
atggccttaccagtgaccgccttgctcctgccgctggccttgctgctccacgccgccaggccggaagtgcagctggttgaatctggcggaggactggttcagcctggcggatctctgagactgtcttgtgccgccagcggcttcagcttcagcgacttttggatgagctgggtccgacaggcccctggcaaaggacttgaatgggtcgccacaatcagccaggccggcagcgagaaggactacgtggactctgtgaagggcagattcaccatcagccgggacaacgccaagaagtccctgtacctccagatgaacagcctgagagccgaggacaccgccgtgtactattgtgcctctggcgtgtacagcttcgactacagaggccagggcaccctggtcacagtctcttctggtaccggcggaggcggatctggcggcggaggtagcggtggcggaggatctgaattccaatctgctctgacacagcctgccagcgcctctggatctcctggacagagcgtgaccatctcctgtaccggcacctcttctgatgtcggcggctacaactacgtgtcctggtatcagcagcaccccggcaaggcccctaagctgatgatctacgacgtgtccaacagacccagcggcgtgtccaatagattctccggcagcaagagcggcaacaccgccagcctgacaatttctggactgcaagccgaggacgaggccgactactactgtagcagctacaccagcagcagcacactgtacgtgttcggcacaggcacccagctcacagttcttctcgaggacctgaagaacgtgttcccacctgaggtggccgtgttcgagcctagcgaggccgagatcagccacacccagaaagccaccctcgtgtgcctggctaccggcttctaccccgaccatgtggaactgtcttggtgggtcaacggcaaagaggtgcacagcggcgtgtgtaccgacccccagccactgaaagaacagcccgccctgaacgacagccggtactgcctgagcagcagactgagagtgtccgccaccttctggcagaacccccggaaccacttcagatgccaggtgcagttctacggcctgagcgagaacgacgagtggacccaggacagagccaagcccgtgacccagatcgtgtctgccgaagcctggggcagagccgattgcggctttaccagcgagagctaccagcagggcgtgctgagcgccaccatcctgtacgagatcctgctgggcaaggccaccctgtacgccgtgctggtgtctgccctggtgctgatggctatggtcaagcggaaggacagccggggaagggccaagcgatctggatctggagcaacaaacttctcactactcaaacaagcaggtgacgtggaggagaatcccgggcctactagtatggactggatttggcgcatccttttccttgtcggcgctgctaccggcgcgcattccgggccccagctccagctgcaagagtctggacctggcctggtcaagcctagcgagacactgagcctgacctgtaccgtgtccggcgatagcatcagcagcggcgattactactggggctggatcagacagcctcctggcaaaggactggaatggatcggccacatctactacagcggcgtgacctactacaaccccagcctgaagtccagagtgaccatcagcgtggacaccagccggaaccagttctccctgaagctgtctagcgtgacagccgccgataccgccgtgtactactgcaccagagaggacagcagcaactggcggagtagaggccagggaacactggtcacagttagctctggatccggcggaggcggaagtggaggcggaggatctggcggcggaggctctttcgaagaagtgcagctccagcagtctggacctggcctggttaagcctagccagacactgagcctgacctgtgccatcagcggcgattccatgctgagcaacagcgacacctggaactggatcagacagagccccagcagaggcctggaatggctgggcagaacataccacagaagcacttggtacgacgactacgccagctctgtgcggggcagagtgtccatcaatgtggacaccagcaagaaccagtacagcctgcaactgaacgccgtgacacctgaggataccggcgtgtactactgtgccagagtgcggctccaggacggcaattcttggagcgacgcctttgatgtgtggggccagggcacaatggtcaccgtttctagcacgcgtatccagaaccctgatcctgccgtgtaccagctgcgggatagcaagagcagcgacaagagcgtgtgtctgttcaccgacttcgacagccagaccaacgtgtcccagagcaaggactccgacgtgtacatcaccgataagtgcgtgctggacatgcggagcatggacttcaagagcaactccgccgtggcctggtccaacaagtccgatttcgcctgcgccaacgccttcaacaacagcattatccccgaggacacattcttcccaagccccgagagcagctgcgacgtgaagctggtggaaaagagcttcgagacagacaccaacctgaacttccagaacctgagcgtgatcggcttcagaatcctgctgctgaaagtggccggctttaacctgctgatgaccctgcggctgtggtccagc

SEQ ID NO: 2483 - DNA, 2709 bp, Artificial Sequence
  Synthetic Polynucloetide
atggccttaccagtgaccgccttgctcctgccgctggccttgctgctccacgccgccaggccggaagtgcagctggttgaatctggcggaggactggttcagcctggcggatctctgagactgtcttgtgccgccagcggcttcagcttcagcgacttttggatgagctgggtccgacaggcccctggcaaaggacttgaatgggtcgccacaatcagccaggccggcagcgagaaggactacgtggactctgtgaagggcagattcaccatcagccgggacaacgccaagaagtccctgtacctccagatgaacagcctgagagccgaggacaccgccgtgtactattgtgcctctggcgtgtacagcttcgactacagaggccagggcaccctggtcacagtctcttctggtaccggcggaggcggatctggcggcggaggtagcggtggcggaggatctgaattcgacgtgatgctgacccagacaccactgagcctgcctgtgtctctgggcgatcaggccagcatctcctgtagaagcagccagagcatcctgcacagcaccggcgatacctacctggaatggtatctccagaagcctggacagagccccaagctgctgattaacaaggtgtccaaccggctgagcggcgtgcccgatagattttctggcagcggctctggcaccgacttcaccctgaagatcagcagagtggaagccgaggacctgggcgtgtactactgcttccaaggcagccatgttccttggacctttggcggaggcaccaagctggaaatcaagagagctgacgccgctcctaccgtgtccatctttcctctcgaggacctgaagaacgtgttcccacctgaggtggccgtgttcgagcctagcgaggccgagatcagccacacccagaaagccaccctcgtgtgcctggctaccggcttctaccccgaccatgtggaactgtcttggtgggtcaacggcaaagaggtgcacagcggcgtgtgtaccgacccccagccactgaaagaacagcccgccctgaacgacagccggtactgcctgagcagcagactgagagtgtccgccaccttctggcagaacccccggaaccacttcagatgccaggtgcagttctacggcctgagcgagaacgacgagtggacccaggacagagccaagcccgtgacccagatcgtgtctgccgaagcctggggcagagccgattgcggctttaccagcgagagctaccagcagggcgtgctgagcgccaccatcctgtacgagatcctgctgggcaaggccaccctgtacgccgtgctggtgtctgccctggtgctgatggctatggtcaagcggaaggacagccggggaagggccaagcgatctggatctggagcaacaaacttctcactactcaaacaagcaggtgacgtggaggagaatcccgggcctactagtatggactggatttggcgcatccttttccttgtcggcgctgctaccggcgcgcattccgggccccagctccagctgcaagagtctggacctggcctggtcaagcctagcgagacactgagcctgacctgtaccgtgtccggcgatagcatcagcagcggcgattactactggggctggatcagacagcctcctggcaaaggactggaatggatcggccacatctactacagcggcgtgacctactacaaccccagcctgaagtccagagtgaccatcagcgtggacaccagccggaaccagttctccctgaagctgtctagcgtgacagccgccgataccgccgtgtactactgcaccagagaggacagcagcaactggcggagtagaggccagggaacactggtcacagttagctctggatccggcggaggcggaagtggaggcggaggatctggcggcggaggctctttcgaacaagtgaagctccagcagagcggccctagccttgtgaaacctggcgcttccgtgaagatgagctgcaaggccagcggctacaccttcaccgatttctacatgaaatgggtcaagcagagccacggcaagtctctggaatggatcggcgacatcaaccccaacatcggagacaccttctacaaccagaagttcaagggcaaagccacactgaccgtggacaagagcagcagcaccgcctacatgcagctcaacagcctgaccagcgaggacagcgccgtgtacttttgttccgtgggctacttcgacgtgtggggagccggaacaaccgtgacagtctcttctacgcgtatccagaaccctgatcctgccgtgtaccagctgcgggatagcaagagcagcgacaagagcgtgtgtctgttcaccgacttcgacagccagaccaacgtgtcccagagcaaggactccgacgtgtacatcaccgataagtgcgtgctggacatgcggagcatggacttcaagagcaactccgccgtggcctggtccaacaagtccgatttcgcctgcgccaacgccttcaacaacagcattatccccgaggacacattcttcccaagccccgagagcagctgcgacgtgaagctggtggaaaagagcttcgagacagacaccaacctgaacttccagaacctgagcgtgatcggcttcagaatcctgctgctgaaagtggccggctttaacctgctgatgaccctgcggctgtggtccagc

SEQ ID NO: 2484 - DNA, 2697 bp, Artificial Sequence
  Synthetic Polynucloetide
atggccttaccagtgaccgccttgctcctgccgctggccttgctgctccacgccgccaggccggaagtgcagctggttgaatctggcggaggactggttcagcctggcggatctctgagactgtcttgtgccgccagcggcttcagcttcagcgacttttggatgagctgggtccgacaggcccctggcaaaggacttgaatgggtcgccacaatcagccaggccggcagcgagaaggactacgtggactctgtgaagggcagattcaccatcagccgggacaacgccaagaagtccctgtacctccagatgaacagcctgagagccgaggacaccgccgtgtactattgtgcctctggcgtgtacagcttcgactacagaggccagggcaccctggtcacagtctcttctggtaccggcggaggcggatctggcggcggaggtagcggtggcggaggatctgaattcgagatcgtgctgacacagtctcccgccacactgtcactgtctccaggcgaaagagccacactgagctgtagagccagccagagcgtgtccatctacctggcctggtatcagcagaagcctggacaggctccccggctgctgatctacgatgccagcaatagagccacaggcatccccgccagattttctggctctggcagcggcaccgatttcaccctgaccataagcagcctggaacctgaggacttcgccgtgtactactgccagcagagaagcaactggcctcctttcacattcggccctggcaccaaggtggacatcaaactcgaggacctgaagaacgtgttcccacctgaggtggccgtgttcgagcctagcgaggccgagatcagccacacccagaaagccaccctcgtgtgcctggctaccggcttctaccccgaccatgtggaactgtcttggtgggtcaacggcaaagaggtgcacagcggcgtgtgtaccgacccccagccactgaaagaacagcccgccctgaacgacagccggtactgcctgagcagcagactgagagtgtccgccaccttctggcagaacccccggaaccacttcagatgccaggtgcagttctacggcctgagcgagaacgacgagtggacccaggacagagccaagcccgtgacccagatcgtgtctgccgaagcctggggcagagccgattgcggctttaccagcgagagctaccagcagggcgtgctgagcgccaccatcctgtacgagatcctgctgggcaaggccaccctgtacgccgtgctggtgtctgccctggtgctgatggctatggtcaagcggaaggacagccggggaagggccaagcgatctggatctggagcaacaaacttctcactactcaaacaagcaggtgacgtggaggagaatcccgggcctactagtatggactggatttggcgcatccttttccttgtcggcgctgctaccggcgcgcattccgggccccagctccagctgcaagagtctggacctggcctggtcaagcctagcgagacactgagcctgacctgtaccgtgtccggcgatagcatcagcagcggcgattactactggggctggatcagacagcctcctggcaaaggactggaatggatcggccacatctactacagcggcgtgacctactacaaccccagcctgaagtccagagtgaccatcagcgtggacaccagccggaaccagttctccctgaagctgtctagcgtgacagccgccgataccgccgtgtactactgcaccagagaggacagcagcaactggcggagtagaggccagggaacactggtcacagttagctctggatccggcggaggcggaagtggaggcggaggatctggcggcggaggctctttcgaacaggtgcagcttgttgaaagcggaggcggagttgtgcagcctggcagaagtctgagactgtcttgtgccgccagcggcttcaccttcagcagctatggaatgcactgggtccgacaggcccctggcaaaggacttgaatgggttgccgtgatctgggacgacggcagcaacaagtattacgtggacagcgtgaagggcagattcaccatcagccgggacaacagcaagaacaccctgtacctccagatgaacagcctgagagccgaggacacagccgtgtattattgcgccagagatgactactacggcagcggctccttcaacagctactatggcacagacgtgtggggccagggcacaacagttaccgttagctctacgcgtatccagaaccctgatcctgccgtgtaccagctgcgggatagcaagagcagcgacaagagcgtgtgtctgttcaccgacttcgacagccagaccaacgtgtcccagagcaaggactccgacgtgtacatcaccgataagtgcgtgctggacatgcggagcatggacttcaagagcaactccgccgtggcctggtccaacaagtccgatttcgcctgcgccaacgccttcaacaacagcattatccccgaggacacattcttcccaagccccgagagcagctgcgacgtgaagctggtggaaaagagcttcgagacagacaccaacctgaacttccagaacctgagcgtgatcggcttcagaatcctgctgctgaaagtggccggctttaacctgctgatgaccctgcggctgtggtccagc

SEQ ID NO: 2485 - DNA, 2652 bp, Artificial Sequence
  Synthetic Polynucloetide
atggccttaccagtgaccgccttgctcctgccgctggccttgctgctccacgccgccaggccggaagtgcagctggttgaatctggcggaggactggttcagcctggcggatctctgagactgtcttgtgccgccagcggcttcagcttcagcgacttttggatgagctgggtccgacaggcccctggcaaaggacttgaatgggtcgccacaatcagccaggccggcagcgagaaggactacgtggactctgtgaagggcagattcaccatcagccgggacaacgccaagaagtccctgtacctccagatgaacagcctgagagccgaggacaccgccgtgtactattgtgcctctggcgtgtacagcttcgactacagaggccagggcaccctggtcacagtctcttctggtaccggcggaggcggatctggcggcggaggtagcggtggcggaggatctgaattcgacatccagatgacacagagccctagcagcctgtctgccagcgtgggagacagagtgaccatcacctgtagagccagccagggcatctcttcttggctggcctggtatcagcagaagcccgagaaggcccctaagagcctgatctatgccgccagctctctccagagcggagtgcctagcagattttctggcagcggctccggcaccgatttcaccctgacaatatccagcctccagcctgaggacttcgccacctactactgccagcagtacaacagctacccctacaccttcggccagggcaccaagctggaaatcaaactcgaggacctgaagaacgtgttcccacctgaggtggccgtgttcgagcctagcgaggccgagatcagccacacccagaaagccaccctcgtgtgcctggctaccggcttctaccccgaccatgtggaactgtcttggtgggtcaacggcaaagaggtgcacagcggcgtgtgtaccgacccccagccactgaaagaacagcccgccctgaacgacagccggtactgcctgagcagcagactgagagtgtccgccaccttctggcagaacccccggaaccacttcagatgccaggtgcagttctacggcctgagcgagaacgacgagtggacccaggacagagccaagcccgtgacccagatcgtgtctgccgaagcctggggcagagccgattgcggctttaccagcgagagctaccagcagggcgtgctgagcgccaccatcctgtacgagatcctgctgggcaaggccaccctgtacgccgtgctggtgtctgccctggtgctgatggctatggtcaagcggaaggacagccggggaagggccaagcgatctggatctggagcaacaaacttctcactactcaaacaagcaggtgacgtggaggagaatcccgggcctactagtatggactggatttggcgcatccttttccttgtcggcgctgctaccggcgcgcattccgggccccagctccagctgcaagagtctggacctggcctggtcaagcctagcgagacactgagcctgacctgtaccgtgtccggcgatagcatcagcagcggcgattactactggggctggatcagacagcctcctggcaaaggactggaatggatcggccacatctactacagcggcgtgacctactacaaccccagcctgaagtccagagtgaccatcagcgtggacaccagccggaaccagttctccctgaagctgtctagcgtgacagccgccgataccgccgtgtactactgcaccagagaggacagcagcaactggcggagtagaggccagggaacactggtcacagttagctctggatccggcggaggcggaagtggaggcggaggatctggcggcggaggctctttcgaagaagtgcaactggttcaatctggcggcggactggttcatccaggcggttctctgagactgagctgtgccggctctggcttcaccttcagcacctacctgatgtactgggtccgacaggcccctggcaagacactggaatgggtgtccgctattggcagcggaggcgatacctactacgccgactctgtgaagggcagattcaccatcagccgggacaacgccaagaacagcctgtacctccagatgaactccctgagagccgaggacatggccgtgtactactgtgccagaggactcggctattggggccagggaacactggtcacagtgtcctctacgcgtatccagaaccctgatcctgccgtgtaccagctgcgggatagcaagagcagcgacaagagcgtgtgtctgttcaccgacttcgacagccagaccaacgtgtcccagagcaaggactccgacgtgtacatcaccgataagtgcgtgctggacatgcggagcatggacttcaagagcaactccgccgtggcctggtccaacaagtccgatttcgcctgcgccaacgccttcaacaacagcattatccccgaggacacattcttcccaagccccgagagcagctgcgacgtgaagctggtggaaaagagcttcgagacagacaccaacctgaacttccagaacctgagcgtgatcggcttcagaatcctgctgctgaaagtggccggctttaacctgctgatgaccctgcggctgtggtccagc

SEQ ID NO: 2486 - DNA, 2709 bp, Artificial Sequence
  Synthetic Polynucloetide
atggccttaccagtgaccgccttgctcctgccgctggccttgctgctccacgccgccaggccggaagtgcagctggttgaatctggcggaggactggttcagcctggcggatctctgagactgtcttgtgccgccagcggcttcagcttcagcgacttttggatgagctgggtccgacaggcccctggcaaaggacttgaatgggtcgccacaatcagccaggccggcagcgagaaggactacgtggactctgtgaagggcagattcaccatcagccgggacaacgccaagaagtccctgtacctccagatgaacagcctgagagccgaggacaccgccgtgtactattgtgcctctggcgtgtacagcttcgactacagaggccagggcaccctggtcacagtctcttctggtaccggcggaggcggatctggcggcggaggtagcggtggcggaggatctgaattcctgcctgttctgacacagcctccatccgtgtctgtggcccctggaaagaccgccagaatcacatgcggcggcaacaacatcggcagcaagagcgtgcactggtatcagcagaagcctggacaggctcctgtgctggtggtgtacgacgacagcgatagacctagcggcatccccgagagattcagcggcagcaattccggcaataccgccacactgaccatcagcagagtggaagctggcgacgaggccgactactactgccaagtgtgggacagcagcagcgactacgtggtgtttggcggcggaacaaagctgacagtgcttctcgaggacctgaagaacgtgttcccacctgaggtggccgtgttcgagcctagcgaggccgagatcagccacacccagaaagccaccctcgtgtgcctggctaccggcttctaccccgaccatgtggaactgtcttggtgggtcaacggcaaagaggtgcacagcggcgtgtgtaccgacccccagccactgaaagaacagcccgccctgaacgacagccggtactgcctgagcagcagactgagagtgtccgccaccttctggcagaacccccggaaccacttcagatgccaggtgcagttctacggcctgagcgagaacgacgagtggacccaggacagagccaagcccgtgacccagatcgtgtctgccgaagcctggggcagagccgattgcggctttaccagcgagagctaccagcagggcgtgctgagcgccaccatcctgtacgagatcctgctgggcaaggccaccctgtacgccgtgctggtgtctgccctggtgctgatggctatggtcaagcggaaggacagccggggaagggccaagcgatctggatctggagcaacaaacttctcactactcaaacaagcaggtgacgtggaggagaatcccgggcctactagtatggactggatttggcgcatccttttccttgtcggcgctgctaccggcgcgcattccgggccccagctccagctgcaagagtctggacctggcctggtcaagcctagcgagacactgagcctgacctgtaccgtgtccggcgatagcatcagcagcggcgattactactggggctggatcagacagcctcctggcaaaggactggaatggatcggccacatctactacagcggcgtgacctactacaaccccagcctgaagtccagagtgaccatcagcgtggacaccagccggaaccagttctccctgaagctgtctagcgtgacagccgccgataccgccgtgtactactgcaccagagaggacagcagcaactggcggagtagaggccagggaacactggtcacagttagctctggatccggcggaggcggaagtggaggcggaggatctggcggcggaggctctttcgaagaagttcaactggtgcagagcggagccgaagtgaagaagccaggcgagagcctgaagattagctgcaaaggcagcggctacagcttcaccagctactggatcggctgggtccgacagatgcctggcaaaggactggaatggatgggcatcatctaccccggcgacagcgacaccagatacagccctagctttcagggccaagtgaccatctccgccgacaagagcatcagcacagcctacctccagtggtcctctctgaaggccagcgataccgccatgtactactgcgccagacaagtctggggatggcaaggcggcatgtaccccaggtctaactggtggtacaacctggactcttggggccagggcacactggtcacagtctcttctacgcgtatccagaaccctgatcctgccgtgtaccagctgcgggatagcaagagcagcgacaagagcgtgtgtctgttcaccgacttcgacagccagaccaacgtgtcccagagcaaggactccgacgtgtacatcaccgataagtgcgtgctggacatgcggagcatggacttcaagagcaactccgccgtggcctggtccaacaagtccgatttcgcctgcgccaacgccttcaacaacagcattatccccgaggacacattcttcccaagccccgagagcagctgcgacgtgaagctggtggaaaagagcttcgagacagacaccaacctgaacttccagaacctgagcgtgatcggcttcagaatcctgctgctgaaagtggccggctttaacctgctgatgaccctgcggctgtggtccagc

SEQ ID NO: 2487 - DNA, 2688 bp, Artificial Sequence
  Synthetic Polynucloetide
atggccttaccagtgaccgccttgctcctgccgctggccttgctgctccacgccgccaggccggaagtgcagctggttgaatctggcggaggactggttcagcctggcggatctctgagactgtcttgtgccgccagcggcttcagcttcagcgacttttggatgagctgggtccgacaggcccctggcaaaggacttgaatgggtcgccacaatcagccaggccggcagcgagaaggactacgtggactctgtgaagggcagattcaccatcagccgggacaacgccaagaagtccctgtacctccagatgaacagcctgagagccgaggacaccgccgtgtactattgtgcctctggcgtgtacagcttcgactacagaggccagggcaccctggtcacagtctcttctggtaccggcggaggcggatctggcggcggaggtagcggtggcggaggatctgaattcgagctggtcatgacacagagccctgcttctctggccgtgtcactgggacagagagccaccatctcttgcagagccagcgagagcgtggacagctacggcaagagcttcatgcactggtatcagctcaagcccggccagcctcctaagctgctgatctacagagcctccaacctggaaagcggcgtgccagccagattttctggcagcggcagcagaaccgacttcaccctgaccattgatcccgtggaagccgatgatgccgccacctactactgccagcagaacaacgaggacccctggacatttggcggaggcaccaagctggaaatcaaactcgaggacctgaagaacgtgttcccacctgaggtggccgtgttcgagcctagcgaggccgagatcagccacacccagaaagccaccctcgtgtgcctggctaccggcttctaccccgaccatgtggaactgtcttggtgggtcaacggcaaagaggtgcacagcggcgtgtgtaccgacccccagccactgaaagaacagcccgccctgaacgacagccggtactgcctgagcagcagactgagagtgtccgccaccttctggcagaacccccggaaccacttcagatgccaggtgcagttctacggcctgagcgagaacgacgagtggacccaggacagagccaagcccgtgacccagatcgtgtctgccgaagcctggggcagagccgattgcggctttaccagcgagagctaccagcagggcgtgctgagcgccaccatcctgtacgagatcctgctgggcaaggccaccctgtacgccgtgctggtgtctgccctggtgctgatggctatggtcaagcggaaggacagccggggaagggccaagcgatctggatctggagcaacaaacttctcactactcaaacaagcaggtgacgtggaggagaatcccgggcctactagtatggactggatttggcgcatccttttccttgtcggcgctgctaccggcgcgcattccgggccccagctccagctgcaagagtctggacctggcctggtcaagcctagcgagacactgagcctgacctgtaccgtgtccggcgatagcatcagcagcggcgattactactggggctggatcagacagcctcctggcaaaggactggaatggatcggccacatctactacagcggcgtgacctactacaaccccagcctgaagtccagagtgaccatcagcgtggacaccagccggaaccagttctccctgaagctgtctagcgtgacagccgccgataccgccgtgtactactgcaccagagaggacagcagcaactggcggagtagaggccagggaacactggtcacagttagctctggatccggcggaggcggaagtggaggcggaggatctggcggcggaggctctttcgaagaagtgcagctcgaacagtctggccccgagcttgtgaaacctggcgcttccgtgaagatgagctgcaaggccagcggctacaccttcaccaactactacatgaaatgggtcaagcagagccacggcaagtccctggaatggatcggcgatctgaaccccaacaacggcgacaccttctacaaccagaagttcaagggcaaagccacactgaccgtggacaagagcagcaacaccgcctacatgcagctcaactccctgaccagcgaggacagcgccgtgtactactgtgccagaaccggcagatacgaagagaacgctatggactactggggccagggcacaagcgtgacagtctcttctacgcgtatccagaaccctgatcctgccgtgtaccagctgcgggatagcaagagcagcgacaagagcgtgtgtctgttcaccgacttcgacagccagaccaacgtgtcccagagcaaggactccgacgtgtacatcaccgataagtgcgtgctggacatgcggagcatggacttcaagagcaactccgccgtggcctggtccaacaagtccgatttcgcctgcgccaacgccttcaacaacagcattatccccgaggacacattcttcccaagccccgagagcagctgcgacgtgaagctggtggaaaagagcttcgagacagacaccaacctgaacttccagaacctgagcgtgatcggcttcagaatcctgctgctgaaagtggccggctttaacctgctgatgaccctgcggctgtggtccagc

SEQ ID NO: 2488 - DNA, 2670 bp, Artificial Sequence
  Synthetic Polynucloetide
atggccttaccagtgaccgccttgctcctgccgctggccttgctgctccacgccgccaggccggaagtgcagctggttgaatctggcggaggactggttcagcctggcggatctctgagactgtcttgtgccgccagcggcttcagcttcagcgacttttggatgagctgggtccgacaggcccctggcaaaggacttgaatgggtcgccacaatcagccaggccggcagcgagaaggactacgtggactctgtgaagggcagattcaccatcagccgggacaacgccaagaagtccctgtacctccagatgaacagcctgagagccgaggacaccgccgtgtactattgtgcctctggcgtgtacagcttcgactacagaggccagggcaccctggtcacagtctcttctggtaccggcggaggcggatctggcggcggaggtagcggtggcggaggatctgaattcgacgtggtcatgacacagagcccttctagcctgtctgccagcgtgggcgacagagtgaccatcacctgtatggcctccgaggacatctacatccggctggcctggtatcagcagaagcctggaaacgcccctaagctgctgatctacgccgccacctctctggaaacaggcgtgccaagcagattttccggcagcggctctggcaccgatttcaccctgacaatatccagcctccagcctgaggacttcgccacctactactgccagcagtattggagcagcccctggacatttggcggaggcaccaaggtggaaatcaaactcgaggacctgaagaacgtgttcccacctgaggtggccgtgttcgagcctagcgaggccgagatcagccacacccagaaagccaccctcgtgtgcctggctaccggcttctaccccgaccatgtggaactgtcttggtgggtcaacggcaaagaggtgcacagcggcgtgtgtaccgacccccagccactgaaagaacagcccgccctgaacgacagccggtactgcctgagcagcagactgagagtgtccgccaccttctggcagaacccccggaaccacttcagatgccaggtgcagttctacggcctgagcgagaacgacgagtggacccaggacagagccaagcccgtgacccagatcgtgtctgccgaagcctggggcagagccgattgcggctttaccagcgagagctaccagcagggcgtgctgagcgccaccatcctgtacgagatcctgctgggcaaggccaccctgtacgccgtgctggtgtctgccctggtgctgatggctatggtcaagcggaaggacagccggggaagggccaagcgatctggatctggagcaacaaacttctcactactcaaacaagcaggtgacgtggaggagaatcccgggcctactagtatggactggatttggcgcatccttttccttgtcggcgctgctaccggcgcgcattccgggccccagctccagctgcaagagtctggacctggcctggtcaagcctagcgagacactgagcctgacctgtaccgtgtccggcgatagcatcagcagcggcgattactactggggctggatcagacagcctcctggcaaaggactggaatggatcggccacatctactacagcggcgtgacctactacaaccccagcctgaagtccagagtgaccatcagcgtggacaccagccggaaccagttctccctgaagctgtctagcgtgacagccgccgataccgccgtgtactactgcaccagagaggacagcagcaactggcggagtagaggccagggaacactggtcacagttagctctggatccggcggaggcggaagtggaggcggaggatctggcggcggaggctctttcgaacaggttcagctgcaagagtctggccccggactggtcaagcctagccaaacactgagcctgacctgtaccgtgtccggctacagcatcaccagcgactacacctggaactggatcagacagcctcctggcaacggactggaatggatcggctacatcacctacagcggcagcaccagctacaaccccagcctgaaaagccgggtgctgatctccgtggacaccagcaagaatcaggtgtccctgaagctgagcagcgtgacagccgctgataccgccgtgtactactgtgccagactggggagaagatacacaatggactactggggccagggcaccaccgtgacagtttcttctacgcgtatccagaaccctgatcctgccgtgtaccagctgcgggatagcaagagcagcgacaagagcgtgtgtctgttcaccgacttcgacagccagaccaacgtgtcccagagcaaggactccgacgtgtacatcaccgataagtgcgtgctggacatgcggagcatggacttcaagagcaactccgccgtggcctggtccaacaagtccgatttcgcctgcgccaacgccttcaacaacagcattatccccgaggacacattcttcccaagccccgagagcagctgcgacgtgaagctggtggaaaagagcttcgagacagacaccaacctgaacttccagaacctgagcgtgatcggcttcagaatcctgctgctgaaagtggccggctttaacctgctgatgaccctgcggctgtggtccagc

SEQ ID NO: 2489 - DNA, 2682 bp, Artificial Sequence
  Synthetic Polynucloetide
atggccttaccagtgaccgccttgctcctgccgctggccttgctgctccacgccgccaggccggaagtgcagctggttgaatctggcggaggactggttcagcctggcggatctctgagactgtcttgtgccgccagcggcttcagcttcagcgacttttggatgagctgggtccgacaggcccctggcaaaggacttgaatgggtcgccacaatcagccaggccggcagcgagaaggactacgtggactctgtgaagggcagattcaccatcagccgggacaacgccaagaagtccctgtacctccagatgaacagcctgagagccgaggacaccgccgtgtactattgtgcctctggcgtgtacagcttcgactacagaggccagggcaccctggtcacagtctcttctggtaccggcggaggcggatctggcggcggaggtagcggtggcggaggatctgaattcgatattgtgctgactcagagccctgccactctgagccttagtccaggcgacagagctaccatctcctgtagggcctctgaatccgtgaccattctgggctctcatctcatatattggtatcaacaaaagccgggccagcctccacggctgctcattcaactggcctctaacgtgcagaccggcgtgccagctagattttctggctctggctcccggaccgactttacactgacaatcagctccgtggaacccgaagattttgccgtctattattgcctccagtccaggaccattcctcggacattcggccagggaacaaaactcgaaatcaagcggctcgaggacctgaagaacgtgttcccacctgaggtggccgtgttcgagcctagcgaggccgagatcagccacacccagaaagccaccctcgtgtgcctggctaccggcttctaccccgaccatgtggaactgtcttggtgggtcaacggcaaagaggtgcacagcggcgtgtgtaccgacccccagccactgaaagaacagcccgccctgaacgacagccggtactgcctgagcagcagactgagagtgtccgccaccttctggcagaacccccggaaccacttcagatgccaggtgcagttctacggcctgagcgagaacgacgagtggacccaggacagagccaagcccgtgacccagatcgtgtctgccgaagcctggggcagagccgattgcggctttaccagcgagagctaccagcagggcgtgctgagcgccaccatcctgtacgagatcctgctgggcaaggccaccctgtacgccgtgctggtgtctgccctggtgctgatggctatggtcaagcggaaggacagccggggaagggccaagcgatctggatctggagcaacaaacttctcactactcaaacaagcaggtgacgtggaggagaatcccgggcctactagtatggactggatttggcgcatccttttccttgtcggcgctgctaccggcgcgcattccgggccccagctccagctgcaagagtctggacctggcctggtcaagcctagcgagacactgagcctgacctgtaccgtgtccggcgatagcatcagcagcggcgattactactggggctggatcagacagcctcctggcaaaggactggaatggatcggccacatctactacagcggcgtgacctactacaaccccagcctgaagtccagagtgaccatcagcgtggacaccagccggaaccagttctccctgaagctgtctagcgtgacagccgccgataccgccgtgtactactgcaccagagaggacagcagcaactggcggagtagaggccagggaacactggtcacagttagctctggatccggcggaggcggaagtggaggcggaggatctggcggcggaggctctttcgaacaggtgcagctcgttcagagtggccccgaagtgaaaaagccaggcgagtccgtgaagatttcctgcaaagcctccggctacacattccggcactactctatgaattgggtcaagcaggccccaggccagggccttaagtggatgggacgcatcaataccgagtccggcgtgccaatctacgccgatgacttcaaaggccggttcagcttcaccgtggatacctctgcctccaccgcctacctggaaatcagcagcctgaccagcgaggatacagctgtgtacttctgtagcaacgattacctctacagcctggatttctggggacagggaaccacactgaccgtgtctagcacgcgtatccagaaccctgatcctgccgtgtaccagctgcgggatagcaagagcagcgacaagagcgtgtgtctgttcaccgacttcgacagccagaccaacgtgtcccagagcaaggactccgacgtgtacatcaccgataagtgcgtgctggacatgcggagcatggacttcaagagcaactccgccgtggcctggtccaacaagtccgatttcgcctgcgccaacgccttcaacaacagcattatccccgaggacacattcttcccaagccccgagagcagctgcgacgtgaagctggtggaaaagagcttcgagacagacaccaacctgaacttccagaacctgagcgtgatcggcttcagaatcctgctgctgaaagtggccggctttaacctgctgatgaccctgcggctgtggtccagc

SEQ ID NO: 2490 - DNA, 2682 bp, Artificial Sequence
  Synthetic Polynucloetide
atggccttaccagtgaccgccttgctcctgccgctggccttgctgctccacgccgccaggccggaagtgcagctggttgaatctggcggaggactggttcagcctggcggatctctgagactgtcttgtgccgccagcggcttcagcttcagcgacttttggatgagctgggtccgacaggcccctggcaaaggacttgaatgggtcgccacaatcagccaggccggcagcgagaaggactacgtggactctgtgaagggcagattcaccatcagccgggacaacgccaagaagtccctgtacctccagatgaacagcctgagagccgaggacaccgccgtgtactattgtgcctctggcgtgtacagcttcgactacagaggccagggcaccctggtcacagtctcttctggtaccggcggaggcggatctggcggcggaggtagcggtggcggaggatctgaattcgacatcgtgctgacacagtctcccgccacactgtcactgagccctggcgatagagccacactgagctgtagagccagcgagagcgtgacaatcctgggcagccacctgatctactggtatcagcagaagcccggacaggcccctagactgctgattcagctcgccagcaatgtgcagacaggcatccctgccagattttccggcagcggcagcagaaccgatttcaccctgaccataagcagcctggaacctgaggacttcgccgtgtactactgcctccagagccggacaatccccagaacctttggacagggcaccaagctggaaatcaagagactcgaggacctgaagaacgtgttcccacctgaggtggccgtgttcgagcctagcgaggccgagatcagccacacccagaaagccaccctcgtgtgcctggctaccggcttctaccccgaccatgtggaactgtcttggtgggtcaacggcaaagaggtgcacagcggcgtgtgtaccgacccccagccactgaaagaacagcccgccctgaacgacagccggtactgcctgagcagcagactgagagtgtccgccaccttctggcagaacccccggaaccacttcagatgccaggtgcagttctacggcctgagcgagaacgacgagtggacccaggacagagccaagcccgtgacccagatcgtgtctgccgaagcctggggcagagccgattgcggctttaccagcgagagctaccagcagggcgtgctgagcgccaccatcctgtacgagatcctgctgggcaaggccaccctgtacgccgtgctggtgtctgccctggtgctgatggctatggtcaagcggaaggacagccggggaagggccaagcgatctggatctggagcaacaaacttctcactactcaaacaagcaggtgacgtggaggagaatcccgggcctactagtatggactggatttggcgcatccttttccttgtcggcgctgctaccggcgcgcattccgggccccagctccagctgcaagagtctggacctggcctggtcaagcctagcgagacactgagcctgacctgtaccgtgtccggcgatagcatcagcagcggcgattactactggggctggatcagacagcctcctggcaaaggactggaatggatcggccacatctactacagcggcgtgacctactacaaccccagcctgaagtccagagtgaccatcagcgtggacaccagccggaaccagttctccctgaagctgtctagcgtgacagccgccgataccgccgtgtactactgcaccagagaggacagcagcaactggcggagtagaggccagggaacactggtcacagttagctctggatccggcggaggcggaagtggaggcggaggatctggcggcggaggctctttcgaacaggttcagctggtgcagtctggcagcgagctgaagaaacctggcgagagcgtgaagatcagctgcaaggccagcggctacaccttcacacactacagcatgaactgggtccgacaggcccctggacaaggactggaatggatgggcagaatcaacaccgagacaggcgagcccctgtacgccgacgatttcaagggcagattcgtgttcagcctggacaccagcgccagcacagcctatctccagatcagctctctgaaggccgaggacaccgccgtgtactactgctccaacgactacctgtactccctggactattggggccagggcacactggtcacagtgtctagtacgcgtatccagaaccctgatcctgccgtgtaccagctgcgggatagcaagagcagcgacaagagcgtgtgtctgttcaccgacttcgacagccagaccaacgtgtcccagagcaaggactccgacgtgtacatcaccgataagtgcgtgctggacatgcggagcatggacttcaagagcaactccgccgtggcctggtccaacaagtccgatttcgcctgcgccaacgccttcaacaacagcattatccccgaggacacattcttcccaagccccgagagcagctgcgacgtgaagctggtggaaaagagcttcgagacagacaccaacctgaacttccagaacctgagcgtgatcggcttcagaatcctgctgctgaaagtggccggctttaacctgctgatgaccctgcggctgtggtccagc

SEQ ID NO: 2491 - DNA, 2685 bp, Artificial Sequence
  Synthetic Polynucloetide
atggccttaccagtgaccgccttgctcctgccgctggccttgctgctccacgccgccaggccggaagtgcagctggttgaatctggcggaggactggttcagcctggcggatctctgagactgtcttgtgccgccagcggcttcagcttcagcgacttttggatgagctgggtccgacaggcccctggcaaaggacttgaatgggtcgccacaatcagccaggccggcagcgagaaggactacgtggactctgtgaagggcagattcaccatcagccgggacaacgccaagaagtccctgtacctccagatgaacagcctgagagccgaggacaccgccgtgtactattgtgcctctggcgtgtacagcttcgactacagaggccagggcaccctggtcacagtctcttctggtaccggcggaggcggatctggcggcggaggtagcggtggcggaggatctgaattcgacatccagctgactcagagccctagctttctgagcgccagcgtgggcgacagagtgaccattacatgtagagccagccagggcatcagcaccgacctgaactggtatcagcagaagcctggcaaggcccctaagctgctgatctacgccgccagcaatctggaaagcggcgtgccaagcagattttccggctctggcagcggcaccgagttcaccctgacaatatctagcctccagcctgaggacttcgccacctactactgccagcagagctacaactggccctacacctttggcggaggcaccaaggtggaaatcaagagactcgaggacctgaagaacgtgttcccacctgaggtggccgtgttcgagcctagcgaggccgagatcagccacacccagaaagccaccctcgtgtgcctggctaccggcttctaccccgaccatgtggaactgtcttggtgggtcaacggcaaagaggtgcacagcggcgtgtgtaccgacccccagccactgaaagaacagcccgccctgaacgacagccggtactgcctgagcagcagactgagagtgtccgccaccttctggcagaacccccggaaccacttcagatgccaggtgcagttctacggcctgagcgagaacgacgagtggacccaggacagagccaagcccgtgacccagatcgtgtctgccgaagcctggggcagagccgattgcggctttaccagcgagagctaccagcagggcgtgctgagcgccaccatcctgtacgagatcctgctgggcaaggccaccctgtacgccgtgctggtgtctgccctggtgctgatggctatggtcaagcggaaggacagccggggaagggccaagcgatctggatctggagcaacaaacttctcactactcaaacaagcaggtgacgtggaggagaatcccgggcctactagtatggactggatttggcgcatccttttccttgtcggcgctgctaccggcgcgcattccgggccccagctccagctgcaagagtctggacctggcctggtcaagcctagcgagacactgagcctgacctgtaccgtgtccggcgatagcatcagcagcggcgattactactggggctggatcagacagcctcctggcaaaggactggaatggatcggccacatctactacagcggcgtgacctactacaaccccagcctgaagtccagagtgaccatcagcgtggacaccagccggaaccagttctccctgaagctgtctagcgtgacagccgccgataccgccgtgtactactgcaccagagaggacagcagcaactggcggagtagaggccagggaacactggtcacagttagctctggatccggcggaggcggaagtggaggcggaggatctggcggcggaggctctttcgaagaagttcagctggttgaatcaggcggaggactcgtgaaacctggcggctctctgagactgtcttgtgccgccagcggcttcaccttcagcaacttcgagatgaactgggtccgacaggccccaggcaaaggactggaatgggtgtccggcatcagctccaatggccggtacatcaactacgccgacagcgtgaagggcagattcaccatcagccgggacaacgccaagaacagcctgtacctccagatgaactccctgagagccgaggacaccgccgtgtactattgtgccagagtggtggacttcgaccaggactacaacggcttcgactattggggccagggcaccctggttaccgttagctctacgcgtatccagaaccctgatcctgccgtgtaccagctgcgggatagcaagagcagcgacaagagcgtgtgtctgttcaccgacttcgacagccagaccaacgtgtcccagagcaaggactccgacgtgtacatcaccgataagtgcgtgctggacatgcggagcatggacttcaagagcaactccgccgtggcctggtccaacaagtccgatttcgcctgcgccaacgccttcaacaacagcattatccccgaggacacattcttcccaagccccgagagcagctgcgacgtgaagctggtggaaaagagcttcgagacagacaccaacctgaacttccagaacctgagcgtgatcggcttcagaatcctgctgctgaaagtggccggctttaacctgctgatgaccctgcggctgtggtccagc

SEQ ID NO: 2492 - DNA, 2679 bp, Artificial Sequence
  Synthetic Polynucloetide
atggccttaccagtgaccgccttgctcctgccgctggccttgctgctccacgccgccaggccggaagtgcagctggttgaatctggcggaggactggttcagcctggcggatctctgagactgtcttgtgccgccagcggcttcagcttcagcgacttttggatgagctgggtccgacaggcccctggcaaaggacttgaatgggtcgccacaatcagccaggccggcagcgagaaggactacgtggactctgtgaagggcagattcaccatcagccgggacaacgccaagaagtccctgtacctccagatgaacagcctgagagccgaggacaccgccgtgtactattgtgcctctggcgtgtacagcttcgactacagaggccagggcaccctggtcacagtctcttctggtaccggcggaggcggatctggcggcggaggtagcggtggcggaggatctgaattcgacatccaactgactcagagccccagctttctgagcgcctctgtgggcgacagagtgaccatcacatgtagtctcagcctgggcatcagcacatggcgggattggtttccgccgaggcttggcaggggccttgagccgctgacctacgccgccagcacactgcaaagcggagtgcctagcagattttccggcagcggctctggcaccgagttcaccctgacaatatccagcctccagcctgaggacttcgccacctactactgccagcagctcaacagctaccctctgacctttggcggaggcaccaaggtggaaatcaagagactcgaggacctgaagaacgtgttcccacctgaggtggccgtgttcgagcctagcgaggccgagatcagccacacccagaaagccaccctcgtgtgcctggctaccggcttctaccccgaccatgtggaactgtcttggtgggtcaacggcaaagaggtgcacagcggcgtgtgtaccgacccccagccactgaaagaacagcccgccctgaacgacagccggtactgcctgagcagcagactgagagtgtccgccaccttctggcagaacccccggaaccacttcagatgccaggtgcagttctacggcctgagcgagaacgacgagtggacccaggacagagccaagcccgtgacccagatcgtgtctgccgaagcctggggcagagccgattgcggctttaccagcgagagctaccagcagggcgtgctgagcgccaccatcctgtacgagatcctgctgggcaaggccaccctgtacgccgtgctggtgtctgccctggtgctgatggctatggtcaagcggaaggacagccggggaagggccaagcgatctggatctggagcaacaaacttctcactactcaaacaagcaggtgacgtggaggagaatcccgggcctactagtatggactggatttggcgcatccttttccttgtcggcgctgctaccggcgcgcattccgggccccagctccagctgcaagagtctggacctggcctggtcaagcctagcgagacactgagcctgacctgtaccgtgtccggcgatagcatcagcagcggcgattactactggggctggatcagacagcctcctggcaaaggactggaatggatcggccacatctactacagcggcgtgacctactacaaccccagcctgaagtccagagtgaccatcagcgtggacaccagccggaaccagttctccctgaagctgtctagcgtgacagccgccgataccgccgtgtactactgcaccagagaggacagcagcaactggcggagtagaggccagggaacactggtcacagttagctctggatccggcggaggcggaagtggaggcggaggatctggcggcggaggctctttcgaagaagttcaactggttgagtctggtggcggcctggttaagcctggcggatctctgagactgagctgtgccgccagcggcttcacctttagcacatacggcatgagctgggtccgacaggcccctggaaaaggacttgagtgggtcgcctacatcaacaacggctccggctacatctactacgccgacagcgtgaagggcagattcaccatcagccgggacaacgccaagaacagcctgtacctccagatgaactccctgagagccgaggacaccgccgtgtactattgtgccagaggacagtggtggagcggcggagactttgattattggggccagggcaccctggtcaccgtttcttctacgcgtatccagaaccctgatcctgccgtgtaccagctgcgggatagcaagagcagcgacaagagcgtgtgtctgttcaccgacttcgacagccagaccaacgtgtcccagagcaaggactccgacgtgtacatcaccgataagtgcgtgctggacatgcggagcatggacttcaagagcaactccgccgtggcctggtccaacaagtccgatttcgcctgcgccaacgccttcaacaacagcattatccccgaggacacattcttcccaagccccgagagcagctgcgacgtgaagctggtggaaaagagcttcgagacagacaccaacctgaacttccagaacctgagcgtgatcggcttcagaatcctgctgctgaaagtggccggctttaacctgctgatgaccctgcggctgtggtccagc

SEQ ID NO: 2493 - DNA, 2682 bp, Artificial Sequence
  Synthetic Polynucloetide
atggccttaccagtgaccgccttgctcctgccgctggccttgctgctccacgccgccaggccggaagtgcagctggttgaatctggcggaggactggttcagcctggcggatctctgagactgtcttgtgccgccagcggcttcagcttcagcgacttttggatgagctgggtccgacaggcccctggcaaaggacttgaatgggtcgccacaatcagccaggccggcagcgagaaggactacgtggactctgtgaagggcagattcaccatcagccgggacaacgccaagaagtccctgtacctccagatgaacagcctgagagccgaggacaccgccgtgtactattgtgcctctggcgtgtacagcttcgactacagaggccagggcaccctggtcacagtctcttctggtaccggcggaggcggatctggcggcggaggtagcggtggcggaggatctgaattcgagatcgtgctgacacagtctcccgccacactgtcactgtctccaggcgaaagagccacactgagctgtagcgccagcagcagcgtgtcctacatgtactggtatcagcagaagcccggacaggcccctagactgctgatctacagaaccagcaacctggcctctggcatccccgccagattttctggctctggcagcggcaccgatttcaccctgaccataagcagcctggaacctgaggacttcgccgtgtactactgccagcagtaccacagctaccccaccacctttggacagggcaccaaggtggaaatcaagcggacagttctcgaggacctgaagaacgtgttcccacctgaggtggccgtgttcgagcctagcgaggccgagatcagccacacccagaaagccaccctcgtgtgcctggctaccggcttctaccccgaccatgtggaactgtcttggtgggtcaacggcaaagaggtgcacagcggcgtgtgtaccgacccccagccactgaaagaacagcccgccctgaacgacagccggtactgcctgagcagcagactgagagtgtccgccaccttctggcagaacccccggaaccacttcagatgccaggtgcagttctacggcctgagcgagaacgacgagtggacccaggacagagccaagcccgtgacccagatcgtgtctgccgaagcctggggcagagccgattgcggctttaccagcgagagctaccagcagggcgtgctgagcgccaccatcctgtacgagatcctgctgggcaaggccaccctgtacgccgtgctggtgtctgccctggtgctgatggctatggtcaagcggaaggacagccggggaagggccaagcgatctggatctggagcaacaaacttctcactactcaaacaagcaggtgacgtggaggagaatcccgggcctactagtatggactggatttggcgcatccttttccttgtcggcgctgctaccggcgcgcattccgggccccagctccagctgcaagagtctggacctggcctggtcaagcctagcgagacactgagcctgacctgtaccgtgtccggcgatagcatcagcagcggcgattactactggggctggatcagacagcctcctggcaaaggactggaatggatcggccacatctactacagcggcgtgacctactacaaccccagcctgaagtccagagtgaccatcagcgtggacaccagccggaaccagttctccctgaagctgtctagcgtgacagccgccgataccgccgtgtactactgcaccagagaggacagcagcaactggcggagtagaggccagggaacactggtcacagttagctctggatccggcggaggcggaagtggaggcggaggatctggcggcggaggctctttcgaagaagtgcagctggttgaatcaggtggcggcctggttcaacctggcggatctctgagactgtcttgtgccgccagcggcttcagcttcaacacctacgccatgaactgggtccgacaggctcctggcaaaggactggaatgggtgtcccacatcagaagcaagagcaacaacttcgccacctactacgccgacagcgtgaaggacagattcaccatcagccgggacaacgccaagaacagcctgtacctccagatgaactccctgagagccgaggacaccgccgtgtattattgcgccagacaaggcggcgacttccctatggattattggggccagggcaccctggtcaccgtttcttctacgcgtatccagaaccctgatcctgccgtgtaccagctgcgggatagcaagagcagcgacaagagcgtgtgtctgttcaccgacttcgacagccagaccaacgtgtcccagagcaaggactccgacgtgtacatcaccgataagtgcgtgctggacatgcggagcatggacttcaagagcaactccgccgtggcctggtccaacaagtccgatttcgcctgcgccaacgccttcaacaacagcattatccccgaggacacattcttcccaagccccgagagcagctgcgacgtgaagctggtggaaaagagcttcgagacagacaccaacctgaacttccagaacctgagcgtgatcggcttcagaatcctgctgctgaaagtggccggctttaacctgctgatgaccctgcggctgtggtccagc

SEQ ID NO: 2494 - DNA, 2670 bp, Artificial Sequence
  Synthetic Polynucloetide
atggccttaccagtgaccgccttgctcctgccgctggccttgctgctccacgccgccaggccggaagtgcagctggttgaatctggcggaggactggttcagcctggcggatctctgagactgtcttgtgccgccagcggcttcagcttcagcgacttttggatgagctgggtccgacaggcccctggcaaaggacttgaatgggtcgccacaatcagccaggccggcagcgagaaggactacgtggactctgtgaagggcagattcaccatcagccgggacaacgccaagaagtccctgtacctccagatgaacagcctgagagccgaggacaccgccgtgtactattgtgcctctggcgtgtacagcttcgactacagaggccagggcaccctggtcacagtctcttctggtaccggcggaggcggatctggcggcggaggtagcggtggcggaggatctgaattcgacgtggtcatgacacagagcccttctagcctgtctgccagcgtgggcgacagagtgaccatcacctgtaaagccagcgaggacatctacatccggctggcctggtatcagcagaagcctggaaaggcccctaagctgctgatctacgccgccacctctctggaaacaggcgtgccaagcagattttccggcagcggctctggcaccgatttcaccctgacaatatccagcctccagcctgaggacttcgccacctactactgccagcagtattggaccacaccttggacctttggcggaggcaccaaggtggaaatcaaactcgaggacctgaagaacgtgttcccacctgaggtggccgtgttcgagcctagcgaggccgagatcagccacacccagaaagccaccctcgtgtgcctggctaccggcttctaccccgaccatgtggaactgtcttggtgggtcaacggcaaagaggtgcacagcggcgtgtgtaccgacccccagccactgaaagaacagcccgccctgaacgacagccggtactgcctgagcagcagactgagagtgtccgccaccttctggcagaacccccggaaccacttcagatgccaggtgcagttctacggcctgagcgagaacgacgagtggacccaggacagagccaagcccgtgacccagatcgtgtctgccgaagcctggggcagagccgattgcggctttaccagcgagagctaccagcagggcgtgctgagcgccaccatcctgtacgagatcctgctgggcaaggccaccctgtacgccgtgctggtgtctgccctggtgctgatggctatggtcaagcggaaggacagccggggaagggccaagcgatctggatctggagcaacaaacttctcactactcaaacaagcaggtgacgtggaggagaatcccgggcctactagtatggactggatttggcgcatccttttccttgtcggcgctgctaccggcgcgcattccgggccccagctccagctgcaagagtctggacctggcctggtcaagcctagcgagacactgagcctgacctgtaccgtgtccggcgatagcatcagcagcggcgattactactggggctggatcagacagcctcctggcaaaggactggaatggatcggccacatctactacagcggcgtgacctactacaaccccagcctgaagtccagagtgaccatcagcgtggacaccagccggaaccagttctccctgaagctgtctagcgtgacagccgccgataccgccgtgtactactgcaccagagaggacagcagcaactggcggagtagaggccagggaacactggtcacagttagctctggatccggcggaggcggaagtggaggcggaggatctggcggcggaggctctttcgaacaggtgcagctccaagagtctggccctggactggtcaagcctagccagacactgagcctgacctgtaccgtgtccggctacagcatcaccatcgactacacctggaactggatcagacagcctcctggcaaaggactggaatggatcggctacatcacctacagcggcagcaccgactacaaccccagcctgaaaagccgggtgctgatctccgtggacaccagcaagaatcaggtgtccctgaagctgagcagcgtgacagccgctgataccgccgtgtactactgtgccagactgggcagaagatacgccctggattattggggccagggcaccaccgtgacagtgtcatctacgcgtatccagaaccctgatcctgccgtgtaccagctgcgggatagcaagagcagcgacaagagcgtgtgtctgttcaccgacttcgacagccagaccaacgtgtcccagagcaaggactccgacgtgtacatcaccgataagtgcgtgctggacatgcggagcatggacttcaagagcaactccgccgtggcctggtccaacaagtccgatttcgcctgcgccaacgccttcaacaacagcattatccccgaggacacattcttcccaagccccgagagcagctgcgacgtgaagctggtggaaaagagcttcgagacagacaccaacctgaacttccagaacctgagcgtgatcggcttcagaatcctgctgctgaaagtggccggctttaacctgctgatgaccctgcggctgtggtccagc

SEQ ID NO: 2495 - DNA, 2685 bp, Artificial Sequence
  Synthetic Polynucloetide
atggccttaccagtgaccgccttgctcctgccgctggccttgctgctccacgccgccaggccggaagtgcagctggttgaatctggcggaggactggttcagcctggcggatctctgagactgtcttgtgccgccagcggcttcagcttcagcgacttttggatgagctgggtccgacaggcccctggcaaaggacttgaatgggtcgccacaatcagccaggccggcagcgagaaggactacgtggactctgtgaagggcagattcaccatcagccgggacaacgccaagaagtccctgtacctccagatgaacagcctgagagccgaggacaccgccgtgtactattgtgcctctggcgtgtacagcttcgactacagaggccagggcaccctggtcacagtctcttctggtaccggcggaggcggatctggcggcggaggtagcggtggcggaggatctgaattcgacatccagatgacccagaccacaagcagcctgtctgccagcctgggcgacagagtgaccatctcttgtagagccagccaggacatcagcaactacctgaactggtatcagcagaaacccgacggcaccgtgaagctgctgatctactacaccagcatcctgcacagcggcgtgcccagcagattttctggctctggcagcggcaccgactacagcctgaccatcagcaatctggaacaagaggacttcgctacctacttctgccagcaaggcaacaccctgccttggacatttggcggaggcaccaagctggaaatcaaagctctcgaggacctgaagaacgtgttcccacctgaggtggccgtgttcgagcctagcgaggccgagatcagccacacccagaaagccaccctcgtgtgcctggctaccggcttctaccccgaccatgtggaactgtcttggtgggtcaacggcaaagaggtgcacagcggcgtgtgtaccgacccccagccactgaaagaacagcccgccctgaacgacagccggtactgcctgagcagcagactgagagtgtccgccaccttctggcagaacccccggaaccacttcagatgccaggtgcagttctacggcctgagcgagaacgacgagtggacccaggacagagccaagcccgtgacccagatcgtgtctgccgaagcctggggcagagccgattgcggctttaccagcgagagctaccagcagggcgtgctgagcgccaccatcctgtacgagatcctgctgggcaaggccaccctgtacgccgtgctggtgtctgccctggtgctgatggctatggtcaagcggaaggacagccggggaagggccaagcgatctggatctggagcaacaaacttctcactactcaaacaagcaggtgacgtggaggagaatcccgggcctactagtatggactggatttggcgcatccttttccttgtcggcgctgctaccggcgcgcattccgggccccagctccagctgcaagagtctggacctggcctggtcaagcctagcgagacactgagcctgacctgtaccgtgtccggcgatagcatcagcagcggcgattactactggggctggatcagacagcctcctggcaaaggactggaatggatcggccacatctactacagcggcgtgacctactacaaccccagcctgaagtccagagtgaccatcagcgtggacaccagccggaaccagttctccctgaagctgtctagcgtgacagccgccgataccgccgtgtactactgcaccagagaggacagcagcaactggcggagtagaggccagggaacactggtcacagttagctctggatccggcggaggcggaagtggaggcggaggatctggcggcggaggctctttcgaagaagtgcaactggttgaatctggcggcggactggttaagcctggcggatctctgaagctgagctgtgccgcctctggcttcgccttcagcatctacgatatgagctgggtccgacagacccctgagaagagactggaatgggtcgcctacatctctagcggcggagggacctactatcccgacacagtgaagggcagattcaccatctccagagacaacgccaagaacaccctgtacctccagatgagcagcctgaagtccgaggacaccgccatgtactactgcgccagacacagcggctatggcacacattggggagtgctgtttgcctactggggccagggaacactggtcacagtttctgctacgcgtatccagaaccctgatcctgccgtgtaccagctgcgggatagcaagagcagcgacaagagcgtgtgtctgttcaccgacttcgacagccagaccaacgtgtcccagagcaaggactccgacgtgtacatcaccgataagtgcgtgctggacatgcggagcatggacttcaagagcaactccgccgtggcctggtccaacaagtccgatttcgcctgcgccaacgccttcaacaacagcattatccccgaggacacattcttcccaagccccgagagcagctgcgacgtgaagctggtggaaaagagcttcgagacagacaccaacctgaacttccagaacctgagcgtgatcggcttcagaatcctgctgctgaaagtggccggctttaacctgctgatgaccctgcggctgtggtccagc

SEQ ID NO: 2496 - DNA, 2715 bp, Artificial Sequence
  Synthetic Polynucloetide
atggccttaccagtgaccgccttgctcctgccgctggccttgctgctccacgccgccaggccggaagtgcagctggttgaatctggcggaggactggttcagcctggcggatctctgagactgtcttgtgccgccagcggcttcagcttcagcgacttttggatgagctgggtccgacaggcccctggcaaaggacttgaatgggtcgccacaatcagccaggccggcagcgagaaggactacgtggactctgtgaagggcagattcaccatcagccgggacaacgccaagaagtccctgtacctccagatgaacagcctgagagccgaggacaccgccgtgtactattgtgcctctggcgtgtacagcttcgactacagaggccagggcaccctggtcacagtctcttctggtaccggcggaggcggatctggcggcggaggtagcggtggcggaggatctgaattcgacatcgtgatgacacagagccctgatagcctggccgtgtctctgggagagagagccaccatcaactgcaagagcagccagagcctgctgtacagaagcaaccagaagaactacctggcctggtatcagcagaagcccggccagcctcctaagctgctgatctactgggccagcaccagagaaagcggcgtgcccgatagattttctggctctggcagcggcaccgacttcaccctgacaatttctagcctgcaagccgaggacgtggccgtgtactactgccagcagtattacaactaccccagaaccttcggccagggcaccaaggtggaaatcaagagaacagttctcgaggacctgaagaacgtgttcccacctgaggtggccgtgttcgagcctagcgaggccgagatcagccacacccagaaagccaccctcgtgtgcctggctaccggcttctaccccgaccatgtggaactgtcttggtgggtcaacggcaaagaggtgcacagcggcgtgtgtaccgacccccagccactgaaagaacagcccgccctgaacgacagccggtactgcctgagcagcagactgagagtgtccgccaccttctggcagaacccccggaaccacttcagatgccaggtgcagttctacggcctgagcgagaacgacgagtggacccaggacagagccaagcccgtgacccagatcgtgtctgccgaagcctggggcagagccgattgcggctttaccagcgagagctaccagcagggcgtgctgagcgccaccatcctgtacgagatcctgctgggcaaggccaccctgtacgccgtgctggtgtctgccctggtgctgatggctatggtcaagcggaaggacagccggggaagggccaagcgatctggatctggagcaacaaacttctcactactcaaacaagcaggtgacgtggaggagaatcccgggcctactagtatggactggatttggcgcatccttttccttgtcggcgctgctaccggcgcgcattccgggccccagctccagctgcaagagtctggacctggcctggtcaagcctagcgagacactgagcctgacctgtaccgtgtccggcgatagcatcagcagcggcgattactactggggctggatcagacagcctcctggcaaaggactggaatggatcggccacatctactacagcggcgtgacctactacaaccccagcctgaagtccagagtgaccatcagcgtggacaccagccggaaccagttctccctgaagctgtctagcgtgacagccgccgataccgccgtgtactactgcaccagagaggacagcagcaactggcggagtagaggccagggaacactggtcacagttagctctggatccggcggaggcggaagtggaggcggaggatctggcggcggaggctctttcgaagaagttcagctgcttgaatcaggcggcggactggttcaacctggcggatctctgagactgagctgtgccgccagcggctacagcatcacaagcgactatgcctggaactgggtccgacaggcccctggcaaaggactggaatgggtgtcctacatcagcaacagcggcagcaccagctacaaccccagcctgaagtcccggttcaccatcagcagagacaacagcaagaacaccctgtacctccagatgaacagcctgagagctgaggacaccgccgtgtattattgcgccaaagagcggaactacgactacgacgattactactacgctatggactactggggccagggaaccctggtcacagtctcttctacgcgtatccagaaccctgatcctgccgtgtaccagctgcgggatagcaagagcagcgacaagagcgtgtgtctgttcaccgacttcgacagccagaccaacgtgtcccagagcaaggactccgacgtgtacatcaccgataagtgcgtgctggacatgcggagcatggacttcaagagcaactccgccgtggcctggtccaacaagtccgatttcgcctgcgccaacgccttcaacaacagcattatccccgaggacacattcttcccaagccccgagagcagctgcgacgtgaagctggtggaaaagagcttcgagacagacaccaacctgaacttccagaacctgagcgtgatcggcttcagaatcctgctgctgaaagtggccggctttaacctgctgatgaccctgcggctgtggtccagc

SEQ ID NO: 2497 - DNA, 2694 bp, Artificial Sequence
  Synthetic Polynucloetide
atggccttaccagtgaccgccttgctcctgccgctggccttgctgctccacgccgccaggccggaagtgcagctggttgaatctggcggaggactggttcagcctggcggatctctgagactgtcttgtgccgccagcggcttcagcttcagcgacttttggatgagctgggtccgacaggcccctggcaaaggacttgaatgggtcgccacaatcagccaggccggcagcgagaaggactacgtggactctgtgaagggcagattcaccatcagccgggacaacgccaagaagtccctgtacctccagatgaacagcctgagagccgaggacaccgccgtgtactattgtgcctctggcgtgtacagcttcgactacagaggccagggcaccctggtcacagtctcttctggtaccggcggaggcggatctggcggcggaggtagcggtggcggaggatctgaattcgacgtggtcatgacacagagccctctgagcctgcctgtgacacttggacagcctgccagcatcagctgtagaagcagccagagcctgctgcacagcagcggcaatacctacctggaatggtatcagcagaggcccggacagagccccagacctctgatctacaagatcagcacccggttcagcggcgtgcccgatagattttctggctctggcagcggcaccgacttcaccctgaagattagcagagtggaagccgaggacgtgggcgtgtactactgcttccaaggcagccacgtgccatacacctttggcggcggaacaaaggtggaaatcaagagactcgaggacctgaagaacgtgttcccacctgaggtggccgtgttcgagcctagcgaggccgagatcagccacacccagaaagccaccctcgtgtgcctggctaccggcttctaccccgaccatgtggaactgtcttggtgggtcaacggcaaagaggtgcacagcggcgtgtgtaccgacccccagccactgaaagaacagcccgccctgaacgacagccggtactgcctgagcagcagactgagagtgtccgccaccttctggcagaacccccggaaccacttcagatgccaggtgcagttctacggcctgagcgagaacgacgagtggacccaggacagagccaagcccgtgacccagatcgtgtctgccgaagcctggggcagagccgattgcggctttaccagcgagagctaccagcagggcgtgctgagcgccaccatcctgtacgagatcctgctgggcaaggccaccctgtacgccgtgctggtgtctgccctggtgctgatggctatggtcaagcggaaggacagccggggaagggccaagcgatctggatctggagcaacaaacttctcactactcaaacaagcaggtgacgtggaggagaatcccgggcctactagtatggactggatttggcgcatccttttccttgtcggcgctgctaccggcgcgcattccgggccccagctccagctgcaagagtctggacctggcctggtcaagcctagcgagacactgagcctgacctgtaccgtgtccggcgatagcatcagcagcggcgattactactggggctggatcagacagcctcctggcaaaggactggaatggatcggccacatctactacagcggcgtgacctactacaaccccagcctgaagtccagagtgaccatcagcgtggacaccagccggaaccagttctccctgaagctgtctagcgtgacagccgccgataccgccgtgtactactgcaccagagaggacagcagcaactggcggagtagaggccagggaacactggtcacagttagctctggatccggcggaggcggaagtggaggcggaggatctggcggcggaggctctttcgaacaagttcagctggttcagagcggagccgaagtgaagaaacctggggcctctgtgaaggtgtcctgcaaagcctctggcctgaccatcgaggactactacatgcactgggtccgacaggcccctggacaaggacttgaatggatgggctggatcgaccccgagaacggcgatacagagtacggccctaagttccagggcagagtgaccatgaccagagacaccagcatcaacaccgcctacatggaactgagccggctgagatccgatgacaccgccgtgtactattgcgccgtgcacaatgcccactacggcacttggtttgcctattggggccagggcacactggtcaccgttagctctacgcgtatccagaaccctgatcctgccgtgtaccagctgcgggatagcaagagcagcgacaagagcgtgtgtctgttcaccgacttcgacagccagaccaacgtgtcccagagcaaggactccgacgtgtacatcaccgataagtgcgtgctggacatgcggagcatggacttcaagagcaactccgccgtggcctggtccaacaagtccgatttcgcctgcgccaacgccttcaacaacagcattatccccgaggacacattcttcccaagccccgagagcagctgcgacgtgaagctggtggaaaagagcttcgagacagacaccaacctgaacttccagaacctgagcgtgatcggcttcagaatcctgctgctgaaagtggccggctttaacctgctgatgaccctgcggctgtggtccagc

SEQ ID NO: 2498 - DNA, 2670 bp, Artificial Sequence
  Synthetic Polynucloetide
atggccttaccagtgaccgccttgctcctgccgctggccttgctgctccacgccgccaggccggaagtgcagctggttgaatctggcggaggactggttcagcctggcggatctctgagactgtcttgtgccgccagcggcttcagcttcagcgacttttggatgagctgggtccgacaggcccctggcaaaggacttgaatgggtcgccacaatcagccaggccggcagcgagaaggactacgtggactctgtgaagggcagattcaccatcagccgggacaacgccaagaagtccctgtacctccagatgaacagcctgagagccgaggacaccgccgtgtactattgtgcctctggcgtgtacagcttcgactacagaggccagggcaccctggtcacagtctcttctggtaccggcggaggcggatctggcggcggaggtagcggtggcggaggatctgaattcgacatccagatgacacagagccctagcagcctgtctgccagcgtgggagacagagtgaccatcacctgtagagccagcgagaacatctacagcaacctggcctggtatcagcagaagcctggcaaggcccctaagctgctgatctacgccgccaccaatctggctgatggcgtgccaagcagattttccggctctggcagcggcaccgatttcaccctgacaatatccagcctccagcctgaggacttcgccacctactactgccagcacttttggggcacccctacattcggccagggcaccaaggtggaaatcaagagaacagttctcgaggacctgaagaacgtgttcccacctgaggtggccgtgttcgagcctagcgaggccgagatcagccacacccagaaagccaccctcgtgtgcctggctaccggcttctaccccgaccatgtggaactgtcttggtgggtcaacggcaaagaggtgcacagcggcgtgtgtaccgacccccagccactgaaagaacagcccgccctgaacgacagccggtactgcctgagcagcagactgagagtgtccgccaccttctggcagaacccccggaaccacttcagatgccaggtgcagttctacggcctgagcgagaacgacgagtggacccaggacagagccaagcccgtgacccagatcgtgtctgccgaagcctggggcagagccgattgcggctttaccagcgagagctaccagcagggcgtgctgagcgccaccatcctgtacgagatcctgctgggcaaggccaccctgtacgccgtgctggtgtctgccctggtgctgatggctatggtcaagcggaaggacagccggggaagggccaagcgatctggatctggagcaacaaacttctcactactcaaacaagcaggtgacgtggaggagaatcccgggcctactagtatggactggatttggcgcatccttttccttgtcggcgctgctaccggcgcgcattccgggccccagctccagctgcaagagtctggacctggcctggtcaagcctagcgagacactgagcctgacctgtaccgtgtccggcgatagcatcagcagcggcgattactactggggctggatcagacagcctcctggcaaaggactggaatggatcggccacatctactacagcggcgtgacctactacaaccccagcctgaagtccagagtgaccatcagcgtggacaccagccggaaccagttctccctgaagctgtctagcgtgacagccgccgataccgccgtgtactactgcaccagagaggacagcagcaactggcggagtagaggccagggaacactggtcacagttagctctggatccggcggaggcggaagtggaggcggaggatctggcggcggaggctctttcgaagaagtgcagctggttgaatcaggtggcggcctggttcaacctggcggatctctgagactgagctgtgccgcctctggcttcagcctgacaaattacggcgtgcactgggtccgacaggcccctggaaaaggactggaatgggtgtccgtgatttggagcggcggcagcaccgattacaacgccgccttcatcagccggttcaccatcagcgccgacaccagcaagaataccgcctacctccagatgaactccctgagagccgaggacaccgccgtgtactattgcgccagagaactgatccacgctatggacaactggggccagggaaccctggtcacagtctcttctacgcgtatccagaaccctgatcctgccgtgtaccagctgcgggatagcaagagcagcgacaagagcgtgtgtctgttcaccgacttcgacagccagaccaacgtgtcccagagcaaggactccgacgtgtacatcaccgataagtgcgtgctggacatgcggagcatggacttcaagagcaactccgccgtggcctggtccaacaagtccgatttcgcctgcgccaacgccttcaacaacagcattatccccgaggacacattcttcccaagccccgagagcagctgcgacgtgaagctggtggaaaagagcttcgagacagacaccaacctgaacttccagaacctgagcgtgatcggcttcagaatcctgctgctgaaagtggccggctttaacctgctgatgaccctgcggctgtggtccagc

SEQ ID NO: 2499 - DNA, 2691 bp, Artificial Sequence
  Synthetic Polynucloetide
atggccttaccagtgaccgccttgctcctgccgctggccttgctgctccacgccgccaggccggaagtgcagctggttgaatctggcggaggactggttcagcctggcggatctctgagactgtcttgtgccgccagcggcttcagcttcagcgacttttggatgagctgggtccgacaggcccctggcaaaggacttgaatgggtcgccacaatcagccaggccggcagcgagaaggactacgtggactctgtgaagggcagattcaccatcagccgggacaacgccaagaagtccctgtacctccagatgaacagcctgagagccgaggacaccgccgtgtactattgtgcctctggcgtgtacagcttcgactacagaggccagggcaccctggtcacagtctcttctggtaccggcggaggcggatctggcggcggaggtagcggtggcggaggatctgaattcgacttcgtgatgacacagagccctctgagcctgcctgtgacacctggcgaacctgccagcatcagctgtagaagcagccagagcatcgtgcacagcaacggcaacacctacctggaatggtatctccagaagcctggacagagcccacagctgctgatctacaaggtgtccaacagattcagcggcgtgcccgacagattttctggcagcggctctggcaccgacttcaccctgaagattagcagagtggaagccgaggacgtgggcgtgtactactgcttccaaggctctcacgtgcccctgacctttggacagggcaccaagctggaaatcaagagactcgaggacctgaagaacgtgttcccacctgaggtggccgtgttcgagcctagcgaggccgagatcagccacacccagaaagccaccctcgtgtgcctggctaccggcttctaccccgaccatgtggaactgtcttggtgggtcaacggcaaagaggtgcacagcggcgtgtgtaccgacccccagccactgaaagaacagcccgccctgaacgacagccggtactgcctgagcagcagactgagagtgtccgccaccttctggcagaacccccggaaccacttcagatgccaggtgcagttctacggcctgagcgagaacgacgagtggacccaggacagagccaagcccgtgacccagatcgtgtctgccgaagcctggggcagagccgattgcggctttaccagcgagagctaccagcagggcgtgctgagcgccaccatcctgtacgagatcctgctgggcaaggccaccctgtacgccgtgctggtgtctgccctggtgctgatggctatggtcaagcggaaggacagccggggaagggccaagcgatctggatctggagcaacaaacttctcactactcaaacaagcaggtgacgtggaggagaatcccgggcctactagtatggactggatttggcgcatccttttccttgtcggcgctgctaccggcgcgcattccgggccccagctccagctgcaagagtctggacctggcctggtcaagcctagcgagacactgagcctgacctgtaccgtgtccggcgatagcatcagcagcggcgattactactggggctggatcagacagcctcctggcaaaggactggaatggatcggccacatctactacagcggcgtgacctactacaaccccagcctgaagtccagagtgaccatcagcgtggacaccagccggaaccagttctccctgaagctgtctagcgtgacagccgccgataccgccgtgtactactgcaccagagaggacagcagcaactggcggagtagaggccagggaacactggtcacagttagctctggatccggcggaggcggaagtggaggcggaggatctggcggcggaggctctttcgaagaagtgcagctggttgaaagcggagccgaagtgaagaaacctggggcctctgtgaaggtgtcctgcaaggccagcggctacacctttaccagctactggattcactgggtccgacaggcccctggacaaggacttgagtggatgggcgagaacgacccctccaacggcaggaccaactacaacgagaagttcaagaaccgcgtgaccctgaccgtggacaccagcatctctaccgcctacatggaactgagccggctgagatccgatgacaccgccgtgtactattgcgccagaggacccaactacttttacagcatggactactggggccagggcacaatggtcaccgttagctctacgcgtatccagaaccctgatcctgccgtgtaccagctgcgggatagcaagagcagcgacaagagcgtgtgtctgttcaccgacttcgacagccagaccaacgtgtcccagagcaaggactccgacgtgtacatcaccgataagtgcgtgctggacatgcggagcatggacttcaagagcaactccgccgtggcctggtccaacaagtccgatttcgcctgcgccaacgccttcaacaacagcattatccccgaggacacattcttcccaagccccgagagcagctgcgacgtgaagctggtggaaaagagcttcgagacagacaccaacctgaacttccagaacctgagcgtgatcggcttcagaatcctgctgctgaaagtggccggctttaacctgctgatgaccctgcggctgtggtccagc

SEQ ID NO: 2500 - DNA, 2670 bp, Artificial Sequence
  Synthetic Polynucloetide
atggccttaccagtgaccgccttgctcctgccgctggccttgctgctccacgccgccaggccggaagtgcagctggttgaatctggcggaggactggttcagcctggcggatctctgagactgtcttgtgccgccagcggcttcagcttcagcgacttttggatgagctgggtccgacaggcccctggcaaaggacttgaatgggtcgccacaatcagccaggccggcagcgagaaggactacgtggactctgtgaagggcagattcaccatcagccgggacaacgccaagaagtccctgtacctccagatgaacagcctgagagccgaggacaccgccgtgtactattgtgcctctggcgtgtacagcttcgactacagaggccagggcaccctggtcacagtctcttctggtaccggcggaggcggatctggcggcggaggtagcggtggcggaggatctgaattcgacatccagctgactcagagccctagctttctgagcgccagcgtgggcgacagagtgaccatcacatgtagcgccagatccagcatcagcttcatgtactggtatcagcagaagcccggcaaggcccctaagctgctgatctacgacaccagcaatctggcctctggcgtgcccagcagattttctggaagcggcagcggcaccgagttcaccctgacaatctctagcctggaagccgaggatgccgccacctactattgccagcagtggtccagctatcccctgacatttggacagggcaccaagctggaaatcaaactcgaggacctgaagaacgtgttcccacctgaggtggccgtgttcgagcctagcgaggccgagatcagccacacccagaaagccaccctcgtgtgcctggctaccggcttctaccccgaccatgtggaactgtcttggtgggtcaacggcaaagaggtgcacagcggcgtgtgtaccgacccccagccactgaaagaacagcccgccctgaacgacagccggtactgcctgagcagcagactgagagtgtccgccaccttctggcagaacccccggaaccacttcagatgccaggtgcagttctacggcctgagcgagaacgacgagtggacccaggacagagccaagcccgtgacccagatcgtgtctgccgaagcctggggcagagccgattgcggctttaccagcgagagctaccagcagggcgtgctgagcgccaccatcctgtacgagatcctgctgggcaaggccaccctgtacgccgtgctggtgtctgccctggtgctgatggctatggtcaagcggaaggacagccggggaagggccaagcgatctggatctggagcaacaaacttctcactactcaaacaagcaggtgacgtggaggagaatcccgggcctactagtatggactggatttggcgcatccttttccttgtcggcgctgctaccggcgcgcattccgggccccagctccagctgcaagagtctggacctggcctggtcaagcctagcgagacactgagcctgacctgtaccgtgtccggcgatagcatcagcagcggcgattactactggggctggatcagacagcctcctggcaaaggactggaatggatcggccacatctactacagcggcgtgacctactacaaccccagcctgaagtccagagtgaccatcagcgtggacaccagccggaaccagttctccctgaagctgtctagcgtgacagccgccgataccgccgtgtactactgcaccagagaggacagcagcaactggcggagtagaggccagggaacactggtcacagttagctctggatccggcggaggcggaagtggaggcggaggatctggcggcggaggctctttcgaacaggttcagctggttcagtctggggccgaagtgaagaaacctggggcctctgtgaaggtgtcctgcaaggcttccggctacacctttaccggctcttggatgaactgggtccgacaggctcctggacagggactcgaatggatcggcagaatctatcctggcgacggcgagacaaactacaacggcaagttcaaggaccgcgtgacaatcaccgccgacaagagcacaagcaccgcctacatggaactgagcagcctgcggagcgaagataccgccgtgtactactgcgcccggatctacggcaacaacgtgtacttcgatgtgtggggccagggcacaaccgtgacagtctcttctacgcgtatccagaaccctgatcctgccgtgtaccagctgcgggatagcaagagcagcgacaagagcgtgtgtctgttcaccgacttcgacagccagaccaacgtgtcccagagcaaggactccgacgtgtacatcaccgataagtgcgtgctggacatgcggagcatggacttcaagagcaactccgccgtggcctggtccaacaagtccgatttcgcctgcgccaacgccttcaacaacagcattatccccgaggacacattcttcccaagccccgagagcagctgcgacgtgaagctggtggaaaagagcttcgagacagacaccaacctgaacttccagaacctgagcgtgatcggcttcagaatcctgctgctgaaagtggccggctttaacctgctgatgaccctgcggctgtggtccagc

SEQ ID NO: 2501 - DNA, 2694 bp, Artificial Sequence
  Synthetic Polynucloetide
atggccttaccagtgaccgccttgctcctgccgctggccttgctgctccacgccgccaggccggaagtgcagctggttgaatctggcggaggactggttcagcctggcggatctctgagactgtcttgtgccgccagcggcttcagcttcagcgacttttggatgagctgggtccgacaggcccctggcaaaggacttgaatgggtcgccacaatcagccaggccggcagcgagaaggactacgtggactctgtgaagggcagattcaccatcagccgggacaacgccaagaagtccctgtacctccagatgaacagcctgagagccgaggacaccgccgtgtactattgtgcctctggcgtgtacagcttcgactacagaggccagggcaccctggtcacagtctcttctggtaccggcggaggcggatctggcggcggaggtagcggtggcggaggatctgaattccagctggtgctgacacagtctccaagcgcctctgccagcctgggatctagcgtgaagctgacctgtacactgagcagcggccacaagaccgacaccatcgactggtatcagcagcagcctggcaaggcccctagatacctgatgaagctggaaggcagcggcagctacaacaaaggctctggcgtgcccgatagattcagcggcagttcttctggcgctgattggtatctgaccatcagcagcctccagagcgaggacgaggccgattactactgcggcacagactaccccggcaactacctgtttggcggcggaacacagctgacagtgcttggcctcgaggacctgaagaacgtgttcccacctgaggtggccgtgttcgagcctagcgaggccgagatcagccacacccagaaagccaccctcgtgtgcctggctaccggcttctaccccgaccatgtggaactgtcttggtgggtcaacggcaaagaggtgcacagcggcgtgtgtaccgacccccagccactgaaagaacagcccgccctgaacgacagccggtactgcctgagcagcagactgagagtgtccgccaccttctggcagaacccccggaaccacttcagatgccaggtgcagttctacggcctgagcgagaacgacgagtggacccaggacagagccaagcccgtgacccagatcgtgtctgccgaagcctggggcagagccgattgcggctttaccagcgagagctaccagcagggcgtgctgagcgccaccatcctgtacgagatcctgctgggcaaggccaccctgtacgccgtgctggtgtctgccctggtgctgatggctatggtcaagcggaaggacagccggggaagggccaagcgatctggatctggagcaacaaacttctcactactcaaacaagcaggtgacgtggaggagaatcccgggcctactagtatggactggatttggcgcatccttttccttgtcggcgctgctaccggcgcgcattccgggccccagctccagctgcaagagtctggacctggcctggtcaagcctagcgagacactgagcctgacctgtaccgtgtccggcgatagcatcagcagcggcgattactactggggctggatcagacagcctcctggcaaaggactggaatggatcggccacatctactacagcggcgtgacctactacaaccccagcctgaagtccagagtgaccatcagcgtggacaccagccggaaccagttctccctgaagctgtctagcgtgacagccgccgataccgccgtgtactactgcaccagagaggacagcagcaactggcggagtagaggccagggaacactggtcacagttagctctggatccggcggaggcggaagtggaggcggaggatctggcggcggaggctctttcgaacaagaacagctggttgaaagcggcggaggactggttcaacctggcggttctctgagactgagctgtgccgccagcggcttcaccttcagcgactactacatgagctggatcagacaggccccaggcaaaggactggaatgggtcgccacaatctaccccagcagcggcaagacctactacgccgattctgccaagggcagactgaccatctccagcgacaacgccaaggacagcctgtacctccagatgaacagcctgagagccgaggacaccgccgtgtactactgcaccagagatagctacgccgacgacgccgctctgtttgacatttggggccagggcaccaccgtgaccgtttcttctacgcgtatccagaaccctgatcctgccgtgtaccagctgcgggatagcaagagcagcgacaagagcgtgtgtctgttcaccgacttcgacagccagaccaacgtgtcccagagcaaggactccgacgtgtacatcaccgataagtgcgtgctggacatgcggagcatggacttcaagagcaactccgccgtggcctggtccaacaagtccgatttcgcctgcgccaacgccttcaacaacagcattatccccgaggacacattcttcccaagccccgagagcagctgcgacgtgaagctggtggaaaagagcttcgagacagacaccaacctgaacttccagaacctgagcgtgatcggcttcagaatcctgctgctgaaagtggccggctttaacctgctgatgaccctgcggctgtggtccagc

SEQ ID NO: 2502 - DNA, 2659 bp, Artificial Sequence
  Synthetic Polynucloetide
atggccttaccagtgaccgccttgctcctgccgctggccttgctgctccacgccgccaggccggaagtgcagctggttgaatctggcggaggactggttcagcctggcggatctctgagactgtcttgtgccgccagcggcttcagcttcagcgacttttggatgagctgggtccgacaggcccctggcaaaggacttgaatgggtcgccacaatcagccaggccggcagcgagaaggactacgtggactctgtgaagggcagattcaccatcagccgggacaacgccaagaagtccctgtacctccagatgaacagcctgagagccgaggacaccgccgtgtactattgtgcctctggcgtgtacagcttcgactacagaggccagggcaccctggtcacagtctcttctggtaccggcggaggcggatctggcggcggaggtagcggtggcggaggatctgaattcgagattgtgttgacacagtctcccgataccctgtcactgtcacccggcgagaaggcaacgctgagttgcagagcaagccagtcagtctcctcttcttttctggcctggtatcagcaaaaaccaggtcaggcaccatctctcctgatttacgttgccagcagacgggcggctggcattcccgacaggttctctggaagcggatctgggaccgattttaccctgacaattagccgcttggagcccgaagactttggtatgttttactgccagcactacggaaggacacctttcacatttggcccggctcgaggacctgaagaacgtgttcccacctgaggtggccgtgttcgagcctagcgaggccgagatcagccacacccagaaagccaccctcgtgtgcctggctaccggcttctaccccgaccatgtggaactgtcttggtgggtcaacggcaaagaggtgcacagcggcgtgtgtaccgacccccagccactgaaagaacagcccgccctgaacgacagccggtactgcctgagcagcagactgagagtgtccgccaccttctggcagaacccccggaaccacttcagatgccaggtgcagttctacggcctgagcgagaacgacgagtggacccaggacagagccaagcccgtgacccagatcgtgtctgccgaagcctggggcagagccgattgcggctttaccagcgagagctaccagcagggcgtgctgagcgccaccatcctgtacgagatcctgctgggcaaggccaccctgtacgccgtgctggtgtctgccctggtgctgatggctatggtcaagcggaaggacagccggggaagggccaagcgatctggatctggagcaacaaacttctcactactcaaacaagcaggtgacgtggaggagaatcccgggcctactagtatggactggatttggcgcatccttttccttgtcggcgctgctaccggcgcgcattccgggccccagctccagctgcaagagtctggacctggcctggtcaagcctagcgagacactgagcctgacctgtaccgtgtccggcgatagcatcagcagcggcgattactactggggctggatcagacagcctcctggcaaaggactggaatggatcggccacatctactacagcggcgtgacctactacaaccccagcctgaagtccagagtgaccatcagcgtggacaccagccggaaccagttctccctgaagctgtctagcgtgacagccgccgataccgccgtgtactactgcaccagagaggacagcagcaactggcggagtagaggccagggaacactggtcacagttagctctggatccggcggaggcggaagtggaggcggaggatctggcggcggaggctctttcgaacagatccagttggtggaatcagggggcggtgtggtgcagccgggtaggagcctgagactgtcatgcgtggcgtctggcttcacattcaagaactacggcatgcactgggtgcgacaggcccccggaaagggtttggagtgggtcgccgtgatctggtacgacggatctaatgagtattacggagatcctgtgaagggaaggttcaccatctcccgcgacaatagcaaaaatatgctctacctgcaaatgaactcactcagggcggatgatacggcggtctactattgcgctcgctcagggattgctgtggccggcgcattcgattactggggacagggtaccctggtgacagtatcaagcacgcgtatccagaaccctgatcctgccgtgtaccagctgcgggatagcaagagcagcgacaagagcgtgtgtctgttcaccgacttcgacagccagaccaacgtgtcccagagcaaggactccgacgtgtacatcaccgataagtgcgtgctggacatgcggagcatggacttcaagagcaactccgccgtggcctggtccaacaagtccgatttcgcctgcgccaacgccttcaacaacagcattatccccgaggacacattcttcccaagccccgagagcagctgcgacgtgaagctggtggaaaagagcttcgagacagacaccaacctgaacttccagaacctgagcgtgatcggcttcagaatcctgctgctgaaagtggccggctttaacctgctgatgaccctgcggctgtggtccagc

SEQ ID NO: 2503 - DNA, 2708 bp, Artificial Sequence
  Synthetic Polynucloetide
atggccttaccagtgaccgccttgctcctgccgctggccttgctgctccacgccgccaggccggaagtgcagctggttgaatctggcggaggactggttcagcctggcggatctctgagactgtcttgtgccgccagcggcttcagcttcagcgacttttggatgagctgggtccgacaggcccctggcaaaggacttgaatgggtcgccacaatcagccaggccggcagcgagaaggactacgtggactctgtgaagggcagattcaccatcagccgggacaacgccaagaagtccctgtacctccagatgaacagcctgagagccgaggacaccgccgtgtactattgtgcctctggcgtgtacagcttcgactacagaggccagggcaccctggtcacagtctcttctggtaccggcggaggcggatctggcggcggaggtagcggtggcggaggatctgaattcgacattcagatgacccaaagcccgtccagcctgtccgccagcctgggagatagagtgacaatcacgtgtagagcttcccaagggataagaaatgatctcgggtggtatcagcagaagcccggcaaagcccccaaaaggcttatatatgctagtagtacactgcagtctggagttccttcccgattttcaggtagcggctccggtacagagttcaccctcacgataagctcactccagcctgaggatttcgcaacgtactactgcctccagcacaacaattttccctggactttcggccagggcaccaaggtggagatcaagaggctcgaggacctgaagaacgtgttcccacctgaggtggccgtgttcgagcctagcgaggccgagatcagccacacccagaaagccaccctcgtgtgcctggctaccggcttctaccccgaccatgtggaactgtcttggtgggtcaacggcaaagaggtgcacagcggcgtgtgtaccgacccccagccactgaaagaacagcccgccctgaacgacagccggtactgcctgagcagcagactgagagtgtccgccaccttctggcagaacccccggaaccacttcagatgccaggtgcagttctacggcctgagcgagaacgacgagtggacccaggacagagccaagcccgtgacccagatcgtgtctgccgaagcctggggcagagccgattgcggctttaccagcgagagctaccagcagggcgtgctgagcgccaccatcctgtacgagatcctgctgggcaaggccaccctgtacgccgtgctggtgtctgccctggtgctgatggctatggtcaagcggaaggacagccggggaagggccaagcgatctggatctggagcaacaaacttctcactactcaaacaagcaggtgacgtggaggagaatcccgggcctactagtatggactggatttggcgcatccttttccttgtcggcgctgctaccggcgcgcattccgggccccagctccagctgcaagagtctggacctggcctggtcaagcctagcgagacactgagcctgacctgtaccgtgtccggcgatagcatcagcagcggcgattactactggggctggatcagacagcctcctggcaaaggactggaatggatcggccacatctactacagcggcgtgacctactacaaccccagcctgaagtccagagtgaccatcagcgtggacaccagccggaaccagttctccctgaagctgtctagcgtgacagccgccgataccgccgtgtactactgcaccagagaggacagcagcaactggcggagtagaggccagggaacactggtcacagttagctctggatccggcggaggcggaagtggaggcggaggatctggcggcggaggctctttcgaacacgcccgcaagttactttgaaggagtctggacctgtactggtgaagccaaccgagacactgacactcacgtgtacagtgagtggtttttccttgatcaacgcaaggatgggcgtcagctggatcaggcaaccccctggcaaggctctggaatggctcgctcacatattcagcaatgccgaaaaaagctaccggacaagcctgaaatcccgcctgactatttccaaggacacttctaagtctcaggtggtgctgaccatgaccaacatggacccggtggacaccgccacctattactgcgcaagaatccctgggtatggtgggaatggtgactaccattattatgggatggatgtgtgggggcaaggcacaaccgtaacggtctcaagcacgcgtatccagaaccctgatcctgccgtgtaccagctgcgggatagcaagagcagcgacaagagcgtgtgtctgttcaccgacttcgacagccagaccaacgtgtcccagagcaaggactccgacgtgtacatcaccgataagtgcgtgctggacatgcggagcatggacttcaagagcaactccgccgtggcctggtccaacaagtccgatttcgcctgcgccaacgccttcaacaacagcattatccccgaggacacattcttcccaagccccgagagcagctgcgacgtgaagctggtggaaaagagcttcgagacagacaccaacctgaacttccagaacctgagcgtgatcggcttcagaatcctgctgctgaaagtggccggctttaacctgctgatgaccctgcggctgtggtccagc

SEQ ID NO: 2504 - DNA, 2679 bp, Artificial Sequence
  Synthetic Polynucloetide
atggccttaccagtgaccgccttgctcctgccgctggccttgctgctccacgccgccaggccggaagtgcagctggttgaatctggcggaggactggttcagcctggcggatctctgagactgtcttgtgccgccagcggcttcagcttcagcgacttttggatgagctgggtccgacaggcccctggcaaaggacttgaatgggtcgccacaatcagccaggccggcagcgagaaggactacgtggactctgtgaagggcagattcaccatcagccgggacaacgccaagaagtccctgtacctccagatgaacagcctgagagccgaggacaccgccgtgtactattgtgcctctggcgtgtacagcttcgactacagaggccagggcaccctggtcacagtctcttctggtaccggcggaggcggatctggcggcggaggtagcggtggcggaggatctgaattcgacatcgtgctgacacagagccctccaagcctggctatgagcctgggaaagagagccaccatcagctgtagagccagcgagagcgtgacaatcctgggctctcacctgatccactggtatcagcagaagcccggccagcctcctacactgctgattcagctggcctccaatgtgcagacaggcgtgccagccagattttctggcagcggcagcagaaccgacttcaccctgaccattgatcccgtggaagaggacgacgtggccgtgtactactgcctccagagcagaacaatccccagaacctttggcggaggcaccaagctggaaatcaaactcgaggacctgaagaacgtgttcccacctgaggtggccgtgttcgagcctagcgaggccgagatcagccacacccagaaagccaccctcgtgtgcctggctaccggcttctaccccgaccatgtggaactgtcttggtgggtcaacggcaaagaggtgcacagcggcgtgtgtaccgacccccagccactgaaagaacagcccgccctgaacgacagccggtactgcctgagcagcagactgagagtgtccgccaccttctggcagaacccccggaaccacttcagatgccaggtgcagttctacggcctgagcgagaacgacgagtggacccaggacagagccaagcccgtgacccagatcgtgtctgccgaagcctggggcagagccgattgcggctttaccagcgagagctaccagcagggcgtgctgagcgccaccatcctgtacgagatcctgctgggcaaggccaccctgtacgccgtgctggtgtctgccctggtgctgatggctatggtcaagcggaaggacagccggggaagggccaagcgatctggatctggagcaacaaacttctcactactcaaacaagcaggtgacgtggaggagaatcccgggcctactagtatggactggatttggcgcatccttttccttgtcggcgctgctaccggcgcgcattccgggccccagctccagctgcaagagtctggacctggcctggtcaagcctagcgagacactgagcctgacctgtaccgtgtccggcgatagcatcagcagcggcgattactactggggctggatcagacagcctcctggcaaaggactggaatggatcggccacatctactacagcggcgtgacctactacaaccccagcctgaagtccagagtgaccatcagcgtggacaccagccggaaccagttctccctgaagctgtctagcgtgacagccgccgataccgccgtgtactactgcaccagagaggacagcagcaactggcggagtagaggccagggaacactggtcacagttagctctggatccggcggaggcggaagtggaggcggaggatctggcggcggaggctctttcgaacaaatccagctggtgcagtctggccccgagctgaagaaacctggcgagacagtgaagatcagctgcaaggccagcggctacaccttcaccgactacagcatcaactgggtcaagagagcccctggcaagggcctgaaatggatgggctggatcaacaccgaaaccagagagcccgcctacgcctacgacttcagaggcagattcgccttcagcctggaaaccagcgccagcacagcctacctccagatcaacaacctgaagtacgaggacaccgccacctacttttgcgccctggactacagctacgctatggactattggggccagggcaccagcgtgacagtctcttctacgcgtatccagaaccctgatcctgccgtgtaccagctgcgggatagcaagagcagcgacaagagcgtgtgtctgttcaccgacttcgacagccagaccaacgtgtcccagagcaaggactccgacgtgtacatcaccgataagtgcgtgctggacatgcggagcatggacttcaagagcaactccgccgtggcctggtccaacaagtccgatttcgcctgcgccaacgccttcaacaacagcattatccccgaggacacattcttcccaagccccgagagcagctgcgacgtgaagctggtggaaaagagcttcgagacagacaccaacctgaacttccagaacctgagcgtgatcggcttcagaatcctgctgctgaaagtggccggctttaacctgctgatgaccctgcggctgtggtccagc

SEQ ID NO: 2505 - DNA, 2684 bp, Artificial Sequence
  Synthetic Polynucloetide
atggccttaccagtgaccgccttgctcctgccgctggccttgctgctccacgccgccaggccggaagtgcagctggttgaatctggcggaggactggttcagcctggcggatctctgagactgtcttgtgccgccagcggcttcagcttcagcgacttttggatgagctgggtccgacaggcccctggcaaaggacttgaatgggtcgccacaatcagccaggccggcagcgagaaggactacgtggactctgtgaagggcagattcaccatcagccgggacaacgccaagaagtccctgtacctccagatgaacagcctgagagccgaggacaccgccgtgtactattgtgcctctggcgtgtacagcttcgactacagaggccagggcaccctggtcacagtctcttctggtaccggcggaggcggatctggcggcggaggtagcggtggcggaggatctgaattcgatattcaactgacacaatcccccagctcactcagcgccagcgtgggggacagggttagctttacctgtcaagcctctcaggatataaataactttctgaactggtatcaacagaagcctgggaaggcgcccaaactcctgatctatgatgcgtccaacctggaaactggcgtgccttcacgctttagcggctctggcagtggtacagacttcacttttaccatctcttcacttcagccggaggacatcgccacatattactgtcaacagtacggaaacttgccctttacttttggaggcggcaccaaagttgaaatcaaaagctcgaggacctgaagaacgtgttcccacctgaggtggccgtgttcgagcctagcgaggccgagatcagccacacccagaaagccaccctcgtgtgcctggctaccggcttctaccccgaccatgtggaactgtcttggtgggtcaacggcaaagaggtgcacagcggcgtgtgtaccgacccccagccactgaaagaacagcccgccctgaacgacagccggtactgcctgagcagcagactgagagtgtccgccaccttctggcagaacccccggaaccacttcagatgccaggtgcagttctacggcctgagcgagaacgacgagtggacccaggacagagccaagcccgtgacccagatcgtgtctgccgaagcctggggcagagccgattgcggctttaccagcgagagctaccagcagggcgtgctgagcgccaccatcctgtacgagatcctgctgggcaaggccaccctgtacgccgtgctggtgtctgccctggtgctgatggctatggtcaagcggaaggacagccggggaagggccaagcgatctggatctggagcaacaaacttctcactactcaaacaagcaggtgacgtggaggagaatcccgggcctactagtatggactggatttggcgcatccttttccttgtcggcgctgctaccggcgcgcattccgggccccagctccagctgcaagagtctggacctggcctggtcaagcctagcgagacactgagcctgacctgtaccgtgtccggcgatagcatcagcagcggcgattactactggggctggatcagacagcctcctggcaaaggactggaatggatcggccacatctactacagcggcgtgacctactacaaccccagcctgaagtccagagtgaccatcagcgtggacaccagccggaaccagttctccctgaagctgtctagcgtgacagccgccgataccgccgtgtactactgcaccagagaggacagcagcaactggcggagtagaggccagggaacactggtcacagttagctctggatccggcggaggcggaagtggaggcggaggatctggcggcggaggctctttcgaacaggtccaactgcaagaaagcggacccggactggtgaagccttctgagacacttagtctgacgtgcacggtcagtggcggctccatctcctcctattattggtcatggatacgacaacccccaggtaagggcctggaatggattggctatatctactattcaggaagcacgaactacaatcccagcctgaagtcccgagtgacaatttcagtagataccagtaaaaaccagttcagtcttaaactgtcaagcgtgacagctgccgacaccgctgtgtattactgcgtctcactggtgtattgtggaggggattgttatagcgggttcgattattggggacagggaaccctggtgactgtatcttccacgcgtatccagaaccctgatcctgccgtgtaccagctgcgggatagcaagagcagcgacaagagcgtgtgtctgttcaccgacttcgacagccagaccaacgtgtcccagagcaaggactccgacgtgtacatcaccgataagtgcgtgctggacatgcggagcatggacttcaagagcaactccgccgtggcctggtccaacaagtccgatttcgcctgcgccaacgccttcaacaacagcattatccccgaggacacattcttcccaagccccgagagcagctgcgacgtgaagctggtggaaaagagcttcgagacagacaccaacctgaacttccagaacctgagcgtgatcggcttcagaatcctgctgctgaaagtggccggctttaacctgctgatgaccctgcggctgtggtccagc

SEQ ID NO: 2506 - DNA, 2691 bp, Artificial Sequence
  Synthetic Polynucloetide
atggccttaccagtgaccgccttgctcctgccgctggccttgctgctccacgccgccaggccggaagtgcagctggttgaatctggcggaggactggttcagcctggcggatctctgagactgtcttgtgccgccagcggcttcagcttcagcgacttttggatgagctgggtccgacaggcccctggcaaaggacttgaatgggtcgccacaatcagccaggccggcagcgagaaggactacgtggactctgtgaagggcagattcaccatcagccgggacaacgccaagaagtccctgtacctccagatgaacagcctgagagccgaggacaccgccgtgtactattgtgcctctggcgtgtacagcttcgactacagaggccagggcaccctggtcacagtctcttctggtaccggcggaggcggatctggcggcggaggtagcggtggcggaggatctgaattcgatatccagctcactcaaagcccctctagtctctctgcctcagtgggggatcgggtcagttttacttgtcaagcttcacaggatatcaacaacttccttaattggtatcagcagaagccaggaaaagcacccaagctgctcatctatgatgcctcaaatttggagacgggtgttcccagtcgattctctgggtcagggtccgggaccgactttacgtttacgatctcctctctgcagcccgaagacatcgccacatactattgtcaacagtacggcaacttgcctttcacatttgggggcgggactaaggttgaaatcaagaggctcgaggacctgaagaacgtgttcccacctgaggtggccgtgttcgagcctagcgaggccgagatcagccacacccagaaagccaccctcgtgtgcctggctaccggcttctaccccgaccatgtggaactgtcttggtgggtcaacggcaaagaggtgcacagcggcgtgtgtaccgacccccagccactgaaagaacagcccgccctgaacgacagccggtactgcctgagcagcagactgagagtgtccgccaccttctggcagaacccccggaaccacttcagatgccaggtgcagttctacggcctgagcgagaacgacgagtggacccaggacagagccaagcccgtgacccagatcgtgtctgccgaagcctggggcagagccgattgcggctttaccagcgagagctaccagcagggcgtgctgagcgccaccatcctgtacgagatcctgctgggcaaggccaccctgtacgccgtgctggtgtctgccctggtgctgatggctatggtcaagcggaaggacagccggggaagggccaagcgatctggatctggagcaacaaacttctcactactcaaacaagcaggtgacgtggaggagaatcccgggcctactagtatggactggatttggcgcatccttttccttgtcggcgctgctaccggcgcgcattccgggccccagctccagctgcaagagtctggacctggcctggtcaagcctagcgagacactgagcctgacctgtaccgtgtccggcgatagcatcagcagcggcgattactactggggctggatcagacagcctcctggcaaaggactggaatggatcggccacatctactacagcggcgtgacctactacaaccccagcctgaagtccagagtgaccatcagcgtggacaccagccggaaccagttctccctgaagctgtctagcgtgacagccgccgataccgccgtgtactactgcaccagagaggacagcagcaactggcggagtagaggccagggaacactggtcacagttagctctggatccggcggaggcggaagtggaggcggaggatctggcggcggaggctctttcgaacaggtacagctgcaggaatctgggcccggacttgtcaagccaagtcagacactttctcttacatgtaccgtgagcggcggaagtataagcagtggaggcttttactggtcttggatacggcagcacccaggcaaaggcttggagtggattggatacattcatcattcaggatctacacactataatccatcccttaagtcccgggtcaccattagcattgatacgtctaagaatctgttcagtctcaggctgtcctccgtcactgctgccgacacagccgtgtactactgcgcctccttggtttactgcggaggcgactgttatagcggctttgattattgggggcaggggaccctcgtaaccgtgagctctacgcgtatccagaaccctgatcctgccgtgtaccagctgcgggatagcaagagcagcgacaagagcgtgtgtctgttcaccgacttcgacagccagaccaacgtgtcccagagcaaggactccgacgtgtacatcaccgataagtgcgtgctggacatgcggagcatggacttcaagagcaactccgccgtggcctggtccaacaagtccgatttcgcctgcgccaacgccttcaacaacagcattatccccgaggacacattcttcccaagccccgagagcagctgcgacgtgaagctggtggaaaagagcttcgagacagacaccaacctgaacttccagaacctgagcgtgatcggcttcagaatcctgctgctgaaagtggccggctttaacctgctgatgaccctgcggctgtggtccagc

SEQ ID NO: 2507 - DNA, 2679 bp, Artificial Sequence
  Synthetic Polynucloetide
atggccttaccagtgaccgccttgctcctgccgctggccttgctgctccacgccgccaggccggaagtgcagctggttgaatctggcggaggactggttcagcctggcggatctctgagactgtcttgtgccgccagcggcttcagcttcagcgacttttggatgagctgggtccgacaggcccctggcaaaggacttgaatgggtcgccacaatcagccaggccggcagcgagaaggactacgtggactctgtgaagggcagattcaccatcagccgggacaacgccaagaagtccctgtacctccagatgaacagcctgagagccgaggacaccgccgtgtactattgtgcctctggcgtgtacagcttcgactacagaggccagggcaccctggtcacagtctcttctggtaccggcggaggcggatctggcggcggaggtagcggtggcggaggatctgaattcgacattcagatgacacagagccctagcagcctgagcgcctctgtgggagacagagtgaccatcacatgcaagagcagccagagcgtgctgtactccagcaatcagaagaactacctggcctggttccagcagaagcctggcaaggctcctaagctgctgatctactgggccagcaccagagaaagcggcgtgccaagcagattttctggcagcggctctggcaccgacttcaccctgacaatatccagcctccagcctgaggacttcgccacctacttttgccaccagtacctgagcagctacacattcggacagggcaccaaggtggaaatcaagcggctcgaggacctgaagaacgtgttcccacctgaggtggccgtgttcgagcctagcgaggccgagatcagccacacccagaaagccaccctcgtgtgcctggctaccggcttctaccccgaccatgtggaactgtcttggtgggtcaacggcaaagaggtgcacagcggcgtgtgtaccgacccccagccactgaaagaacagcccgccctgaacgacagccggtactgcctgagcagcagactgagagtgtccgccaccttctggcagaacccccggaaccacttcagatgccaggtgcagttctacggcctgagcgagaacgacgagtggacccaggacagagccaagcccgtgacccagatcgtgtctgccgaagcctggggcagagccgattgcggctttaccagcgagagctaccagcagggcgtgctgagcgccaccatcctgtacgagatcctgctgggcaaggccaccctgtacgccgtgctggtgtctgccctggtgctgatggctatggtcaagcggaaggacagccggggaagggccaagcgatctggatctggagcaacaaacttctcactactcaaacaagcaggtgacgtggaggagaatcccgggcctactagtatggactggatttggcgcatccttttccttgtcggcgctgctaccggcgcgcattccgggccccagctccagctgcaagagtctggacctggcctggtcaagcctagcgagacactgagcctgacctgtaccgtgtccggcgatagcatcagcagcggcgattactactggggctggatcagacagcctcctggcaaaggactggaatggatcggccacatctactacagcggcgtgacctactacaaccccagcctgaagtccagagtgaccatcagcgtggacaccagccggaaccagttctccctgaagctgtctagcgtgacagccgccgataccgccgtgtactactgcaccagagaggacagcagcaactggcggagtagaggccagggaacactggtcacagttagctctggatccggcggaggcggaagtggaggcggaggatctggcggcggaggctctttcgaagaggtgcagctggttgaatctggcggaggactggttcagcctggcggatctctgagactgtcttgtgccgccagcggctacaccttcaccacctattggatgcactgggtccgacaggcccctggcaaaggacttgagtgggtcggatatatcaggcccagcaccggctacacagagtacaaccagaagttcaaggaccgcttcaccatcagcgccgacaccagcaagaataccgcctacctccagatgaacagcctgagagccgaggacaccgccgtgtactactgtgccagatccagatggctgctggactattggggccagggcacactggttacagtttctacgcgtatccagaaccctgatcctgccgtgtaccagctgcgggatagcaagagcagcgacaagagcgtgtgtctgttcaccgacttcgacagccagaccaacgtgtcccagagcaaggactccgacgtgtacatcaccgataagtgcgtgctggacatgcggagcatggacttcaagagcaactccgccgtggcctggtccaacaagtccgatttcgcctgcgccaacgccttcaacaacagcattatccccgaggacacattcttcccaagccccgagagcagctgcgacgtgaagctggtggaaaagagcttcgagacagacaccaacctgaacttccagaacctgagcgtgatcggcttcagaatcctgctgctgaaagtggccggctttaacctgctgatgaccctgcggctgtggtccagc

SEQ ID NO: 2508 - DNA, 2670 bp, Artificial Sequence
  Synthetic Polynucloetide
atggccttaccagtgaccgccttgctcctgccgctggccttgctgctccacgccgccaggccggaagtgcagctggttgaatctggcggaggactggttcagcctggcggatctctgagactgtcttgtgccgccagcggcttcagcttcagcgacttttggatgagctgggtccgacaggcccctggcaaaggacttgaatgggtcgccacaatcagccaggccggcagcgagaaggactacgtggactctgtgaagggcagattcaccatcagccgggacaacgccaagaagtccctgtacctccagatgaacagcctgagagccgaggacaccgccgtgtactattgtgcctctggcgtgtacagcttcgactacagaggccagggcaccctggtcacagtctcttctggtaccggcggaggcggatctggcggcggaggtagcggtggcggaggatctgaattcgacatccagatgacacagagccctagcagcctgtctgccagcgtgggagacagagtgaccatcacctgtagagccagccaggacatcagcaactacctgaactggtatcagcagaagcccggcaaggcccctaagctgctgatctactacaccagcagactgcacagcggcgtgcccagcagattttctggctctggcagcggcaccgacttcaccctgacaatatctagcctccagcctgaggacttcgccacctactattgccagcagggcaacaccctgccttacacatttggacagggcaccaaggtggaaatcaagagactcgaggacctgaagaacgtgttcccacctgaggtggccgtgttcgagcctagcgaggccgagatcagccacacccagaaagccaccctcgtgtgcctggctaccggcttctaccccgaccatgtggaactgtcttggtgggtcaacggcaaagaggtgcacagcggcgtgtgtaccgacccccagccactgaaagaacagcccgccctgaacgacagccggtactgcctgagcagcagactgagagtgtccgccaccttctggcagaacccccggaaccacttcagatgccaggtgcagttctacggcctgagcgagaacgacgagtggacccaggacagagccaagcccgtgacccagatcgtgtctgccgaagcctggggcagagccgattgcggctttaccagcgagagctaccagcagggcgtgctgagcgccaccatcctgtacgagatcctgctgggcaaggccaccctgtacgccgtgctggtgtctgccctggtgctgatggctatggtcaagcggaaggacagccggggaagggccaagcgatctggatctggagcaacaaacttctcactactcaaacaagcaggtgacgtggaggagaatcccgggcctactagtatggactggatttggcgcatccttttccttgtcggcgctgctaccggcgcgcattccgggccccagctccagctgcaagagtctggacctggcctggtcaagcctagcgagacactgagcctgacctgtaccgtgtccggcgatagcatcagcagcggcgattactactggggctggatcagacagcctcctggcaaaggactggaatggatcggccacatctactacagcggcgtgacctactacaaccccagcctgaagtccagagtgaccatcagcgtggacaccagccggaaccagttctccctgaagctgtctagcgtgacagccgccgataccgccgtgtactactgcaccagagaggacagcagcaactggcggagtagaggccagggaacactggtcacagttagctctggatccggcggaggcggaagtggaggcggaggatctggcggcggaggctctttcgaagaagtgcagctggttgaatcaggtggcggcctggttcaacctggcggatctctgagactgagctgtgccgccagcggcttcaccttcagcgactactttatgagctgggtccgacaggcccctggcaaaggacttgaatgggtcgccaccatcagcaatggcggcacctacacttactaccccgacagcgtgaagggcagattcaccatctccagagacaacagcaagaacaccctgtacctccagatgaactccctgagagccgaggacaccgccgtgtactactgcgccagattcgacggctacatcttcgactattggggccagggcaccctggtcacagtctcttctacgcgtatccagaaccctgatcctgccgtgtaccagctgcgggatagcaagagcagcgacaagagcgtgtgtctgttcaccgacttcgacagccagaccaacgtgtcccagagcaaggactccgacgtgtacatcaccgataagtgcgtgctggacatgcggagcatggacttcaagagcaactccgccgtggcctggtccaacaagtccgatttcgcctgcgccaacgccttcaacaacagcattatccccgaggacacattcttcccaagccccgagagcagctgcgacgtgaagctggtggaaaagagcttcgagacagacaccaacctgaacttccagaacctgagcgtgatcggcttcagaatcctgctgctgaaagtggccggctttaacctgctgatgaccctgcggctgtggtccagc

SEQ ID NO: 2509 - DNA, 2685 bp, Artificial Sequence
  Synthetic Polynucloetide
atggccttaccagtgaccgccttgctcctgccgctggccttgctgctccacgccgccaggccggaagtgcagctggttgaatctggcggaggactggttcagcctggcggatctctgagactgtcttgtgccgccagcggcttcagcttcagcgacttttggatgagctgggtccgacaggcccctggcaaaggacttgaatgggtcgccacaatcagccaggccggcagcgagaaggactacgtggactctgtgaagggcagattcaccatcagccgggacaacgccaagaagtccctgtacctccagatgaacagcctgagagccgaggacaccgccgtgtactattgtgcctctggcgtgtacagcttcgactacagaggccagggcaccctggtcacagtctcttctggtaccggcggaggcggatctggcggcggaggtagcggtggcggaggatctgaattcgacatccagatgacacagactacatcctccctgtctgcctctctgggagacagagtcaccatcagttgcagggcaagtcaggacattagtaagtacctgaactggtatcagcagaaaccagatggaactgttaaactcctgatctaccatacatcaagattacactcaggagtcccatcaaggttcagtggcagtgggtctggaacagattattctctcaccattagcaacctggagcaagaagatattgccacttacttttgccaacagggtaatacgcttccgtacacgttcggaggggggaccaagctggagatcacactcgagatccagaaccctgatcctgccgtgtaccagctgcgggatagcaagagcagcgacaagagcgtgtgtctgttcaccgacttcgacagccagaccaacgtgtcccagagcaaggactccgacgtgtacatcaccgataagtgcgtgctggacatgcggagcatggacttcaagagcaactccgccgtggcctggtccaacaagtccgatttcgcctgcgccaacgccttcaacaacagcattatccccgaggacacattcttcccaagccccgagagcagctgcgacgtgaagctggtggaaaagagcttcgagacagacaccaacctgaacttccagaacctgagcgtgatcggcttcagaatcctgctgctgaaagtggccggctttaacctgctgatgaccctgcggctgtggtccagccgcgccaagagaagcggatctggcgtgaagcagaccctgaatttcgacctgctgaagctggctggcgacgtggaatccaacccaggccctactagtatggactggatttggcgcatccttttccttgtcggcgctgctaccggcgcgcattccgggccccagctccagctgcaagagtctggacctggcctggtcaagcctagcgagacactgagcctgacctgtaccgtgtccggcgatagcatcagcagcggcgattactactggggctggatcagacagcctcctggcaaaggactggaatggatcggccacatctactacagcggcgtgacctactacaaccccagcctgaagtccagagtgaccatcagcgtggacaccagccggaaccagttctccctgaagctgtctagcgtgacagccgccgataccgccgtgtactactgcaccagagaggacagcagcaactggcggagtagaggccagggaacactggtcacagttagctctggatccggcggaggcggaagtggaggcggaggatctggcggcggaggctctttcgaagtgaaactgcaggagtcaggacctggcctggtggcgccctcacagagcctgtccgtcacatgcactgtctcaggggtctcattacccgactatggtgtaagctggattcgccagcctccacgaaagggtctggagtggctgggagtaatatggggtagtgaaaccacatactataattcagctctcaaatccagactgaccatcatcaaggacaactccaagagccaagttttcttaaaaatgaacagtctgcaaactgatgacacagccatttactactgtgccaaacattattactacggtggtagctatgctatggactactggggccaaggaacctcagtcaccgtctcctcaacgcgtgaggacctgaagaacgtgttcccacctgaggtggccgtgttcgagcctagcgaggccgagatcagccacacccagaaagccaccctcgtgtgcctggctaccggcttctaccccgaccatgtggaactgtcttggtgggtcaacggcaaagaggtgcacagcggcgtgtgtaccgacccccagccactgaaagaacagcccgccctgaacgacagccggtactgcctgagcagcagactgagagtgtccgccaccttctggcagaacccccggaaccacttcagatgccaggtgcagttctacggcctgagcgagaacgacgagtggacccaggacagagccaagcccgtgacccagatcgtgtctgccgaagcctggggcagagccgattgcggctttaccagcgagagctaccagcagggcgtgctgagcgccaccatcctgtacgagatcctgctgggcaaggccaccctgtacgccgtgctggtgtctgccctggtgctgatggctatggtcaagcggaaggacagccgggga

SEQ ID NO: 2510 - DNA, 2688 bp, Artificial Sequence
  Synthetic Polynucloetide
atggccttaccagtgaccgccttgctcctgccgctggccttgctgctccacgccgccaggccggaagtgcagctggttgaatctggcggaggactggttcagcctggcggatctctgagactgtcttgtgccgccagcggcttcagcttcagcgacttttggatgagctgggtccgacaggcccctggcaaaggacttgaatgggtcgccacaatcagccaggccggcagcgagaaggactacgtggactctgtgaagggcagattcaccatcagccgggacaacgccaagaagtccctgtacctccagatgaacagcctgagagccgaggacaccgccgtgtactattgtgcctctggcgtgtacagcttcgactacagaggccagggcaccctggtcacagtctcttctggtaccggcggaggcggatctggcggcggaggtagcggtggcggaggatctgaattcgagatcgtgatgacccagagccctgccaccctgtctctgagccctggcgaaagagccaccctgagctgtagagccagccaggacatcagcaagtacctgaactggtatcagcagaagcccggccaggcccccagactgctgatctaccacaccagcagactgcacagcggcatccccgccagattttctggctctggcagcggcaccgactacaccctgacaatcagcagcctccagcccgaggacttcgccgtgtacttctgtcagcaaggcaacaccctgccctacaccttcggccagggcaccaagctggaaatcaagctcgagatccagaaccctgatcctgccgtgtaccagctgcgggatagcaagagcagcgacaagagcgtgtgtctgttcaccgacttcgacagccagaccaacgtgtcccagagcaaggactccgacgtgtacatcaccgataagtgcgtgctggacatgcggagcatggacttcaagagcaactccgccgtggcctggtccaacaagtccgatttcgcctgcgccaacgccttcaacaacagcattatccccgaggacacattcttcccaagccccgagagcagctgcgacgtgaagctggtggaaaagagcttcgagacagacaccaacctgaacttccagaacctgagcgtgatcggcttcagaatcctgctgctgaaagtggccggctttaacctgctgatgaccctgcggctgtggtccagccgcgccaagagaagcggatctggcgtgaagcagaccctgaatttcgacctgctgaagctggctggcgacgtggaatccaacccaggccctactagtatggactggatttggcgcatccttttccttgtcggcgctgctaccggcgcgcattccgggccccagctccagctgcaagagtctggacctggcctggtcaagcctagcgagacactgagcctgacctgtaccgtgtccggcgatagcatcagcagcggcgattactactggggctggatcagacagcctcctggcaaaggactggaatggatcggccacatctactacagcggcgtgacctactacaaccccagcctgaagtccagagtgaccatcagcgtggacaccagccggaaccagttctccctgaagctgtctagcgtgacagccgccgataccgccgtgtactactgcaccagagaggacagcagcaactggcggagtagaggccagggaacactggtcacagttagctctggatccggcggaggcggaagtggaggcggaggatctggcggcggaggctctttcgaacaggtgcaactccaggaatctggccctggcctcgtgaagcccagcgagacactgagcctgacctgtaccgtgtccggcgtgtccctgcctgactatggcgtgtcctggatcagacagccccctggcaagggcctggaatggatcggagtgatttggggcagcgaaaccacctactacaacagctccctgaagtccagagtgaccatctccaaggacaactccaagaaccaggtgtccctgaagctgagcagcgtgacagccgccgacaccgccgtgtattactgcgccaagcactactactacggcggcagctacgctatggactactggggccagggaaccctcgtgaccgtgtctagtacgcgtgaggacctgaagaacgtgttcccacctgaggtggccgtgttcgagcctagcgaggccgagatcagccacacccagaaagccaccctcgtgtgcctggctaccggcttctaccccgaccatgtggaactgtcttggtgggtcaacggcaaagaggtgcacagcggcgtgtgtaccgacccccagccactgaaagaacagcccgccctgaacgacagccggtactgcctgagcagcagactgagagtgtccgccaccttctggcagaacccccggaaccacttcagatgccaggtgcagttctacggcctgagcgagaacgacgagtggacccaggacagagccaagcccgtgacccagatcgtgtctgccgaagcctggggcagagccgattgcggctttaccagcgagagctaccagcagggcgtgctgagcgccaccatcctgtacgagatcctgctgggcaaggccaccctgtacgccgtgctggtgtctgccctggtgctgatggctatggtcaagcggaaggacagccgggga

SEQ ID NO: 2511 - DNA, 2691 bp, Artificial Sequence
  Synthetic Polynucloetide
atggccttaccagtgaccgccttgctcctgccgctggccttgctgctccacgccgccaggccggaagtgcagctggttgaatctggcggaggactggttcagcctggcggatctctgagactgtcttgtgccgccagcggcttcagcttcagcgacttttggatgagctgggtccgacaggcccctggcaaaggacttgaatgggtcgccacaatcagccaggccggcagcgagaaggactacgtggactctgtgaagggcagattcaccatcagccgggacaacgccaagaagtccctgtacctccagatgaacagcctgagagccgaggacaccgccgtgtactattgtgcctctggcgtgtacagcttcgactacagaggccagggcaccctggtcacagtctcttctggtaccggcggaggcggatctggcggcggaggtagcggtggcggaggatctgaattcgacgagatcgtgctgacacagagccccgccaccctgtcactgtctccaggcgaaagagccaccctgagctgtagcgccagcagcagcgtgtcctacatgcactggtatcagcagaagcccggccaggcccccagactgctgatctacgataccagcaagctggcctccggcatccccgccagattttctggcagcggctccggcaccgacttcaccctgacaatcagcagcctggaacccgaggacgtggccgtgtactactgttttcaaggcagcgtgtaccccttcaccttcggccagggcaccaagctggaaatcaagagactcgagatccagaaccctgatcctgccgtgtaccagctgcgggatagcaagagcagcgacaagagcgtgtgtctgttcaccgacttcgacagccagaccaacgtgtcccagagcaaggactccgacgtgtacatcaccgataagtgcgtgctggacatgcggagcatggacttcaagagcaactccgccgtggcctggtccaacaagtccgatttcgcctgcgccaacgccttcaacaacagcattatccccgaggacacattcttcccaagccccgagagcagctgcgacgtgaagctggtggaaaagagcttcgagacagacaccaacctgaacttccagaacctgagcgtgatcggcttcagaatcctgctgctgaaagtggccggctttaacctgctgatgaccctgcggctgtggtccagccgcgccaagagaagcggatctggcgtgaagcagaccctgaatttcgacctgctgaagctggctggcgacgtggaatccaacccaggccctactagtatggactggatttggcgcatccttttccttgtcggcgctgctaccggcgcgcattccgggccccagctccagctgcaagagtctggacctggcctggtcaagcctagcgagacactgagcctgacctgtaccgtgtccggcgatagcatcagcagcggcgattactactggggctggatcagacagcctcctggcaaaggactggaatggatcggccacatctactacagcggcgtgacctactacaaccccagcctgaagtccagagtgaccatcagcgtggacaccagccggaaccagttctccctgaagctgtctagcgtgacagccgccgataccgccgtgtactactgcaccagagaggacagcagcaactggcggagtagaggccagggaacactggtcacagttagctctggatccggcggaggcggaagtggaggcggaggatctggcggcggaggctctttcgaacaggtgcagctccaggaatctggccctggcctcgtgaagcctagccagaccctgagcctgacctgtaccgtgtctggcggcagcatcagcacaagcggcatgggcgtgggctggatcagacagcaccctggcaagggcctggaatggatcggccacatttggtgggacgacgacaagcggtacaaccccgccctgaagtccagagtgaccatcagcgtggacaccagcaagaaccagttcagcctgaagctgagcagcgtgacagccgccgataccgccgtgtattattgcgcccggatggaactgtggtcctactacttcgactactggggccagggaaccctcgtgaccgtgtctagtacgcgtgaggacctgaagaacgtgttcccacctgaggtggccgtgttcgagcctagcgaggccgagatcagccacacccagaaagccaccctcgtgtgcctggctaccggcttctaccccgaccatgtggaactgtcttggtgggtcaacggcaaagaggtgcacagcggcgtgtgtaccgacccccagccactgaaagaacagcccgccctgaacgacagccggtactgcctgagcagcagactgagagtgtccgccaccttctggcagaacccccggaaccacttcagatgccaggtgcagttctacggcctgagcgagaacgacgagtggacccaggacagagccaagcccgtgacccagatcgtgtctgccgaagcctggggcagagccgattgcggctttaccagcgagagctaccagcagggcgtgctgagcgccaccatcctgtacgagatcctgctgggcaaggccaccctgtacgccgtgctggtgtctgccctggtgctgatggctatggtcaagcggaaggacagccgggga

SEQ ID NO: 2512 - DNA, 2685 bp, Artificial Sequence
  Synthetic Polynucloetide
atggccttaccagtgaccgccttgctcctgccgctggccttgctgctccacgccgccaggccggaagtgcagctggttgaatctggcggaggactggttcagcctggcggatctctgagactgtcttgtgccgccagcggcttcagcttcagcgacttttggatgagctgggtccgacaggcccctggcaaaggacttgaatgggtcgccacaatcagccaggccggcagcgagaaggactacgtggactctgtgaagggcagattcaccatcagccgggacaacgccaagaagtccctgtacctccagatgaacagcctgagagccgaggacaccgccgtgtactattgtgcctctggcgtgtacagcttcgactacagaggccagggcaccctggtcacagtctcttctggtaccggcggaggcggatctggcggcggaggtagcggtggcggaggatctgaattcgactacatccacgtgacacagagccctagcagcctgtccgtgtccatcggcgatagagtgaccatcaactgccagacctctcaaggcgtgggcagcgacctgcactggtatcagcacaaacctggcagagcccctaagctgctgatccaccatgccagctctgtggaagatggcgtgcccagcagattttccggcaccggatttcacaccagcttcaacctgacaatcaacgacctccaggccgacgacatcggcacctactactgtcaagtgctccagagcttcggcagaggcagcagactggatacaaaactcgagatccagaaccctgatcctgccgtgtaccagctgcgggatagcaagagcagcgacaagagcgtgtgtctgttcaccgacttcgacagccagaccaacgtgtcccagagcaaggactccgacgtgtacatcaccgataagtgcgtgctggacatgcggagcatggacttcaagagcaactccgccgtggcctggtccaacaagtccgatttcgcctgcgccaacgccttcaacaacagcattatccccgaggacacattcttcccaagccccgagagcagctgcgacgtgaagctggtggaaaagagcttcgagacagacaccaacctgaacttccagaacctgagcgtgatcggcttcagaatcctgctgctgaaagtggccggctttaacctgctgatgaccctgcggctgtggtccagccgcgccaagagaagcggatctggcgtgaagcagaccctgaatttcgacctgctgaagctggctggcgacgtggaatccaacccaggccctactagtatggactggatttggcgcatccttttccttgtcggcgctgctaccggcgcgcattccgggccccagctccagctgcaagagtctggacctggcctggtcaagcctagcgagacactgagcctgacctgtaccgtgtccggcgatagcatcagcagcggcgattactactggggctggatcagacagcctcctggcaaaggactggaatggatcggccacatctactacagcggcgtgacctactacaaccccagcctgaagtccagagtgaccatcagcgtggacaccagccggaaccagttctccctgaagctgtctagcgtgacagccgccgataccgccgtgtactactgcaccagagaggacagcagcaactggcggagtagaggccagggaacactggtcacagttagctctggatccggcggaggcggaagtggaggcggaggatctggcggcggaggctctttcgaaagggcacacctggtgcagtctggcaccgccatgaagaaacctggcgcttccgtcagagtgtcctgtcagacaagcggctacaccttcacagcccacatcctgttctggttcagacaggccccaggcagaggactggaatgggtcggatggatcaagccccagtacggggccgtgaatttcggcggaggcttcagagacagagtgaccctgaccagggacgtgtaccgggaaatcgcctacatggacatccggggcctgaagcctgatgacaccgccgtgtactactgcgccagggatagaagctacggcgacagctcttgggctctcgatgcttggggacagggcacaacagtggtggtgtctgctacgcgtgaggacctgaagaacgtgttcccacctgaggtggccgtgttcgagcctagcgaggccgagatcagccacacccagaaagccaccctcgtgtgcctggctaccggcttctaccccgaccatgtggaactgtcttggtgggtcaacggcaaagaggtgcacagcggcgtgtgtaccgacccccagccactgaaagaacagcccgccctgaacgacagccggtactgcctgagcagcagactgagagtgtccgccaccttctggcagaacccccggaaccacttcagatgccaggtgcagttctacggcctgagcgagaacgacgagtggacccaggacagagccaagcccgtgacccagatcgtgtctgccgaagcctggggcagagccgattgcggctttaccagcgagagctaccagcagggcgtgctgagcgccaccatcctgtacgagatcctgctgggcaaggccaccctgtacgccgtgctggtgtctgccctggtgctgatggctatggtcaagcggaaggacagccgggga

SEQ ID NO: 2513 - DNA, 2715 bp, Artificial Sequence
  Synthetic Polynucloetide
atggccttaccagtgaccgccttgctcctgccgctggccttgctgctccacgccgccaggccggaagtgcagctggttgaatctggcggaggactggttcagcctggcggatctctgagactgtcttgtgccgccagcggcttcagcttcagcgacttttggatgagctgggtccgacaggcccctggcaaaggacttgaatgggtcgccacaatcagccaggccggcagcgagaaggactacgtggactctgtgaagggcagattcaccatcagccgggacaacgccaagaagtccctgtacctccagatgaacagcctgagagccgaggacaccgccgtgtactattgtgcctctggcgtgtacagcttcgactacagaggccagggcaccctggtcacagtctcttctggtaccggcggaggcggatctggcggcggaggtagcggtggcggaggatctgaattcgacgtgcagatgatccagacccccgatagcctggccgtgtccctgggacagagagccaccatctcttgcagagccagcgagagcgtggacaactacggcatcagcttcatgcactggtatcagcagaagcccggccagagccccaagctgctgatctacagagcctccaacctggaaagcggcatccccgccagattttccggcagcggcagcagaaccgacttcaccctgaccatcaaccccgtggaaaccgacgacgtggcaacctactactgccagcagaacaacaaggacccccccacctttggcggaggcaccaagctggaaatcaagctcgagatccagaaccctgatcctgccgtgtaccagctgcgggatagcaagagcagcgacaagagcgtgtgtctgttcaccgacttcgacagccagaccaacgtgtcccagagcaaggactccgacgtgtacatcaccgataagtgcgtgctggacatgcggagcatggacttcaagagcaactccgccgtggcctggtccaacaagtccgatttcgcctgcgccaacgccttcaacaacagcattatccccgaggacacattcttcccaagccccgagagcagctgcgacgtgaagctggtggaaaagagcttcgagacagacaccaacctgaacttccagaacctgagcgtgatcggcttcagaatcctgctgctgaaagtggccggctttaacctgctgatgaccctgcggctgtggtccagccgcgccaagagaagcggatctggcgtgaagcagaccctgaatttcgacctgctgaagctggctggcgacgtggaatccaacccaggccctactagtatggactggatttggcgcatccttttccttgtcggcgctgctaccggcgcgcattccgggccccagctccagctgcaagagtctggacctggcctggtcaagcctagcgagacactgagcctgacctgtaccgtgtccggcgatagcatcagcagcggcgattactactggggctggatcagacagcctcctggcaaaggactggaatggatcggccacatctactacagcggcgtgacctactacaaccccagcctgaagtccagagtgaccatcagcgtggacaccagccggaaccagttctccctgaagctgtctagcgtgacagccgccgataccgccgtgtactactgcaccagagaggacagcagcaactggcggagtagaggccagggaacactggtcacagttagctctggatccggcggaggcggaagtggaggcggaggatctggcggcggaggctctttcgaagggggaggcggctctcaggtgcaactccagcagtctggcgctgagcttgtgaagcctggggccagcgtgaagattagctgcaaggccagcggctacgccttcagcagctactggatgaactgggtcaagcagcggcctggcaagggcctggaatggatcggccaaatctaccccggcgacggcgacaccacctacaacggcaagttcaagggcaaggccaccctgacagccgacaagagcagcagcaccgtgtacatgcaactgaacagcctgaccagcgaggacagcgccgtgtacttctgcgtgcggtactactacggcagctccggctacttcgactattggggccagggcaccacactgaccgtgtcctctacgcgtgaggacctgaagaacgtgttcccacctgaggtggccgtgttcgagcctagcgaggccgagatcagccacacccagaaagccaccctcgtgtgcctggctaccggcttctaccccgaccatgtggaactgtcttggtgggtcaacggcaaagaggtgcacagcggcgtgtgtaccgacccccagccactgaaagaacagcccgccctgaacgacagccggtactgcctgagcagcagactgagagtgtccgccaccttctggcagaacccccggaaccacttcagatgccaggtgcagttctacggcctgagcgagaacgacgagtggacccaggacagagccaagcccgtgacccagatcgtgtctgccgaagcctggggcagagccgattgcggctttaccagcgagagctaccagcagggcgtgctgagcgccaccatcctgtacgagatcctgctgggcaaggccaccctgtacgccgtgctggtgtctgccctggtgctgatggctatggtcaagcggaaggacagccgggga

SEQ ID NO: 2514 - DNA, 2688 bp, Artificial Sequence
  Synthetic Polynucloetide
atggccttaccagtgaccgccttgctcctgccgctggccttgctgctccacgccgccaggccggaagtgcagctggttgaatctggcggaggactggttcagcctggcggatctctgagactgtcttgtgccgccagcggcttcagcttcagcgacttttggatgagctgggtccgacaggcccctggcaaaggacttgaatgggtcgccacaatcagccaggccggcagcgagaaggactacgtggactctgtgaagggcagattcaccatcagccgggacaacgccaagaagtccctgtacctccagatgaacagcctgagagccgaggacaccgccgtgtactattgtgcctctggcgtgtacagcttcgactacagaggccagggcaccctggtcacagtctcttctggtaccggcggaggcggatctggcggcggaggtagcggtggcggaggatctgaattcgacgtgcagatgatccagacccccagcagcctgtctgccagcctgggcgatagagtgaccatcagctgtcgggccagccaggacatcggcaactacctgaactggtatcagcagaaacccgacggcaccgtgaagctgctgatctactacaccagcagactgcacagcggcgtgcccagcagattttctggcagcggctctggcaccgagtacagcctgaccatctccaacctggaacaggaagatattgctacctacttctgtcagcaaggcagcgccctgccccctacatttggcggcggaacaaagctggaaatcaacctcgagatccagaaccctgatcctgccgtgtaccagctgcgggatagcaagagcagcgacaagagcgtgtgtctgttcaccgacttcgacagccagaccaacgtgtcccagagcaaggactccgacgtgtacatcaccgataagtgcgtgctggacatgcggagcatggacttcaagagcaactccgccgtggcctggtccaacaagtccgatttcgcctgcgccaacgccttcaacaacagcattatccccgaggacacattcttcccaagccccgagagcagctgcgacgtgaagctggtggaaaagagcttcgagacagacaccaacctgaacttccagaacctgagcgtgatcggcttcagaatcctgctgctgaaagtggccggctttaacctgctgatgaccctgcggctgtggtccagccgcgccaagagaagcggatctggcgtgaagcagaccctgaatttcgacctgctgaagctggctggcgacgtggaatccaacccaggccctactagtatggactggatttggcgcatccttttccttgtcggcgctgctaccggcgcgcattccgggccccagctccagctgcaagagtctggacctggcctggtcaagcctagcgagacactgagcctgacctgtaccgtgtccggcgatagcatcagcagcggcgattactactggggctggatcagacagcctcctggcaaaggactggaatggatcggccacatctactacagcggcgtgacctactacaaccccagcctgaagtccagagtgaccatcagcgtggacaccagccggaaccagttctccctgaagctgtctagcgtgacagccgccgataccgccgtgtactactgcaccagagaggacagcagcaactggcggagtagaggccagggaacactggtcacagttagctctggatccggcggaggcggaagtggaggcggaggatctggcggcggaggctctttcgaagctctccagctccagcagtctggcgcagaactcgtgcggcctggcgcttctgtgaccctgagctgtaaagccagcggctacaccttcaccgactacgagatgcactgggtcaagcagacccctgtgcacggcctggaatggatcggagccatcgaccctgagacaggcggcaccgcctacaaccagaagttcgagggcaaggccatcctgaccgccgacaagagcagcagcacagcctacatggaactgcggagcctgacctccgaggacagccccgtgtactactgtgccagacggcggtactacggcagcagctccttcgactattggggccagggcaccaccctgaccgtgtctagtacgcgtgaggacctgaagaacgtgttcccacctgaggtggccgtgttcgagcctagcgaggccgagatcagccacacccagaaagccaccctcgtgtgcctggctaccggcttctaccccgaccatgtggaactgtcttggtgggtcaacggcaaagaggtgcacagcggcgtgtgtaccgacccccagccactgaaagaacagcccgccctgaacgacagccggtactgcctgagcagcagactgagagtgtccgccaccttctggcagaacccccggaaccacttcagatgccaggtgcagttctacggcctgagcgagaacgacgagtggacccaggacagagccaagcccgtgacccagatcgtgtctgccgaagcctggggcagagccgattgcggctttaccagcgagagctaccagcagggcgtgctgagcgccaccatcctgtacgagatcctgctgggcaaggccaccctgtacgccgtgctggtgtctgccctggtgctgatggctatggtcaagcggaaggacagccgggga

SEQ ID NO: 2515 - DNA, 2700 bp, Artificial Sequence
  Synthetic Polynucloetide
atggccttaccagtgaccgccttgctcctgccgctggccttgctgctccacgccgccaggccggaagtgcagctggttgaatctggcggaggactggttcagcctggcggatctctgagactgtcttgtgccgccagcggcttcagcttcagcgacttttggatgagctgggtccgacaggcccctggcaaaggacttgaatgggtcgccacaatcagccaggccggcagcgagaaggactacgtggactctgtgaagggcagattcaccatcagccgggacaacgccaagaagtccctgtacctccagatgaacagcctgagagccgaggacaccgccgtgtactattgtgcctctggcgtgtacagcttcgactacagaggccagggcaccctggtcacagtctcttctggtaccggcggaggcggatctggcggcggaggtagcggtggcggaggatctgaattcgacatcgtcctgacccagtccccagccagcctggcggtgtccctgggtcaacgagctaccatttcctgcagagcctctaagtccgtatccacttccggctatagttacctgcattggtaccaacagaaaccagggcagccacccaagctgctcatctatctggcctcaaacctggagtccggcgtgcccgccagattctccggaagtgggagcggcaccgactttacattgaacatccacccagtcgaagaggaagatgctgccacttattactgtcagcactccagggagctgccatttacatttggctctggcacaaaactggagatcaaactcgagatccagaaccctgatcctgccgtgtaccagctgcgggatagcaagagcagcgacaagagcgtgtgtctgttcaccgacttcgacagccagaccaacgtgtcccagagcaaggactccgacgtgtacatcaccgataagtgcgtgctggacatgcggagcatggacttcaagagcaactccgccgtggcctggtccaacaagtccgatttcgcctgcgccaacgccttcaacaacagcattatccccgaggacacattcttcccaagccccgagagcagctgcgacgtgaagctggtggaaaagagcttcgagacagacaccaacctgaacttccagaacctgagcgtgatcggcttcagaatcctgctgctgaaagtggccggctttaacctgctgatgaccctgcggctgtggtccagccgcgccaagagaagcggatctggcgtgaagcagaccctgaatttcgacctgctgaagctggctggcgacgtggaatccaacccaggccctactagtatggactggatttggcgcatccttttccttgtcggcgctgctaccggcgcgcattccgggccccagctccagctgcaagagtctggacctggcctggtcaagcctagcgagacactgagcctgacctgtaccgtgtccggcgatagcatcagcagcggcgattactactggggctggatcagacagcctcctggcaaaggactggaatggatcggccacatctactacagcggcgtgacctactacaaccccagcctgaagtccagagtgaccatcagcgtggacaccagccggaaccagttctccctgaagctgtctagcgtgacagccgccgataccgccgtgtactactgcaccagagaggacagcagcaactggcggagtagaggccagggaacactggtcacagttagctctggatccggcggaggcggaagtggaggcggaggatctggcggcggaggctctttcgaacaggttcagctggtcgagtccgggggaggtctggtacagccgggtggcagcctcaagctgtcatgtgccgcatctggttttgactttagcaggtattggatgagctgggtccgccaggccccgggcaagggacttgagtggattggagaaataaaccctacttccagcacaatcaacttcacaccttctttgaaagataaggtttttatctctcgggataacgctaaaaacacactgtacttgcagatgtctaaggtgcgaagcgaagacaccgccctctattattgcgcccggggtaattactaccgctatggggatgcgatggactattgggggcaaggtacctccgtcacggtctcaacgcgtgaggacctgaagaacgtgttcccacctgaggtggccgtgttcgagcctagcgaggccgagatcagccacacccagaaagccaccctcgtgtgcctggctaccggcttctaccccgaccatgtggaactgtcttggtgggtcaacggcaaagaggtgcacagcggcgtgtgtaccgacccccagccactgaaagaacagcccgccctgaacgacagccggtactgcctgagcagcagactgagagtgtccgccaccttctggcagaacccccggaaccacttcagatgccaggtgcagttctacggcctgagcgagaacgacgagtggacccaggacagagccaagcccgtgacccagatcgtgtctgccgaagcctggggcagagccgattgcggctttaccagcgagagctaccagcagggcgtgctgagcgccaccatcctgtacgagatcctgctgggcaaggccaccctgtacgccgtgctggtgtctgccctggtgctgatggctatggtcaagcggaaggacagccgggga

SEQ ID NO: 2516 - DNA, 2694 bp, Artificial Sequence
  Synthetic Polynucloetide
atggccttaccagtgaccgccttgctcctgccgctggccttgctgctccacgccgccaggccggaagtgcagctggttgaatctggcggaggactggttcagcctggcggatctctgagactgtcttgtgccgccagcggcttcagcttcagcgacttttggatgagctgggtccgacaggcccctggcaaaggacttgaatgggtcgccacaatcagccaggccggcagcgagaaggactacgtggactctgtgaagggcagattcaccatcagccgggacaacgccaagaagtccctgtacctccagatgaacagcctgagagccgaggacaccgccgtgtactattgtgcctctggcgtgtacagcttcgactacagaggccagggcaccctggtcacagtctcttctggtaccggcggaggcggatctggcggcggaggtagcggtggcggaggatctgaattcgacatccagatgacccagagccctagctcactgagcgccagcgtgggcgacagggtgaccattacctgctccgccagccaggacatcagcaactacctgaactggtaccagcagaagcccggcaaggcccccaagctgctgatctactacacctccaacctgcactccggcgtgcccagcaggttcagcggaagcggcagcggcaccgatttcaccctgaccatctccagcctgcagcccgaggacttcgccacctactactgccagcagtacaggaagctcccctggactttcggccagggcaccaaactggagatcaagcgtctcgagatccagaaccctgatcctgccgtgtaccagctgcgggatagcaagagcagcgacaagagcgtgtgtctgttcaccgacttcgacagccagaccaacgtgtcccagagcaaggactccgacgtgtacatcaccgataagtgcgtgctggacatgcggagcatggacttcaagagcaactccgccgtggcctggtccaacaagtccgatttcgcctgcgccaacgccttcaacaacagcattatccccgaggacacattcttcccaagccccgagagcagctgcgacgtgaagctggtggaaaagagcttcgagacagacaccaacctgaacttccagaacctgagcgtgatcggcttcagaatcctgctgctgaaagtggccggctttaacctgctgatgaccctgcggctgtggtccagccgcgccaagagaagcggatctggcgtgaagcagaccctgaatttcgacctgctgaagctggctggcgacgtggaatccaacccaggccctactagtatggactggatttggcgcatccttttccttgtcggcgctgctaccggcgcgcattccgggccccagctccagctgcaagagtctggacctggcctggtcaagcctagcgagacactgagcctgacctgtaccgtgtccggcgatagcatcagcagcggcgattactactggggctggatcagacagcctcctggcaaaggactggaatggatcggccacatctactacagcggcgtgacctactacaaccccagcctgaagtccagagtgaccatcagcgtggacaccagccggaaccagttctccctgaagctgtctagcgtgacagccgccgataccgccgtgtactactgcaccagagaggacagcagcaactggcggagtagaggccagggaacactggtcacagttagctctggatccggcggaggcggaagtggaggcggaggatctggcggcggaggctctttcgaacaggtgcagctggtccagagcggcgccgaagtgaagaagcccggcagctccgtgaaagtgagctgcaaggccagcggcggcaccttcagcaactactggatgcactgggtgaggcaggcccccggacagggcctggagtggatgggcgccacctacaggggccacagcgacacctactacaaccagaagttcaagggccgggtgaccatcaccgccgacaagagcaccagcaccgcctacatggaactgagcagcctcaggagcgaggacaccgctgtgtattactgcgccaggggcgccatctacgacggctacgacgtgctggacaactggggccagggcacactggtgaccgtgtccagcacgcgtgaggacctgaagaacgtgttcccacctgaggtggccgtgttcgagcctagcgaggccgagatcagccacacccagaaagccaccctcgtgtgcctggctaccggcttctaccccgaccatgtggaactgtcttggtgggtcaacggcaaagaggtgcacagcggcgtgtgtaccgacccccagccactgaaagaacagcccgccctgaacgacagccggtactgcctgagcagcagactgagagtgtccgccaccttctggcagaacccccggaaccacttcagatgccaggtgcagttctacggcctgagcgagaacgacgagtggacccaggacagagccaagcccgtgacccagatcgtgtctgccgaagcctggggcagagccgattgcggctttaccagcgagagctaccagcagggcgtgctgagcgccaccatcctgtacgagatcctgctgggcaaggccaccctgtacgccgtgctggtgtctgccctggtgctgatggctatggtcaagcggaaggacagccgggga

SEQ ID NO: 2517 - DNA, 2694 bp, Artificial Sequence
  Synthetic Polynucloetide
atggccttaccagtgaccgccttgctcctgccgctggccttgctgctccacgccgccaggccggaagtgcagctggttgaatctggcggaggactggttcagcctggcggatctctgagactgtcttgtgccgccagcggcttcagcttcagcgacttttggatgagctgggtccgacaggcccctggcaaaggacttgaatgggtcgccacaatcagccaggccggcagcgagaaggactacgtggactctgtgaagggcagattcaccatcagccgggacaacgccaagaagtccctgtacctccagatgaacagcctgagagccgaggacaccgccgtgtactattgtgcctctggcgtgtacagcttcgactacagaggccagggcaccctggtcacagtctcttctggtaccggcggaggcggatctggcggcggaggtagcggtggcggaggatctgaattcgacatcgtgctgacacagagccctgccaccctgtctctgagccctggcgatagagccaccatcagctgtagagccagcgagagcgtgaccatcctgggcagccacctgatctactggtatcagcagaagcccggccagccccccagactgctgattcagctggcctccaatgtgcagaccggcgtgccagccagattttccggcagcggcagcagaaccgacttcaccctgaccatcagcagcgtggaacccgaggacttcgccgtgtactactgcctccagagccggaccatccccagaacattcggccagggcaccaagctggaaatcaagagactcgagatccagaaccctgatcctgccgtgtaccagctgcgggatagcaagagcagcgacaagagcgtgtgtctgttcaccgacttcgacagccagaccaacgtgtcccagagcaaggactccgacgtgtacatcaccgataagtgcgtgctggacatgcggagcatggacttcaagagcaactccgccgtggcctggtccaacaagtccgatttcgcctgcgccaacgccttcaacaacagcattatccccgaggacacattcttcccaagccccgagagcagctgcgacgtgaagctggtggaaaagagcttcgagacagacaccaacctgaacttccagaacctgagcgtgatcggcttcagaatcctgctgctgaaagtggccggctttaacctgctgatgaccctgcggctgtggtccagccgcgccaagagaagcggatctggcgtgaagcagaccctgaatttcgacctgctgaagctggctggcgacgtggaatccaacccaggccctactagtatggactggatttggcgcatccttttccttgtcggcgctgctaccggcgcgcattccgggccccagctccagctgcaagagtctggacctggcctggtcaagcctagcgagacactgagcctgacctgtaccgtgtccggcgatagcatcagcagcggcgattactactggggctggatcagacagcctcctggcaaaggactggaatggatcggccacatctactacagcggcgtgacctactacaaccccagcctgaagtccagagtgaccatcagcgtggacaccagccggaaccagttctccctgaagctgtctagcgtgacagccgccgataccgccgtgtactactgcaccagagaggacagcagcaactggcggagtagaggccagggaacactggtcacagttagctctggatccggcggaggcggaagtggaggcggaggatctggcggcggaggctctttcgaacaggtgcagctggtgcagtctggccccgaagtgaagaaacccggcgagtccgtgaagatcagctgcaaggccagcggctacaccttccggcactacagcatgaactgggtcaagcaggccccaggccagggcctgaagtggatgggcagaatcaacaccgagagcggcgtgcccatctacgccgacgacttcaagggccggttcagcttcaccgtggacaccagcgccagcaccgcctacctggaaatctccagcctgaccagcgaggataccgccgtgtatttctgctccaacgactacctgtacagcctggatttctggggccagggaaccaccctgacagtgtcctctacgcgtgaggacctgaagaacgtgttcccacctgaggtggccgtgttcgagcctagcgaggccgagatcagccacacccagaaagccaccctcgtgtgcctggctaccggcttctaccccgaccatgtggaactgtcttggtgggtcaacggcaaagaggtgcacagcggcgtgtgtaccgacccccagccactgaaagaacagcccgccctgaacgacagccggtactgcctgagcagcagactgagagtgtccgccaccttctggcagaacccccggaaccacttcagatgccaggtgcagttctacggcctgagcgagaacgacgagtggacccaggacagagccaagcccgtgacccagatcgtgtctgccgaagcctggggcagagccgattgcggctttaccagcgagagctaccagcagggcgtgctgagcgccaccatcctgtacgagatcctgctgggcaaggccaccctgtacgccgtgctggtgtctgccctggtgctgatggctatggtcaagcggaaggacagccgggga

SEQ ID NO: 2518 - DNA, 2697 bp, Artificial Sequence
  Synthetic Polynucloetide
atggccttaccagtgaccgccttgctcctgccgctggccttgctgctccacgccgccaggccggaagtgcagctggttgaatctggcggaggactggttcagcctggcggatctctgagactgtcttgtgccgccagcggcttcagcttcagcgacttttggatgagctgggtccgacaggcccctggcaaaggacttgaatgggtcgccacaatcagccaggccggcagcgagaaggactacgtggactctgtgaagggcagattcaccatcagccgggacaacgccaagaagtccctgtacctccagatgaacagcctgagagccgaggacaccgccgtgtactattgtgcctctggcgtgtacagcttcgactacagaggccagggcaccctggtcacagtctcttctggtaccggcggaggcggatctggcggcggaggtagcggtggcggaggatctgaattccagtctgtgctgacacagcctcctagtgtgtctggcgctcctggacagagagtgaccatcagctgtacaggcagcagcagcaatatcggagccggctttgacgtgcactggtatcagcagctgcctggcacagcccctaaactgctgatctacggcaacagcaacagacccagcggcgtgcccgatagattttccggctctaagagcggcacaagcgccagcctggctattactggactccaggccgaggacgaggccgactactactgtcagagctacgacagcagcctgagcggctacgttttcggcaccggcaccaaagtgacagtgcttggtctcgagatccagaaccctgatcctgccgtgtaccagctgcgggatagcaagagcagcgacaagagcgtgtgtctgttcaccgacttcgacagccagaccaacgtgtcccagagcaaggactccgacgtgtacatcaccgataagtgcgtgctggacatgcggagcatggacttcaagagcaactccgccgtggcctggtccaacaagtccgatttcgcctgcgccaacgccttcaacaacagcattatccccgaggacacattcttcccaagccccgagagcagctgcgacgtgaagctggtggaaaagagcttcgagacagacaccaacctgaacttccagaacctgagcgtgatcggcttcagaatcctgctgctgaaagtggccggctttaacctgctgatgaccctgcggctgtggtccagccgcgccaagagaagcggatctggcgtgaagcagaccctgaatttcgacctgctgaagctggctggcgacgtggaatccaacccaggccctactagtatggactggatttggcgcatccttttccttgtcggcgctgctaccggcgcgcattccgggccccagctccagctgcaagagtctggacctggcctggtcaagcctagcgagacactgagcctgacctgtaccgtgtccggcgatagcatcagcagcggcgattactactggggctggatcagacagcctcctggcaaaggactggaatggatcggccacatctactacagcggcgtgacctactacaaccccagcctgaagtccagagtgaccatcagcgtggacaccagccggaaccagttctccctgaagctgtctagcgtgacagccgccgataccgccgtgtactactgcaccagagaggacagcagcaactggcggagtagaggccagggaacactggtcacagttagctctggatccggcggaggcggaagtggaggcggaggatctggcggcggaggctctttcgaacaagttcagctggttcagagcggagccgaagtgaagaaacctggggcctctgtgaaggtgtcctgcaaggcttccggctacacctttaccgattactacatgcactgggtccgacaggctcccggccaaagacttgaatggatgggctggatcaaccccaacagcggcggcacaaattacgcccagaagttccaggaccggatcaccgtgaccagagacaccagctccaacaccggctacatggaactgacccggctgagatccgatgacaccgccgtgtactactgcgctagaagcccttactccggcgtgctggataagtggggacagggcacactggtcaccgtgtcatctacgcgtgaggacctgaagaacgtgttcccacctgaggtggccgtgttcgagcctagcgaggccgagatcagccacacccagaaagccaccctcgtgtgcctggctaccggcttctaccccgaccatgtggaactgtcttggtgggtcaacggcaaagaggtgcacagcggcgtgtgtaccgacccccagccactgaaagaacagcccgccctgaacgacagccggtactgcctgagcagcagactgagagtgtccgccaccttctggcagaacccccggaaccacttcagatgccaggtgcagttctacggcctgagcgagaacgacgagtggacccaggacagagccaagcccgtgacccagatcgtgtctgccgaagcctggggcagagccgattgcggctttaccagcgagagctaccagcagggcgtgctgagcgccaccatcctgtacgagatcctgctgggcaaggccaccctgtacgccgtgctggtgtctgccctggtgctgatggctatggtcaagcggaaggacagccgggga

SEQ ID NO: 2519 - DNA, 2688 bp, Artificial Sequence
  Synthetic Polynucloetide
atggccttaccagtgaccgccttgctcctgccgctggccttgctgctccacgccgccaggccggaagtgcagctggttgaatctggcggaggactggttcagcctggcggatctctgagactgtcttgtgccgccagcggcttcagcttcagcgacttttggatgagctgggtccgacaggcccctggcaaaggacttgaatgggtcgccacaatcagccaggccggcagcgagaaggactacgtggactctgtgaagggcagattcaccatcagccgggacaacgccaagaagtccctgtacctccagatgaacagcctgagagccgaggacaccgccgtgtactattgtgcctctggcgtgtacagcttcgactacagaggccagggcaccctggtcacagtctcttctggtaccggcggaggcggatctggcggcggaggtagcggtggcggaggatctgaattccaggctgttctgacacagcctccatctgcctctggcacacctggacagagagtgaccatctcctgtagcggcagcagcagcaacatcggcagctacaccgtgtcctggtatcagcagctccctggaacagcccctaagttcctgatctacagcaacaaccagcggcctagcggcgtgcccgatagattttctggcagcaagagcggcacaagcgccagcctggctatttctggactccagtctgaggacgaggccgactactattgtgccgcctgggacgatagcctgaacggctatgtgtttggcaccggcaccaaagtgacagtgcttggtctcgagatccagaaccctgatcctgccgtgtaccagctgcgggatagcaagagcagcgacaagagcgtgtgtctgttcaccgacttcgacagccagaccaacgtgtcccagagcaaggactccgacgtgtacatcaccgataagtgcgtgctggacatgcggagcatggacttcaagagcaactccgccgtggcctggtccaacaagtccgatttcgcctgcgccaacgccttcaacaacagcattatccccgaggacacattcttcccaagccccgagagcagctgcgacgtgaagctggtggaaaagagcttcgagacagacaccaacctgaacttccagaacctgagcgtgatcggcttcagaatcctgctgctgaaagtggccggctttaacctgctgatgaccctgcggctgtggtccagccgcgccaagagaagcggatctggcgtgaagcagaccctgaatttcgacctgctgaagctggctggcgacgtggaatccaacccaggccctactagtatggactggatttggcgcatccttttccttgtcggcgctgctaccggcgcgcattccgggccccagctccagctgcaagagtctggacctggcctggtcaagcctagcgagacactgagcctgacctgtaccgtgtccggcgatagcatcagcagcggcgattactactggggctggatcagacagcctcctggcaaaggactggaatggatcggccacatctactacagcggcgtgacctactacaaccccagcctgaagtccagagtgaccatcagcgtggacaccagccggaaccagttctccctgaagctgtctagcgtgacagccgccgataccgccgtgtactactgcaccagagaggacagcagcaactggcggagtagaggccagggaacactggtcacagttagctctggatccggcggaggcggaagtggaggcggaggatctggcggcggaggctctttcgaagttcaactggttcagagcggagccgaagtgaagaagcctggcgagagcctgaagattagctgcaaaggcagcggctacgacttcaccacctactggatcggctgggtccgacagatgcctggcaaaggactggaatggatgggcatcatctaccccggcgacagcgacaccagatacagccctagcgttagaggccgcgtgaccatcagcgccgacaagtctatcaacaccgcctacctccagtggtccagcctggaagcctctgacaccgccatgtactactgcgccagaatgtggaccttcagccaggatggatggggccagggaacactggtcacagtgtcatctacgcgtgaggacctgaagaacgtgttcccacctgaggtggccgtgttcgagcctagcgaggccgagatcagccacacccagaaagccaccctcgtgtgcctggctaccggcttctaccccgaccatgtggaactgtcttggtgggtcaacggcaaagaggtgcacagcggcgtgtgtaccgacccccagccactgaaagaacagcccgccctgaacgacagccggtactgcctgagcagcagactgagagtgtccgccaccttctggcagaacccccggaaccacttcagatgccaggtgcagttctacggcctgagcgagaacgacgagtggacccaggacagagccaagcccgtgacccagatcgtgtctgccgaagcctggggcagagccgattgcggctttaccagcgagagctaccagcagggcgtgctgagcgccaccatcctgtacgagatcctgctgggcaaggccaccctgtacgccgtgctggtgtctgccctggtgctgatggctatggtcaagcggaaggacagccgggga

SEQ ID NO: 2520 - DNA, 2697 bp, Artificial Sequence
  Synthetic Polynucloetide
atggccttaccagtgaccgccttgctcctgccgctggccttgctgctccacgccgccaggccggaagtgcagctggttgaatctggcggaggactggttcagcctggcggatctctgagactgtcttgtgccgccagcggcttcagcttcagcgacttttggatgagctgggtccgacaggcccctggcaaaggacttgaatgggtcgccacaatcagccaggccggcagcgagaaggactacgtggactctgtgaagggcagattcaccatcagccgggacaacgccaagaagtccctgtacctccagatgaacagcctgagagccgaggacaccgccgtgtactattgtgcctctggcgtgtacagcttcgactacagaggccagggcaccctggtcacagtctcttctggtaccggcggaggcggatctggcggcggaggtagcggtggcggaggatctgaattcgacatcgtgatgacccagagccccgatagcctggccgtgtctctgggagagagagccaccatcaactgcaagagcagccagagcatcctgtacagcagcaaccagaagaactacctggcctggtatcagcagaagcccggccagagccctaagctgctgatctactgggccagcaccagagaaagcggcgtgcccgatagattcagcggcagcggctctggcaccgacttcaccctgaccatcagttctcttcaggccgaggacgtggccgtgtactactgccaccagtacatcagctcctacaccttcggccagggcaccaagctggaaatcaagctcgagatccagaaccctgatcctgccgtgtaccagctgcgggatagcaagagcagcgacaagagcgtgtgtctgttcaccgacttcgacagccagaccaacgtgtcccagagcaaggactccgacgtgtacatcaccgataagtgcgtgctggacatgcggagcatggacttcaagagcaactccgccgtggcctggtccaacaagtccgatttcgcctgcgccaacgccttcaacaacagcattatccccgaggacacattcttcccaagccccgagagcagctgcgacgtgaagctggtggaaaagagcttcgagacagacaccaacctgaacttccagaacctgagcgtgatcggcttcagaatcctgctgctgaaagtggccggctttaacctgctgatgaccctgcggctgtggtccagccgcgccaagagaagcggatctggcgtgaagcagaccctgaatttcgacctgctgaagctggctggcgacgtggaatccaacccaggccctactagtatggactggatttggcgcatccttttccttgtcggcgctgctaccggcgcgcattccgggccccagctccagctgcaagagtctggacctggcctggtcaagcctagcgagacactgagcctgacctgtaccgtgtccggcgatagcatcagcagcggcgattactactggggctggatcagacagcctcctggcaaaggactggaatggatcggccacatctactacagcggcgtgacctactacaaccccagcctgaagtccagagtgaccatcagcgtggacaccagccggaaccagttctccctgaagctgtctagcgtgacagccgccgataccgccgtgtactactgcaccagagaggacagcagcaactggcggagtagaggccagggaacactggtcacagttagctctggatccggcggaggcggaagtggaggcggaggatctggcggcggaggctctttcgaacaggtgcagctggtgcagtctggcgctgaagtgaagaaacctggggccagcgtgaaggtgtcctgcaaggccagcggctacacctttgccagccagtggatgcactggatgagacaggcccctggacagggcctggaatggatcggctggatcaaccccggcaacgtgaacaccaagtacaacgagaagttcaagggcagagccaccctgacagtggacaccagcaccaacaccgcctacatggaactgagcagcctgcggagcgaggacaccgccgtgtattattgcgccagaagcacctggtacagacccctggattattggggccagggaacccttgtgaccgtgtcctctacgcgtgaggacctgaagaacgtgttcccacctgaggtggccgtgttcgagcctagcgaggccgagatcagccacacccagaaagccaccctcgtgtgcctggctaccggcttctaccccgaccatgtggaactgtcttggtgggtcaacggcaaagaggtgcacagcggcgtgtgtaccgacccccagccactgaaagaacagcccgccctgaacgacagccggtactgcctgagcagcagactgagagtgtccgccaccttctggcagaacccccggaaccacttcagatgccaggtgcagttctacggcctgagcgagaacgacgagtggacccaggacagagccaagcccgtgacccagatcgtgtctgccgaagcctggggcagagccgattgcggctttaccagcgagagctaccagcagggcgtgctgagcgccaccatcctgtacgagatcctgctgggcaaggccaccctgtacgccgtgctggtgtctgccctggtgctgatggctatggtcaagcggaaggacagccgggga

SEQ ID NO: 2521 - DNA, 2697 bp, Artificial Sequence
  Synthetic Polynucloetide
atggccttaccagtgaccgccttgctcctgccgctggccttgctgctccacgccgccaggccggaagtgcagctggttgaatctggcggaggactggttcagcctggcggatctctgagactgtcttgtgccgccagcggcttcagcttcagcgacttttggatgagctgggtccgacaggcccctggcaaaggacttgaatgggtcgccacaatcagccaggccggcagcgagaaggactacgtggactctgtgaagggcagattcaccatcagccgggacaacgccaagaagtccctgtacctccagatgaacagcctgagagccgaggacaccgccgtgtactattgtgcctctggcgtgtacagcttcgactacagaggccagggcaccctggtcacagtctcttctggtaccggcggaggcggatctggcggcggaggtagcggtggcggaggatctgaattcgaccacatcgtgctgacccagagccctagcagcctgtctgccagcctgggcgacagagtgaccatcagctgtagagccagccaggacatcagcacctacctgaactggtatcagcagaaacccgacggcaccgtgaagctgctgatcttctacaccagcagactgcacgccggggtgcccagcagattttctggcagcggctctggcacccaccacagcctgaccatctccaacctggaacaggaagatattgctacctacttctgtcagcaaggcaacagcctgcccttcaccttcggcagcggcaccaagctggaaatcaagagactcgagatccagaaccctgatcctgccgtgtaccagctgcgggatagcaagagcagcgacaagagcgtgtgtctgttcaccgacttcgacagccagaccaacgtgtcccagagcaaggactccgacgtgtacatcaccgataagtgcgtgctggacatgcggagcatggacttcaagagcaactccgccgtggcctggtccaacaagtccgatttcgcctgcgccaacgccttcaacaacagcattatccccgaggacacattcttcccaagccccgagagcagctgcgacgtgaagctggtggaaaagagcttcgagacagacaccaacctgaacttccagaacctgagcgtgatcggcttcagaatcctgctgctgaaagtggccggctttaacctgctgatgaccctgcggctgtggtccagccgcgccaagagaagcggatctggcgtgaagcagaccctgaatttcgacctgctgaagctggctggcgacgtggaatccaacccaggccctactagtatggactggatttggcgcatccttttccttgtcggcgctgctaccggcgcgcattccgggccccagctccagctgcaagagtctggacctggcctggtcaagcctagcgagacactgagcctgacctgtaccgtgtccggcgatagcatcagcagcggcgattactactggggctggatcagacagcctcctggcaaaggactggaatggatcggccacatctactacagcggcgtgacctactacaaccccagcctgaagtccagagtgaccatcagcgtggacaccagccggaaccagttctccctgaagctgtctagcgtgacagccgccgataccgccgtgtactactgcaccagagaggacagcagcaactggcggagtagaggccagggaacactggtcacagttagctctggatccggcggaggcggaagtggaggcggaggatctggcggcggaggctctttcgaacaggtgcagctgaaagagagcggccctgagctggaaaagcctggggccagcgtgaagattagctgcaaggccagcggctacagcttcaccgcctacagcatgaactgggtcaagcagaacaacggcatgagcctggaatggatcggcagcatcgacccctactacggcgacaccaaatacgcccagaagttcaagggcaaggccaccctgaccgtggataaggccagcagcaccgcctacctccagctgaagtctctgaccagcgaggacagcgccgtgtactactgcgccagacggatgattaccaccggcgactggtacttcgacgtgtggggagccggaaccaccgtgacagtgtctagcacgcgtgaggacctgaagaacgtgttcccacctgaggtggccgtgttcgagcctagcgaggccgagatcagccacacccagaaagccaccctcgtgtgcctggctaccggcttctaccccgaccatgtggaactgtcttggtgggtcaacggcaaagaggtgcacagcggcgtgtgtaccgacccccagccactgaaagaacagcccgccctgaacgacagccggtactgcctgagcagcagactgagagtgtccgccaccttctggcagaacccccggaaccacttcagatgccaggtgcagttctacggcctgagcgagaacgacgagtggacccaggacagagccaagcccgtgacccagatcgtgtctgccgaagcctggggcagagccgattgcggctttaccagcgagagctaccagcagggcgtgctgagcgccaccatcctgtacgagatcctgctgggcaaggccaccctgtacgccgtgctggtgtctgccctggtgctgatggctatggtcaagcggaaggacagccgggga

SEQ ID NO: 2522 - DNA, 2697 bp, Artificial Sequence; identical to SEQ ID NO: 2521
  Synthetic Polynucloetide

SEQ ID NO: 2523 - DNA, 2697 bp, Artificial Sequence
  Synthetic Polynucloetide
atggccttaccagtgaccgccttgctcctgccgctggccttgctgctccacgccgccaggccggaagtgcagctggttgaatctggcggaggactggttcagcctggcggatctctgagactgtcttgtgccgccagcggcttcagcttcagcgacttttggatgagctgggtccgacaggcccctggcaaaggacttgaatgggtcgccacaatcagccaggccggcagcgagaaggactacgtggactctgtgaagggcagattcaccatcagccgggacaacgccaagaagtccctgtacctccagatgaacagcctgagagccgaggacaccgccgtgtactattgtgcctctggcgtgtacagcttcgactacagaggccagggcaccctggtcacagtctcttctggtaccggcggaggcggatctggcggcggaggtagcggtggcggaggatctgaattcgacgagatcgtgctgacacagagccctgccaccctgtctctgagccctggcgaaagagccaccctgagctgtagagccagccagagcgtgtccagctacctggcctggtatcagcagaagcccggccaggctccccggctgctgatctacgatgccagcaatagagccaccggcatccccgccagattttccggctctggcagcggcaccgacttcaccctgaccatcagctccctggaacccgaggacttcgccgtgtactactgccagcagcggagcaactggcccatcacattcggccagggcacccggctggaaatcaaactcgagatccagaaccctgatcctgccgtgtaccagctgcgggatagcaagagcagcgacaagagcgtgtgtctgttcaccgacttcgacagccagaccaacgtgtcccagagcaaggactccgacgtgtacatcaccgataagtgcgtgctggacatgcggagcatggacttcaagagcaactccgccgtggcctggtccaacaagtccgatttcgcctgcgccaacgccttcaacaacagcattatccccgaggacacattcttcccaagccccgagagcagctgcgacgtgaagctggtggaaaagagcttcgagacagacaccaacctgaacttccagaacctgagcgtgatcggcttcagaatcctgctgctgaaagtggccggctttaacctgctgatgaccctgcggctgtggtccagccgcgccaagagaagcggatctggcgtgaagcagaccctgaatttcgacctgctgaagctggctggcgacgtggaatccaacccaggccctactagtatggactggatttggcgcatccttttccttgtcggcgctgctaccggcgcgcattccgggccccagctccagctgcaagagtctggacctggcctggtcaagcctagcgagacactgagcctgacctgtaccgtgtccggcgatagcatcagcagcggcgattactactggggctggatcagacagcctcctggcaaaggactggaatggatcggccacatctactacagcggcgtgacctactacaaccccagcctgaagtccagagtgaccatcagcgtggacaccagccggaaccagttctccctgaagctgtctagcgtgacagccgccgataccgccgtgtactactgcaccagagaggacagcagcaactggcggagtagaggccagggaacactggtcacagttagctctggatccggcggaggcggaagtggaggcggaggatctggcggcggaggctctttcgaagaagtgcagctggtggaatcaggcggcggactggtgcagcctggcagaagcctgagactgagctgtgccgccagcggcttcaccttcaacgactacgccatgcactgggtgcgccaggcccctggaaaaggactggaatgggtgtccacaatcagctggaacagcggcagcatcggctacgccgatagcgtgaagggccggttcaccatcagccgggacaacgccaagaagtccctgtacctccagatgaacagcctgcgggccgaggacacagccctgtactattgcgccaaggacatccagtacggcaactactactacggcatggacgtgtggggccagggaaccaccgtgaccgtgtcatctacgcgtgaggacctgaagaacgtgttcccacctgaggtggccgtgttcgagcctagcgaggccgagatcagccacacccagaaagccaccctcgtgtgcctggctaccggcttctaccccgaccatgtggaactgtcttggtgggtcaacggcaaagaggtgcacagcggcgtgtgtaccgacccccagccactgaaagaacagcccgccctgaacgacagccggtactgcctgagcagcagactgagagtgtccgccaccttctggcagaacccccggaaccacttcagatgccaggtgcagttctacggcctgagcgagaacgacgagtggacccaggacagagccaagcccgtgacccagatcgtgtctgccgaagcctggggcagagccgattgcggctttaccagcgagagctaccagcagggcgtgctgagcgccaccatcctgtacgagatcctgctgggcaaggccaccctgtacgccgtgctggtgtctgccctggtgctgatggctatggtcaagcggaaggacagccgggga

SEQ ID NO: 2524 - DNA, 2703 bp, Artificial Sequence
  Synthetic Polynucloetide
atggccttaccagtgaccgccttgctcctgccgctggccttgctgctccacgccgccaggccggaagtgcagctggttgaatctggcggaggactggttcagcctggcggatctctgagactgtcttgtgccgccagcggcttcagcttcagcgacttttggatgagctgggtccgacaggcccctggcaaaggacttgaatgggtcgccacaatcagccaggccggcagcgagaaggactacgtggactctgtgaagggcagattcaccatcagccgggacaacgccaagaagtccctgtacctccagatgaacagcctgagagccgaggacaccgccgtgtactattgtgcctctggcgtgtacagcttcgactacagaggccagggcaccctggtcacagtctcttctggtaccggcggaggcggatctggcggcggaggtagcggtggcggaggatctgaattcgacatcgtgatgacccagacccccctgagcctgcctgtgacacctggcgagcctgccagcatctcctgcagaagcagcaagagcctgctgcacagcaacggcatcacctacctgtactggtatctgcagaaacccggccagagcccccaactgctgatctaccagatgagcaacctggtgtccggcgtgcccgacagattttctggcagcggctccggcaccgacttcaccctgaagatcagccgggtggaagccgaggacgtgggcgtgtactactgcgcccagaacctggaactgccctacacctttggcggcggaacaaaggtggaaatcaagcggctcgagatccagaaccctgatcctgccgtgtaccagctgcgggatagcaagagcagcgacaagagcgtgtgtctgttcaccgacttcgacagccagaccaacgtgtcccagagcaaggactccgacgtgtacatcaccgataagtgcgtgctggacatgcggagcatggacttcaagagcaactccgccgtggcctggtccaacaagtccgatttcgcctgcgccaacgccttcaacaacagcattatccccgaggacacattcttcccaagccccgagagcagctgcgacgtgaagctggtggaaaagagcttcgagacagacaccaacctgaacttccagaacctgagcgtgatcggcttcagaatcctgctgctgaaagtggccggctttaacctgctgatgaccctgcggctgtggtccagccgcgccaagagaagcggatctggcgtgaagcagaccctgaatttcgacctgctgaagctggctggcgacgtggaatccaacccaggccctactagtatggactggatttggcgcatccttttccttgtcggcgctgctaccggcgcgcattccgggccccagctccagctgcaagagtctggacctggcctggtcaagcctagcgagacactgagcctgacctgtaccgtgtccggcgatagcatcagcagcggcgattactactggggctggatcagacagcctcctggcaaaggactggaatggatcggccacatctactacagcggcgtgacctactacaaccccagcctgaagtccagagtgaccatcagcgtggacaccagccggaaccagttctccctgaagctgtctagcgtgacagccgccgataccgccgtgtactactgcaccagagaggacagcagcaactggcggagtagaggccagggaacactggtcacagttagctctggatccggcggaggcggaagtggaggcggaggatctggcggcggaggctctttcgaacaggtgcaactggtgcagagcggagccgaagtgaaaaagcccggcagcagcgtgaaggtgtcctgcaaggccagcggctacgccttcagctactcctggatcaactgggtgcgccaggcccctggacagggcctggaatggatgggcagaatcttccccggcgacggcgacaccgactacaacggcaagttcaagggcagagtgaccatcaccgccgacaagagcaccagcaccgcctacatggaactgagcagcctgcggagcgaggataccgccgtgtactattgtgccagaaacgtgttcgacggctactggctggtgtactggggccagggaacacttgtgaccgtgtccagcacgcgtgaggacctgaagaacgtgttcccacctgaggtggccgtgttcgagcctagcgaggccgagatcagccacacccagaaagccaccctcgtgtgcctggctaccggcttctaccccgaccatgtggaactgtcttggtgggtcaacggcaaagaggtgcacagcggcgtgtgtaccgacccccagccactgaaagaacagcccgccctgaacgacagccggtactgcctgagcagcagactgagagtgtccgccaccttctggcagaacccccggaaccacttcagatgccaggtgcagttctacggcctgagcgagaacgacgagtggacccaggacagagccaagcccgtgacccagatcgtgtctgccgaagcctggggcagagccgattgcggctttaccagcgagagctaccagcagggcgtgctgagcgccaccatcctgtacgagatcctgctgggcaaggccaccctgtacgccgtgctggtgtctgccctggtgctgatggctatggtcaagcggaaggacagccgggga

SEQ ID NO: 2525 - DNA, 2706 bp, Artificial Sequence
  Synthetic Polynucloetide
atggccttaccagtgaccgccttgctcctgccgctggccttgctgctccacgccgccaggccggaagtgcagctggttgaatctggcggaggactggttcagcctggcggatctctgagactgtcttgtgccgccagcggcttcagcttcagcgacttttggatgagctgggtccgacaggcccctggcaaaggacttgaatgggtcgccacaatcagccaggccggcagcgagaaggactacgtggactctgtgaagggcagattcaccatcagccgggacaacgccaagaagtccctgtacctccagatgaacagcctgagagccgaggacaccgccgtgtactattgtgcctctggcgtgtacagcttcgactacagaggccagggcaccctggtcacagtctcttctggtaccggcggaggcggatctggcggcggaggtagcggtggcggaggatctgaattcgacatccagatgacccagagccccagcagcctgtctgccagcgtgggcgacagagtgaccatcacctgtcggagcagccagagcatcgtgcactccgtgggcaacaccttcctggaatggtatcagcagaagcccggcaaggcccccaagctgctgatctacaaggtgtccaacagattcagcggcgtgcccagcaggtttagcggctctggcagcggcaccgacttcaccctgaccatctctagcctccagcccgaggacttcgccacctactactgttttcaaggcagccagttcccctacaccttcggccagggaacaaaggtggaaatcaagcggctcgagatccagaaccctgatcctgccgtgtaccagctgcgggatagcaagagcagcgacaagagcgtgtgtctgttcaccgacttcgacagccagaccaacgtgtcccagagcaaggactccgacgtgtacatcaccgataagtgcgtgctggacatgcggagcatggacttcaagagcaactccgccgtggcctggtccaacaagtccgatttcgcctgcgccaacgccttcaacaacagcattatccccgaggacacattcttcccaagccccgagagcagctgcgacgtgaagctggtggaaaagagcttcgagacagacaccaacctgaacttccagaacctgagcgtgatcggcttcagaatcctgctgctgaaagtggccggctttaacctgctgatgaccctgcggctgtggtccagccgcgccaagagaagcggatctggcgtgaagcagaccctgaatttcgacctgctgaagctggctggcgacgtggaatccaacccaggccctactagtatggactggatttggcgcatccttttccttgtcggcgctgctaccggcgcgcattccgggccccagctccagctgcaagagtctggacctggcctggtcaagcctagcgagacactgagcctgacctgtaccgtgtccggcgatagcatcagcagcggcgattactactggggctggatcagacagcctcctggcaaaggactggaatggatcggccacatctactacagcggcgtgacctactacaaccccagcctgaagtccagagtgaccatcagcgtggacaccagccggaaccagttctccctgaagctgtctagcgtgacagccgccgataccgccgtgtactactgcaccagagaggacagcagcaactggcggagtagaggccagggaacactggtcacagttagctctggatccggcggaggcggaagtggaggcggaggatctggcggcggaggctctttcgaagaagtgcaactggtggaaagcggaggcggcctggtgcagcctggcggatctctgagactgagctgtgccgccagcggctacgagttcagccggtcctggatgaactgggtgcgccaggcccctggcaagggactggaatgggtgggaagaatctaccccggcgacggcgacaccaactacagcggcaagttcaagggccggttcaccatcagcgccgacaccagcaagaacaccgcctacctccagatgaacagcctgcgggccgaggataccgccgtgtactactgtgccagagatggcagctcctgggactggtacttcgacgtgtggggacagggaacccttgtgaccgtgtccagcacgcgtgaggacctgaagaacgtgttcccacctgaggtggccgtgttcgagcctagcgaggccgagatcagccacacccagaaagccaccctcgtgtgcctggctaccggcttctaccccgaccatgtggaactgtcttggtgggtcaacggcaaagaggtgcacagcggcgtgtgtaccgacccccagccactgaaagaacagcccgccctgaacgacagccggtactgcctgagcagcagactgagagtgtccgccaccttctggcagaacccccggaaccacttcagatgccaggtgcagttctacggcctgagcgagaacgacgagtggacccaggacagagccaagcccgtgacccagatcgtgtctgccgaagcctggggcagagccgattgcggctttaccagcgagagctaccagcagggcgtgctgagcgccaccatcctgtacgagatcctgctgggcaaggccaccctgtacgccgtgctggtgtctgccctggtgctgatggctatggtcaagcggaaggacagccgggga

SEQ ID NO: 2526 - DNA, 2700 bp, Artificial Sequence
  Synthetic Polynucloetide
atggccttaccagtgaccgccttgctcctgccgctggccttgctgctccacgccgccaggccggaagtgcagctggttgaatctggcggaggactggttcagcctggcggatctctgagactgtcttgtgccgccagcggcttcagcttcagcgacttttggatgagctgggtccgacaggcccctggcaaaggacttgaatgggtcgccacaatcagccaggccggcagcgagaaggactacgtggactctgtgaagggcagattcaccatcagccgggacaacgccaagaagtccctgtacctccagatgaacagcctgagagccgaggacaccgccgtgtactattgtgcctctggcgtgtacagcttcgactacagaggccagggcaccctggtcacagtctcttctggtaccggcggaggcggatctggcggcggaggtagcggtggcggaggatctgaattcgacatccagatgacccagagccccagcagcctgtctgccagcgtgggcgacagagtgaccatcacctgtagagccagccagaccatctggtcctacctgaactggtatcagcagaggcccggcaaggcccccaacctgctgatctatgccgccagctctctccagagcggcgtgcccagcagattttccggcagaggcagcggcaccgacttcaccctgaccatcagttccttgcaggccgaggacttcgccacctactactgccagcagagctacagcatcccccagattttcggccagggcaccaagctggaaatcaagctcgagatccagaaccctgatcctgccgtgtaccagctgcgggatagcaagagcagcgacaagagcgtgtgtctgttcaccgacttcgacagccagaccaacgtgtcccagagcaaggactccgacgtgtacatcaccgataagtgcgtgctggacatgcggagcatggacttcaagagcaactccgccgtggcctggtccaacaagtccgatttcgcctgcgccaacgccttcaacaacagcattatccccgaggacacattcttcccaagccccgagagcagctgcgacgtgaagctggtggaaaagagcttcgagacagacaccaacctgaacttccagaacctgagcgtgatcggcttcagaatcctgctgctgaaagtggccggctttaacctgctgatgaccctgcggctgtggtccagccgcgccaagagaagcggatctggcgtgaagcagaccctgaatttcgacctgctgaagctggctggcgacgtggaatccaacccaggccctactagtatggactggatttggcgcatccttttccttgtcggcgctgctaccggcgcgcattccgggccccagctccagctgcaagagtctggacctggcctggtcaagcctagcgagacactgagcctgacctgtaccgtgtccggcgatagcatcagcagcggcgattactactggggctggatcagacagcctcctggcaaaggactggaatggatcggccacatctactacagcggcgtgacctactacaaccccagcctgaagtccagagtgaccatcagcgtggacaccagccggaaccagttctccctgaagctgtctagcgtgacagccgccgataccgccgtgtactactgcaccagagaggacagcagcaactggcggagtagaggccagggaacactggtcacagttagctctggatccggcggaggcggaagtggaggcggaggatctggcggcggaggctctttcgaacaggtgcagctccagcagtctggacccggcctcgtgaagcctagccagacactgagcctgacctgcgccatcagcggcgatagcgtgtccagcaatagcgccgcctggaactggatcagacagtccccctctcggggcctggaatggctgggccggacctactaccgcagcaagtggtacaacgactacgccgtgtccgtgaagtcccggatcaccatcaaccccgacaccagcaagaaccagttctccttgcaactgaacagcgtgacccccgaggacaccgccgtgtactactgcgccagagaagtgaccggcgacctggaagatgccttcgacatctggggccagggaacaatggtcacagtgtccagcacgcgtgaggacctgaagaacgtgttcccacctgaggtggccgtgttcgagcctagcgaggccgagatcagccacacccagaaagccaccctcgtgtgcctggctaccggcttctaccccgaccatgtggaactgtcttggtgggtcaacggcaaagaggtgcacagcggcgtgtgtaccgacccccagccactgaaagaacagcccgccctgaacgacagccggtactgcctgagcagcagactgagagtgtccgccaccttctggcagaacccccggaaccacttcagatgccaggtgcagttctacggcctgagcgagaacgacgagtggacccaggacagagccaagcccgtgacccagatcgtgtctgccgaagcctggggcagagccgattgcggctttaccagcgagagctaccagcagggcgtgctgagcgccaccatcctgtacgagatcctgctgggcaaggccaccctgtacgccgtgctggtgtctgccctggtgctgatggctatggtcaagcggaaggacagccgggga

SEQ ID NO: 2527 - DNA, 2679 bp, Artificial Sequence
  Synthetic Polynucloetide
atggccttaccagtgaccgccttgctcctgccgctggccttgctgctccacgccgccaggccggaagtgcagctggttgaatctggcggaggactggttcagcctggcggatctctgagactgtcttgtgccgccagcggcttcagcttcagcgacttttggatgagctgggtccgacaggcccctggcaaaggacttgaatgggtcgccacaatcagccaggccggcagcgagaaggactacgtggactctgtgaagggcagattcaccatcagccgggacaacgccaagaagtccctgtacctccagatgaacagcctgagagccgaggacaccgccgtgtactattgtgcctctggcgtgtacagcttcgactacagaggccagggcaccctggtcacagtctcttctggtaccggcggaggcggatctggcggcggaggtagcggtggcggaggatctgaattcgacatccagatgacccagagccccgccaccatcgagaacacaagcctgtctgccagcgtgggcgacagagtgaccatcacctgtagagccagccagggcatcagctcttggctgacctggtatcagcagaagcccgagaaggcccccaagagcctgatctacgccgccagctctctgcagtctggcgtgcccagcagattttccggcagcggctctggcaccgacttcaccctgacaatcagcagcctgcagcccgaggacttcgccacctactactgccagcagtacgacagctaccccatcaccttcggccagggcacccggctggaaatcaagctcgagatccagaaccctgatcctgccgtgtaccagctgcgggatagcaagagcagcgacaagagcgtgtgtctgttcaccgacttcgacagccagaccaacgtgtcccagagcaaggactccgacgtgtacatcaccgataagtgcgtgctggacatgcggagcatggacttcaagagcaactccgccgtggcctggtccaacaagtccgatttcgcctgcgccaacgccttcaacaacagcattatccccgaggacacattcttcccaagccccgagagcagctgcgacgtgaagctggtggaaaagagcttcgagacagacaccaacctgaacttccagaacctgagcgtgatcggcttcagaatcctgctgctgaaagtggccggctttaacctgctgatgaccctgcggctgtggtccagccgcgccaagagaagcggatctggcgtgaagcagaccctgaatttcgacctgctgaagctggctggcgacgtggaatccaacccaggccctactagtatggactggatttggcgcatccttttccttgtcggcgctgctaccggcgcgcattccgggccccagctccagctgcaagagtctggacctggcctggtcaagcctagcgagacactgagcctgacctgtaccgtgtccggcgatagcatcagcagcggcgattactactggggctggatcagacagcctcctggcaaaggactggaatggatcggccacatctactacagcggcgtgacctactacaaccccagcctgaagtccagagtgaccatcagcgtggacaccagccggaaccagttctccctgaagctgtctagcgtgacagccgccgataccgccgtgtactactgcaccagagaggacagcagcaactggcggagtagaggccagggaacactggtcacagttagctctggatccggcggaggcggaagtggaggcggaggatctggcggcggaggctctttcgaacaggtgcaactgcagcagtggggagccggactgctgaagcctagcgagacactgagcctgacctgcgccgtgtacggcggcagcttcagcgcctactattggagctggatcagacagccccctggcaagggcctggaatggatcggcgacatcaatcacggcggaggcaccaactacaaccccagcctgaagtcccgcgtgaccatctccgtggacaccagcaagaaccagttctccctgaagctgaacagcgtgacagccgccgacacagccgtgtactactgtgccagcctgaccgcctattggggccagggatctcttgtgaccgtgtccagcacgcgtgaggacctgaagaacgtgttcccacctgaggtggccgtgttcgagcctagcgaggccgagatcagccacacccagaaagccaccctcgtgtgcctggctaccggcttctaccccgaccatgtggaactgtcttggtgggtcaacggcaaagaggtgcacagcggcgtgtgtaccgacccccagccactgaaagaacagcccgccctgaacgacagccggtactgcctgagcagcagactgagagtgtccgccaccttctggcagaacccccggaaccacttcagatgccaggtgcagttctacggcctgagcgagaacgacgagtggacccaggacagagccaagcccgtgacccagatcgtgtctgccgaagcctggggcagagccgattgcggctttaccagcgagagctaccagcagggcgtgctgagcgccaccatcctgtacgagatcctgctgggcaaggccaccctgtacgccgtgctggtgtctgccctggtgctgatggctatggtcaagcggaaggacagccgggga

SEQ ID NO: 2528 - DNA, 2694 bp, Artificial Sequence
  Synthetic Polynucloetide
atggccttaccagtgaccgccttgctcctgccgctggccttgctgctccacgccgccaggccggaagtgcagctggttgaatctggcggaggactggttcagcctggcggatctctgagactgtcttgtgccgccagcggcttcagcttcagcgacttttggatgagctgggtccgacaggcccctggcaaaggacttgaatgggtcgccacaatcagccaggccggcagcgagaaggactacgtggactctgtgaagggcagattcaccatcagccgggacaacgccaagaagtccctgtacctccagatgaacagcctgagagccgaggacaccgccgtgtactattgtgcctctggcgtgtacagcttcgactacagaggccagggcaccctggtcacagtctcttctggtaccggcggaggcggatctggcggcggaggtagcggtggcggaggatctgaattcgacgagatcgtgctgacccagagccctgatagcctggccgtgtctctgggcgagagagccaccatcaactgcaaggccagccagagcgtggacttcgacggcgacagctacctgaactggtatcagcagaagcccggccagccccccaaggtgctgatctatgccgccagcacactgcagagcggcgtgcccagcagattttctggcagcggctccggcaccgacttcaccctgaccatcaacagcctggaagccgaggacgccgccacctactactgccagcagagcaacgaggacccctggacctttggcggcggaacaaaggtggaaatcaagctcgagatccagaaccctgatcctgccgtgtaccagctgcgggatagcaagagcagcgacaagagcgtgtgtctgttcaccgacttcgacagccagaccaacgtgtcccagagcaaggactccgacgtgtacatcaccgataagtgcgtgctggacatgcggagcatggacttcaagagcaactccgccgtggcctggtccaacaagtccgatttcgcctgcgccaacgccttcaacaacagcattatccccgaggacacattcttcccaagccccgagagcagctgcgacgtgaagctggtggaaaagagcttcgagacagacaccaacctgaacttccagaacctgagcgtgatcggcttcagaatcctgctgctgaaagtggccggctttaacctgctgatgaccctgcggctgtggtccagccgcgccaagagaagcggatctggcgtgaagcagaccctgaatttcgacctgctgaagctggctggcgacgtggaatccaacccaggccctactagtatggactggatttggcgcatccttttccttgtcggcgctgctaccggcgcgcattccgggccccagctccagctgcaagagtctggacctggcctggtcaagcctagcgagacactgagcctgacctgtaccgtgtccggcgatagcatcagcagcggcgattactactggggctggatcagacagcctcctggcaaaggactggaatggatcggccacatctactacagcggcgtgacctactacaaccccagcctgaagtccagagtgaccatcagcgtggacaccagccggaaccagttctccctgaagctgtctagcgtgacagccgccgataccgccgtgtactactgcaccagagaggacagcagcaactggcggagtagaggccagggaacactggtcacagttagctctggatccggcggaggcggaagtggaggcggaggatctggcggcggaggctctttcgaacaggtgcaactggtgcagtccggcgctgaagtgaagaaacctggggccagcgtgaaggtgtcctgcaaggtgtccggctacacctttaccgactactacattacctgggtgcgccaggcccctggacaggccctggaatggatgggctggatctaccccggcagcggcaacaccaagtacagccagaagttccagggcagattcgtgttcagcgtggacaccagcgccagcaccgcctacctgcaactgtctagcctgaaggccgaagataccgccgtgtactactgcgccaactacggcaactattggttcgcctattggggccagggaacccttgtgaccgtgtcctctacgcgtgaggacctgaagaacgtgttcccacctgaggtggccgtgttcgagcctagcgaggccgagatcagccacacccagaaagccaccctcgtgtgcctggctaccggcttctaccccgaccatgtggaactgtcttggtgggtcaacggcaaagaggtgcacagcggcgtgtgtaccgacccccagccactgaaagaacagcccgccctgaacgacagccggtactgcctgagcagcagactgagagtgtccgccaccttctggcagaacccccggaaccacttcagatgccaggtgcagttctacggcctgagcgagaacgacgagtggacccaggacagagccaagcccgtgacccagatcgtgtctgccgaagcctggggcagagccgattgcggctttaccagcgagagctaccagcagggcgtgctgagcgccaccatcctgtacgagatcctgctgggcaaggccaccctgtacgccgtgctggtgtctgccctggtgctgatggctatggtcaagcggaaggacagccgggga

SEQ ID NO: 2529 - DNA, 2685 bp, Artificial Sequence
  Synthetic Polynucloetide
atggccttaccagtgaccgccttgctcctgccgctggccttgctgctccacgccgccaggccggaagtgcagctggttgaatctggcggaggactggttcagcctggcggatctctgagactgtcttgtgccgccagcggcttcagcttcagcgacttttggatgagctgggtccgacaggcccctggcaaaggacttgaatgggtcgccacaatcagccaggccggcagcgagaaggactacgtggactctgtgaagggcagattcaccatcagccgggacaacgccaagaagtccctgtacctccagatgaacagcctgagagccgaggacaccgccgtgtactattgtgcctctggcgtgtacagcttcgactacagaggccagggcaccctggtcacagtctcttctggtaccggcggaggcggatctggcggcggaggtagcggtggcggaggatctgaattcgacatccagatgacccagagccccagcagcctgtctgccagcgtgggcgacagagtgaccatcacctgtagagccagccagggcatcagctcttggctggcctggtatcagcagaagcccgagaaggcccccaagagcctgatctacgccgcctctagtctccagagcggcgtgcccagcagattttctggcagcggctccggcaccgacttcaccctgacaatcagctccctccagcccgaggacttcgccacctactactgccagcagtacaacagctaccctcccacctttggcggaggcaccaaggtggaaatcaagctcgagatccagaaccctgatcctgccgtgtaccagctgcgggatagcaagagcagcgacaagagcgtgtgtctgttcaccgacttcgacagccagaccaacgtgtcccagagcaaggactccgacgtgtacatcaccgataagtgcgtgctggacatgcggagcatggacttcaagagcaactccgccgtggcctggtccaacaagtccgatttcgcctgcgccaacgccttcaacaacagcattatccccgaggacacattcttcccaagccccgagagcagctgcgacgtgaagctggtggaaaagagcttcgagacagacaccaacctgaacttccagaacctgagcgtgatcggcttcagaatcctgctgctgaaagtggccggctttaacctgctgatgaccctgcggctgtggtccagccgcgccaagagaagcggatctggcgtgaagcagaccctgaatttcgacctgctgaagctggctggcgacgtggaatccaacccaggccctactagtatggactggatttggcgcatccttttccttgtcggcgctgctaccggcgcgcattccgggccccagctccagctgcaagagtctggacctggcctggtcaagcctagcgagacactgagcctgacctgtaccgtgtccggcgatagcatcagcagcggcgattactactggggctggatcagacagcctcctggcaaaggactggaatggatcggccacatctactacagcggcgtgacctactacaaccccagcctgaagtccagagtgaccatcagcgtggacaccagccggaaccagttctccctgaagctgtctagcgtgacagccgccgataccgccgtgtactactgcaccagagaggacagcagcaactggcggagtagaggccagggaacactggtcacagttagctctggatccggcggaggcggaagtggaggcggaggatctggcggcggaggctctttcgaagaagtgcaactggtgcagtctggcggagggctggtgcatcctgggggaagcctgagactgagctgtgccggctctggcttcgccttcagcagcagcaccatgcactggatcagacaggcccctggcaagggcctggaatggatcagcctgatcggaagcggagggggcatctactacggcgacagcgtgaagggccggttcaccatcagccgggacaacgccaagaacagcctgtacctccagatgaactccctgcgggccgaggacatggccgtgtactattgtgtgcggggctacttcgactgggtggactacttcgattactggggccagggcaccctcgtgaccgtgtcatctacgcgtgaggacctgaagaacgtgttcccacctgaggtggccgtgttcgagcctagcgaggccgagatcagccacacccagaaagccaccctcgtgtgcctggctaccggcttctaccccgaccatgtggaactgtcttggtgggtcaacggcaaagaggtgcacagcggcgtgtgtaccgacccccagccactgaaagaacagcccgccctgaacgacagccggtactgcctgagcagcagactgagagtgtccgccaccttctggcagaacccccggaaccacttcagatgccaggtgcagttctacggcctgagcgagaacgacgagtggacccaggacagagccaagcccgtgacccagatcgtgtctgccgaagcctggggcagagccgattgcggctttaccagcgagagctaccagcagggcgtgctgagcgccaccatcctgtacgagatcctgctgggcaaggccaccctgtacgccgtgctggtgtctgccctggtgctgatggctatggtcaagcggaaggacagccgggga

SEQ ID NO: 2530 - DNA, 2715 bp, Artificial Sequence
  Synthetic Polynucloetide
atggccttaccagtgaccgccttgctcctgccgctggccttgctgctccacgccgccaggccggaagtgcagctggttgaatctggcggaggactggttcagcctggcggatctctgagactgtcttgtgccgccagcggcttcagcttcagcgacttttggatgagctgggtccgacaggcccctggcaaaggacttgaatgggtcgccacaatcagccaggccggcagcgagaaggactacgtggactctgtgaagggcagattcaccatcagccgggacaacgccaagaagtccctgtacctccagatgaacagcctgagagccgaggacaccgccgtgtactattgtgcctctggcgtgtacagcttcgactacagaggccagggcaccctggtcacagtctcttctggtaccggcggaggcggatctggcggcggaggtagcggtggcggaggatctgaattcgacgacatcgtgatgacacagtcaccagatagcctcaccgtctccctgggggagcggaccaccattaattgtaaatccagccaaagcgtgctggactcaagcaagaacaagaatagcctcgcctggtatcagcagaagcccggtcagcctccaaagctgctgctttcttgggcctccaccagagagtccgggattcctgataggtttagtggttcaggctccggcacagattttactctgaccattgattctctccagccagaggattctgcaacttattactgccagcaaagcgcccactttcctataacttttggccagggaacccgacttgaaatcaagctcgagatccagaaccctgatcctgccgtgtaccagctgcgggatagcaagagcagcgacaagagcgtgtgtctgttcaccgacttcgacagccagaccaacgtgtcccagagcaaggactccgacgtgtacatcaccgataagtgcgtgctggacatgcggagcatggacttcaagagcaactccgccgtggcctggtccaacaagtccgatttcgcctgcgccaacgccttcaacaacagcattatccccgaggacacattcttcccaagccccgagagcagctgcgacgtgaagctggtggaaaagagcttcgagacagacaccaacctgaacttccagaacctgagcgtgatcggcttcagaatcctgctgctgaaagtggccggctttaacctgctgatgaccctgcggctgtggtccagccgcgccaagagaagcggatctggcgtgaagcagaccctgaatttcgacctgctgaagctggctggcgacgtggaatccaacccaggccctactagtatggactggatttggcgcatccttttccttgtcggcgctgctaccggcgcgcattccgggccccagctccagctgcaagagtctggacctggcctggtcaagcctagcgagacactgagcctgacctgtaccgtgtccggcgatagcatcagcagcggcgattactactggggctggatcagacagcctcctggcaaaggactggaatggatcggccacatctactacagcggcgtgacctactacaaccccagcctgaagtccagagtgaccatcagcgtggacaccagccggaaccagttctccctgaagctgtctagcgtgacagccgccgataccgccgtgtactactgcaccagagaggacagcagcaactggcggagtagaggccagggaacactggtcacagttagctctggatccggcggaggcggaagtggaggcggaggatctggcggcggaggctctttcgaacaggtgcagctggtgcagagcggtgccgaagtgaagaaaccaggtgcatccgttaaagtttcatgtaaggctagtggatataccttcaccaattacggaatgaactgggtgaaacaggcccctggccagggactgaagtggatggggtggattaacacctacaccggggagccgacttatgcagacgactttaaggggcgggtcacgatgacctccgacacctccaccagtaccgcctacctggagctgcacaaccttaggtcagacgataccgccgtgtattactgtgcccgatggtcttggtccgacggatactatgtctacttcgactattggggccaggggaccacagttaccgtgtcctctacgcgtgaggacctgaagaacgtgttcccacctgaggtggccgtgttcgagcctagcgaggccgagatcagccacacccagaaagccaccctcgtgtgcctggctaccggcttctaccccgaccatgtggaactgtcttggtgggtcaacggcaaagaggtgcacagcggcgtgtgtaccgacccccagccactgaaagaacagcccgccctgaacgacagccggtactgcctgagcagcagactgagagtgtccgccaccttctggcagaacccccggaaccacttcagatgccaggtgcagttctacggcctgagcgagaacgacgagtggacccaggacagagccaagcccgtgacccagatcgtgtctgccgaagcctggggcagagccgattgcggctttaccagcgagagctaccagcagggcgtgctgagcgccaccatcctgtacgagatcctgctgggcaaggccaccctgtacgccgtgctggtgtctgccctggtgctgatggctatggtcaagcggaaggacagccgggga

SEQ ID NO: 2531 - DNA, 2703 bp, Artificial Sequence
  Synthetic Polynucloetide
atggccttaccagtgaccgccttgctcctgccgctggccttgctgctccacgccgccaggccggaagtgcagctggttgaatctggcggaggactggttcagcctggcggatctctgagactgtcttgtgccgccagcggcttcagcttcagcgacttttggatgagctgggtccgacaggcccctggcaaaggacttgaatgggtcgccacaatcagccaggccggcagcgagaaggactacgtggactctgtgaagggcagattcaccatcagccgggacaacgccaagaagtccctgtacctccagatgaacagcctgagagccgaggacaccgccgtgtactattgtgcctctggcgtgtacagcttcgactacagaggccagggcaccctggtcacagtctcttctggtaccggcggaggcggatctggcggcggaggtagcggtggcggaggatctgaattcgacgagatcgtgctgacacagagccctggaagcctggccgtgtctcctggcgagcgcgtgacaatgagctgcaagagcagccagagcgtgttcttcagcagctcccagaagaactacctggcctggtatcagcagatccccggccagagccccagactgctgatctactgggccagcaccagagaaagcggcgtgcccgatagattcaccggcagcggctctggcaccgacttcaccctgacaatcagcagcgtgcagcccgaggacctggctatctactactgccaccagtacctgagcagccggaccttcggccagggcaccaagctggaaatcaagagactcgagatccagaaccctgatcctgccgtgtaccagctgcgggatagcaagagcagcgacaagagcgtgtgtctgttcaccgacttcgacagccagaccaacgtgtcccagagcaaggactccgacgtgtacatcaccgataagtgcgtgctggacatgcggagcatggacttcaagagcaactccgccgtggcctggtccaacaagtccgatttcgcctgcgccaacgccttcaacaacagcattatccccgaggacacattcttcccaagccccgagagcagctgcgacgtgaagctggtggaaaagagcttcgagacagacaccaacctgaacttccagaacctgagcgtgatcggcttcagaatcctgctgctgaaagtggccggctttaacctgctgatgaccctgcggctgtggtccagccgcgccaagagaagcggatctggcgtgaagcagaccctgaatttcgacctgctgaagctggctggcgacgtggaatccaacccaggccctactagtatggactggatttggcgcatccttttccttgtcggcgctgctaccggcgcgcattccgggccccagctccagctgcaagagtctggacctggcctggtcaagcctagcgagacactgagcctgacctgtaccgtgtccggcgatagcatcagcagcggcgattactactggggctggatcagacagcctcctggcaaaggactggaatggatcggccacatctactacagcggcgtgacctactacaaccccagcctgaagtccagagtgaccatcagcgtggacaccagccggaaccagttctccctgaagctgtctagcgtgacagccgccgataccgccgtgtactactgcaccagagaggacagcagcaactggcggagtagaggccagggaacactggtcacagttagctctggatccggcggaggcggaagtggaggcggaggatctggcggcggaggctctttcgaacaggtgcaactgcagcagcctggcgctgaggtcgtgaagccaggcgcttccgtgaagatgtcctgcaaggccagcggctacaccttcaccagctactacatccactggatcaagcagacccctggacagggcctggaatgggtgggagtgatctaccccggcaacgacgacatcagctacaaccagaagttccagggcaaggccaccctgaccgccgacaagtctagcaccaccgcctacatgcaactgtccagcctgaccagcgaggacagcgccgtgtactactgcgccagagaagtgcggctgcggtacttcgatgtgtggggccagggaaccaccgtgaccgtgtcatctacgcgtgaggacctgaagaacgtgttcccacctgaggtggccgtgttcgagcctagcgaggccgagatcagccacacccagaaagccaccctcgtgtgcctggctaccggcttctaccccgaccatgtggaactgtcttggtgggtcaacggcaaagaggtgcacagcggcgtgtgtaccgacccccagccactgaaagaacagcccgccctgaacgacagccggtactgcctgagcagcagactgagagtgtccgccaccttctggcagaacccccggaaccacttcagatgccaggtgcagttctacggcctgagcgagaacgacgagtggacccaggacagagccaagcccgtgacccagatcgtgtctgccgaagcctggggcagagccgattgcggctttaccagcgagagctaccagcagggcgtgctgagcgccaccatcctgtacgagatcctgctgggcaaggccaccctgtacgccgtgctggtgtctgccctggtgctgatggctatggtcaagcggaaggacagccgggga

SEQ ID NO: 2532 - DNA, 2715 bp, Artificial Sequence
  Synthetic Polynucloetide
atggccttaccagtgaccgccttgctcctgccgctggccttgctgctccacgccgccaggccggaagtgcagctggttgaatctggcggaggactggttcagcctggcggatctctgagactgtcttgtgccgccagcggcttcagcttcagcgacttttggatgagctgggtccgacaggcccctggcaaaggacttgaatgggtcgccacaatcagccaggccggcagcgagaaggactacgtggactctgtgaagggcagattcaccatcagccgggacaacgccaagaagtccctgtacctccagatgaacagcctgagagccgaggacaccgccgtgtactattgtgcctctggcgtgtacagcttcgactacagaggccagggcaccctggtcacagtctcttctggtaccggcggaggcggatctggcggcggaggtagcggtggcggaggatctgaattcgatgtgctgctgacccagagccctctgagcctgcctgtgacactgggacagcctgccagcatctcctgtcggagcagccagaccatcgtgcacagcaacggcaacacctacctggaatggttccagcagcggccaggccagagccccagactgctgatctaccaggtgtccaacagattcagcggcgtgcccgacagattctccggcagcggctctggcaccgacttcaccctgaagatcagccgggtggaagccgaggacgtgggcgtgtactactgttttcaaggcagccacgtgccccggacctttggcggaggaacaaaggtggaaatcaagagagccctcgagatccagaaccctgatcctgccgtgtaccagctgcgggatagcaagagcagcgacaagagcgtgtgtctgttcaccgacttcgacagccagaccaacgtgtcccagagcaaggactccgacgtgtacatcaccgataagtgcgtgctggacatgcggagcatggacttcaagagcaactccgccgtggcctggtccaacaagtccgatttcgcctgcgccaacgccttcaacaacagcattatccccgaggacacattcttcccaagccccgagagcagctgcgacgtgaagctggtggaaaagagcttcgagacagacaccaacctgaacttccagaacctgagcgtgatcggcttcagaatcctgctgctgaaagtggccggctttaacctgctgatgaccctgcggctgtggtccagccgcgccaagagaagcggatctggcgtgaagcagaccctgaatttcgacctgctgaagctggctggcgacgtggaatccaacccaggccctactagtatggactggatttggcgcatccttttccttgtcggcgctgctaccggcgcgcattccgggccccagctccagctgcaagagtctggacctggcctggtcaagcctagcgagacactgagcctgacctgtaccgtgtccggcgatagcatcagcagcggcgattactactggggctggatcagacagcctcctggcaaaggactggaatggatcggccacatctactacagcggcgtgacctactacaaccccagcctgaagtccagagtgaccatcagcgtggacaccagccggaaccagttctccctgaagctgtctagcgtgacagccgccgataccgccgtgtactactgcaccagagaggacagcagcaactggcggagtagaggccagggaacactggtcacagttagctctggatccggcggaggcggaagtggaggcggaggatctggcggcggaggctctttcgaacagatccaactggtgcagagcggcagcgagctgaagaaacctggggccagcgtgaaggtgtcctgcaaggccagcggctacacctttaccaactacggcatgaactgggtgcgccaggcccctggacagggcctgaaatggatgggctggatcaacaccaacaccggcgagcctaagtacgccgaagagttcaagggcagattcgccctgagcctggacaccagcgtgtccacagcctacctccagatcaacagcctgaaggccgaggataccgccgtgtacttctgcgccagaggctacggcaactacgccagaggggcttggctggcctattggggccagggaacactcgtgaccgtgtcctctacgcgtgaggacctgaagaacgtgttcccacctgaggtggccgtgttcgagcctagcgaggccgagatcagccacacccagaaagccaccctcgtgtgcctggctaccggcttctaccccgaccatgtggaactgtcttggtgggtcaacggcaaagaggtgcacagcggcgtgtgtaccgacccccagccactgaaagaacagcccgccctgaacgacagccggtactgcctgagcagcagactgagagtgtccgccaccttctggcagaacccccggaaccacttcagatgccaggtgcagttctacggcctgagcgagaacgacgagtggacccaggacagagccaagcccgtgacccagatcgtgtctgccgaagcctggggcagagccgattgcggctttaccagcgagagctaccagcagggcgtgctgagcgccaccatcctgtacgagatcctgctgggcaaggccaccctgtacgccgtgctggtgtctgccctggtgctgatggctatggtcaagcggaaggacagccgggga

SEQ ID NO: 2533 - DNA, 2670 bp, Artificial Sequence
  Synthetic Polynucloetide
atggccttaccagtgaccgccttgctcctgccgctggccttgctgctccacgccgccaggccggaagtgcagctggttgaatctggcggaggactggttcagcctggcggatctctgagactgtcttgtgccgccagcggcttcagcttcagcgacttttggatgagctgggtccgacaggcccctggcaaaggacttgaatgggtcgccacaatcagccaggccggcagcgagaaggactacgtggactctgtgaagggcagattcaccatcagccgggacaacgccaagaagtccctgtacctccagatgaacagcctgagagccgaggacaccgccgtgtactattgtgcctctggcgtgtacagcttcgactacagaggccagggcaccctggtcacagtctcttctggtaccggcggaggcggatctggcggcggaggtagcggtggcggaggatctgaattcgacgagatcgtgctgacacagagccctgccacactctctctgagccctggcgaaagagccaccctgagctgtagcgccagcagcagcatcaactacatctactggctccagcagaagcccggccaggcccccagaatcctgatctacctgaccagcaacctggcctccggcgtgccagccagattttctggcagcggctccggcaccgacttcaccctgacaatcagcagcctggaacccgaggacttcgccgtgtactactgcctccagtggtccagcaaccccctgacctttggcggaggcaccaaggtggaaatcaagctcgagatccagaaccctgatcctgccgtgtaccagctgcgggatagcaagagcagcgacaagagcgtgtgtctgttcaccgacttcgacagccagaccaacgtgtcccagagcaaggactccgacgtgtacatcaccgataagtgcgtgctggacatgcggagcatggacttcaagagcaactccgccgtggcctggtccaacaagtccgatttcgcctgcgccaacgccttcaacaacagcattatccccgaggacacattcttcccaagccccgagagcagctgcgacgtgaagctggtggaaaagagcttcgagacagacaccaacctgaacttccagaacctgagcgtgatcggcttcagaatcctgctgctgaaagtggccggctttaacctgctgatgaccctgcggctgtggtccagccgcgccaagagaagcggatctggcgtgaagcagaccctgaatttcgacctgctgaagctggctggcgacgtggaatccaacccaggccctactagtatggactggatttggcgcatccttttccttgtcggcgctgctaccggcgcgcattccgggccccagctccagctgcaagagtctggacctggcctggtcaagcctagcgagacactgagcctgacctgtaccgtgtccggcgatagcatcagcagcggcgattactactggggctggatcagacagcctcctggcaaaggactggaatggatcggccacatctactacagcggcgtgacctactacaaccccagcctgaagtccagagtgaccatcagcgtggacaccagccggaaccagttctccctgaagctgtctagcgtgacagccgccgataccgccgtgtactactgcaccagagaggacagcagcaactggcggagtagaggccagggaacactggtcacagttagctctggatccggcggaggcggaagtggaggcggaggatctggcggcggaggctctttcgaagaagtgcaactggtggaaagcgggggaggacttgtgaagcctggcggctctctgagactgagctgtgccgcctctggcttcaccttcagcagctacgacatgagctgggtgcgccaggctcctggcaagggactggaatgggtgtccaccatcagcagcggcggcagctacacctactacctggacagcatcaagggccggttcaccatctccagagacaacgccaagaacagcctgtacctccagatgaactccctgcgggccgaggacacagccgtgtattattgcgccagacagggcctggattactggggcagaggcacccttgtgaccgtgtcctctacgcgtgaggacctgaagaacgtgttcccacctgaggtggccgtgttcgagcctagcgaggccgagatcagccacacccagaaagccaccctcgtgtgcctggctaccggcttctaccccgaccatgtggaactgtcttggtgggtcaacggcaaagaggtgcacagcggcgtgtgtaccgacccccagccactgaaagaacagcccgccctgaacgacagccggtactgcctgagcagcagactgagagtgtccgccaccttctggcagaacccccggaaccacttcagatgccaggtgcagttctacggcctgagcgagaacgacgagtggacccaggacagagccaagcccgtgacccagatcgtgtctgccgaagcctggggcagagccgattgcggctttaccagcgagagctaccagcagggcgtgctgagcgccaccatcctgtacgagatcctgctgggcaaggccaccctgtacgccgtgctggtgtctgccctggtgctgatggctatggtcaagcggaaggacagccgggga

SEQ ID NO: 2534 - DNA, 2697 bp, Artificial Sequence
  Synthetic Polynucloetide
atggccttaccagtgaccgccttgctcctgccgctggccttgctgctccacgccgccaggccggaagtgcagctggttgaatctggcggaggactggttcagcctggcggatctctgagactgtcttgtgccgccagcggcttcagcttcagcgacttttggatgagctgggtccgacaggcccctggcaaaggacttgaatgggtcgccacaatcagccaggccggcagcgagaaggactacgtggactctgtgaagggcagattcaccatcagccgggacaacgccaagaagtccctgtacctccagatgaacagcctgagagccgaggacaccgccgtgtactattgtgcctctggcgtgtacagcttcgactacagaggccagggcaccctggtcacagtctcttctggtaccggcggaggcggatctggcggcggaggtagcggtggcggaggatctgaattcgacatcgtgatgacccagagccccgatagcctggccgtgtctctgggagagagagccaccatcaactgccgggccagcaagagcgtgtccaccagcggctacagcttcatgcactggtatcagcagaagcccggccagccccccaagctgctgatctacctggcctccaacctggaaagcggcgtgcccgatagattcagcggcagcggctctggcaccgacttcaccctgaccatcagttctcttcaggccgaggacgtggccgtgtactactgccagcacagcagagaggtgccctggacattcggccagggcacaaaggtggaaatcaagcggctcgagatccagaaccctgatcctgccgtgtaccagctgcgggatagcaagagcagcgacaagagcgtgtgtctgttcaccgacttcgacagccagaccaacgtgtcccagagcaaggactccgacgtgtacatcaccgataagtgcgtgctggacatgcggagcatggacttcaagagcaactccgccgtggcctggtccaacaagtccgatttcgcctgcgccaacgccttcaacaacagcattatccccgaggacacattcttcccaagccccgagagcagctgcgacgtgaagctggtggaaaagagcttcgagacagacaccaacctgaacttccagaacctgagcgtgatcggcttcagaatcctgctgctgaaagtggccggctttaacctgctgatgaccctgcggctgtggtccagccgcgccaagagaagcggatctggcgtgaagcagaccctgaatttcgacctgctgaagctggctggcgacgtggaatccaacccaggccctactagtatggactggatttggcgcatccttttccttgtcggcgctgctaccggcgcgcattccgggccccagctccagctgcaagagtctggacctggcctggtcaagcctagcgagacactgagcctgacctgtaccgtgtccggcgatagcatcagcagcggcgattactactggggctggatcagacagcctcctggcaaaggactggaatggatcggccacatctactacagcggcgtgacctactacaaccccagcctgaagtccagagtgaccatcagcgtggacaccagccggaaccagttctccctgaagctgtctagcgtgacagccgccgataccgccgtgtactactgcaccagagaggacagcagcaactggcggagtagaggccagggaacactggtcacagttagctctggatccggcggaggcggaagtggaggcggaggatctggcggcggaggctctttcgaacaggtgcagctggtgcagtctggggccgaagtgaagaaacctggggccagcgtgaaggtgtcctgcaaggccagcggatacacctttaccaactacggcatgaactgggtgcgccaggcccctggacagggcctggaatggatgggctggatcaacacctacaccggcgagcccacatacgccgacgccttcaagggcagattcgccttcagcctggacaccagcacctccaccgcctacctccagatcaacagcctgcggagcgacgacaccgccgtgtattattgcgccagagattacggcgactacgggatggactattggggccagggaaccaccgtgaccgtgtcctctacgcgtgaggacctgaagaacgtgttcccacctgaggtggccgtgttcgagcctagcgaggccgagatcagccacacccagaaagccaccctcgtgtgcctggctaccggcttctaccccgaccatgtggaactgtcttggtgggtcaacggcaaagaggtgcacagcggcgtgtgtaccgacccccagccactgaaagaacagcccgccctgaacgacagccggtactgcctgagcagcagactgagagtgtccgccaccttctggcagaacccccggaaccacttcagatgccaggtgcagttctacggcctgagcgagaacgacgagtggacccaggacagagccaagcccgtgacccagatcgtgtctgccgaagcctggggcagagccgattgcggctttaccagcgagagctaccagcagggcgtgctgagcgccaccatcctgtacgagatcctgctgggcaaggccaccctgtacgccgtgctggtgtctgccctggtgctgatggctatggtcaagcggaaggacagccgggga

SEQ ID NO: 2535 - DNA, 2685 bp, Artificial Sequence
  Synthetic Polynucloetide
atggccttaccagtgaccgccttgctcctgccgctggccttgctgctccacgccgccaggccggaagtgcagctggttgaatctggcggaggactggttcagcctggcggatctctgagactgtcttgtgccgccagcggcttcagcttcagcgacttttggatgagctgggtccgacaggcccctggcaaaggacttgaatgggtcgccacaatcagccaggccggcagcgagaaggactacgtggactctgtgaagggcagattcaccatcagccgggacaacgccaagaagtccctgtacctccagatgaacagcctgagagccgaggacaccgccgtgtactattgtgcctctggcgtgtacagcttcgactacagaggccagggcaccctggtcacagtctcttctggtaccggcggaggcggatctggcggcggaggtagcggtggcggaggatctgaattcgacatcgtgatgacccagacccccctgaccctgagcgtgacaatcggacagcctgccagcatctcctgcaagagcagccagagcctgctggacagcgacggcaagacctacctgaactggctgctgcagaggccaggccagagccccgagagactgatctacctggtgtccaagctggactccggcgtgcccgatagattcacaggcagcggctccggcaccgacttcaccctgaagatcagccgggtggaagccgaggacctgggcgtgtactgttgttggcagggcacccacttcccttacaccttcggcggagggaccaaggtggaaatcaagggcctcgagatccagaaccctgatcctgccgtgtaccagctgcgggatagcaagagcagcgacaagagcgtgtgtctgttcaccgacttcgacagccagaccaacgtgtcccagagcaaggactccgacgtgtacatcaccgataagtgcgtgctggacatgcggagcatggacttcaagagcaactccgccgtggcctggtccaacaagtccgatttcgcctgcgccaacgccttcaacaacagcattatccccgaggacacattcttcccaagccccgagagcagctgcgacgtgaagctggtggaaaagagcttcgagacagacaccaacctgaacttccagaacctgagcgtgatcggcttcagaatcctgctgctgaaagtggccggctttaacctgctgatgaccctgcggctgtggtccagccgcgccaagagaagcggatctggcgtgaagcagaccctgaatttcgacctgctgaagctggctggcgacgtggaatccaacccaggccctactagtatggactggatttggcgcatccttttccttgtcggcgctgctaccggcgcgcattccgggccccagctccagctgcaagagtctggacctggcctggtcaagcctagcgagacactgagcctgacctgtaccgtgtccggcgatagcatcagcagcggcgattactactggggctggatcagacagcctcctggcaaaggactggaatggatcggccacatctactacagcggcgtgacctactacaaccccagcctgaagtccagagtgaccatcagcgtggacaccagccggaaccagttctccctgaagctgtctagcgtgacagccgccgataccgccgtgtactactgcaccagagaggacagcagcaactggcggagtagaggccagggaacactggtcacagttagctctggatccggcggaggcggaagtggaggcggaggatctggcggcggaggctctttcgaacaggtgcaactgcagcagcctggcgctgaacttgtgcggccaggcgcctctgtgaagctgagctgtaaagccagcggctacaccttcaccagctactggatgaactgggtcaagcagcgcccaggccagggcctggaatggatcggaatgatcgaccccagcgacagcgagacacactacaaccacatcttcaaggacaaggccaccctgaccgtggacaagtccagcagcacagcctacctgcaactgtccagcctgaccagcgaggacagcgccgtgtactactgcgcccggaacctgtatctgtggggccagggaacaagcgtgaccgtgtctagcacgcgtgaggacctgaagaacgtgttcccacctgaggtggccgtgttcgagcctagcgaggccgagatcagccacacccagaaagccaccctcgtgtgcctggctaccggcttctaccccgaccatgtggaactgtcttggtgggtcaacggcaaagaggtgcacagcggcgtgtgtaccgacccccagccactgaaagaacagcccgccctgaacgacagccggtactgcctgagcagcagactgagagtgtccgccaccttctggcagaacccccggaaccacttcagatgccaggtgcagttctacggcctgagcgagaacgacgagtggacccaggacagagccaagcccgtgacccagatcgtgtctgccgaagcctggggcagagccgattgcggctttaccagcgagagctaccagcagggcgtgctgagcgccaccatcctgtacgagatcctgctgggcaaggccaccctgtacgccgtgctggtgtctgccctggtgctgatggctatggtcaagcggaaggacagccgggga

SEQ ID NO: 2536 - DNA, 2709 bp, Artificial Sequence
  Synthetic Polynucloetide
atggccttaccagtgaccgccttgctcctgccgctggccttgctgctccacgccgccaggccggaagtgcagctggttgaatctggcggaggactggttcagcctggcggatctctgagactgtcttgtgccgccagcggcttcagcttcagcgacttttggatgagctgggtccgacaggcccctggcaaaggacttgaatgggtcgccacaatcagccaggccggcagcgagaaggactacgtggactctgtgaagggcagattcaccatcagccgggacaacgccaagaagtccctgtacctccagatgaacagcctgagagccgaggacaccgccgtgtactattgtgcctctggcgtgtacagcttcgactacagaggccagggcaccctggtcacagtctcttctggtaccggcggaggcggatctggcggcggaggtagcggtggcggaggatctgaattcgacatcgtgatgacccagagccccgatagcctggccgtgtctctgggagagagagccaccatcaactgcgagagcagccagagcctgctgaacagcggcaaccagaagaactacctgacctggtatcagcagaagcccggccagccccccaagcccctgatctattgggccagcaccagagaaagcggcgtgcccgatagattcagcggcagcggaagcggcaccgacttcaccctgaccatcagttctcttcaggccgaggacgtggccgtgtactactgccagaacgactacagctacccctacaccttcggccagggcaccaagctggaaatcaagagactcgagatccagaaccctgatcctgccgtgtaccagctgcgggatagcaagagcagcgacaagagcgtgtgtctgttcaccgacttcgacagccagaccaacgtgtcccagagcaaggactccgacgtgtacatcaccgataagtgcgtgctggacatgcggagcatggacttcaagagcaactccgccgtggcctggtccaacaagtccgatttcgcctgcgccaacgccttcaacaacagcattatccccgaggacacattcttcccaagccccgagagcagctgcgacgtgaagctggtggaaaagagcttcgagacagacaccaacctgaacttccagaacctgagcgtgatcggcttcagaatcctgctgctgaaagtggccggctttaacctgctgatgaccctgcggctgtggtccagccgcgccaagagaagcggatctggcgtgaagcagaccctgaatttcgacctgctgaagctggctggcgacgtggaatccaacccaggccctactagtatggactggatttggcgcatccttttccttgtcggcgctgctaccggcgcgcattccgggccccagctccagctgcaagagtctggacctggcctggtcaagcctagcgagacactgagcctgacctgtaccgtgtccggcgatagcatcagcagcggcgattactactggggctggatcagacagcctcctggcaaaggactggaatggatcggccacatctactacagcggcgtgacctactacaaccccagcctgaagtccagagtgaccatcagcgtggacaccagccggaaccagttctccctgaagctgtctagcgtgacagccgccgataccgccgtgtactactgcaccagagaggacagcagcaactggcggagtagaggccagggaacactggtcacagttagctctggatccggcggaggcggaagtggaggcggaggatctggcggcggaggctctttcgaagaagtgcagctggtgcagtctggggccgaagtgaagaagcctggcgagagcctgaagatcagctgcaagggcagcggctacagcttcaccgactactacatgaagtgggccagacagatgcccggcaagggcctggaatggatgggcgacatcatccccagcaacggggccaccttctacaaccagaaattcaagggccaagtgaccatctccgccgacaagagcatcagcaccacctacctccagtggtccagcctgaaggccagcgacaccgccatgtactattgcgccagaagccatctgctgcgggccagttggttcgcctattggggccagggaacaatggtcacagtgtccagcacgcgtgaggacctgaagaacgtgttcccacctgaggtggccgtgttcgagcctagcgaggccgagatcagccacacccagaaagccaccctcgtgtgcctggctaccggcttctaccccgaccatgtggaactgtcttggtgggtcaacggcaaagaggtgcacagcggcgtgtgtaccgacccccagccactgaaagaacagcccgccctgaacgacagccggtactgcctgagcagcagactgagagtgtccgccaccttctggcagaacccccggaaccacttcagatgccaggtgcagttctacggcctgagcgagaacgacgagtggacccaggacagagccaagcccgtgacccagatcgtgtctgccgaagcctggggcagagccgattgcggctttaccagcgagagctaccagcagggcgtgctgagcgccaccatcctgtacgagatcctgctgggcaaggccaccctgtacgccgtgctggtgtctgccctggtgctgatggctatggtcaagcggaaggacagccgggga

SEQ ID NO: 2537 - DNA, 2694 bp, Artificial Sequence
  Synthetic Polynucloetide
atggccttaccagtgaccgccttgctcctgccgctggccttgctgctccacgccgccaggccggaagtgcagctggttgaatctggcggaggactggttcagcctggcggatctctgagactgtcttgtgccgccagcggcttcagcttcagcgacttttggatgagctgggtccgacaggcccctggcaaaggacttgaatgggtcgccacaatcagccaggccggcagcgagaaggactacgtggactctgtgaagggcagattcaccatcagccgggacaacgccaagaagtccctgtacctccagatgaacagcctgagagccgaggacaccgccgtgtactattgtgcctctggcgtgtacagcttcgactacagaggccagggcaccctggtcacagtctcttctggtaccggcggaggcggatctggcggcggaggtagcggtggcggaggatctgaattcgacatccagatgacccagtctaccagttccctgagtgcatccctcggagacagggtgacgatcagttgcagcgcaagccaagggatcaataactatctgaactggtatcagcagaaaccggacggaacagtcgaactcctgatttattacaccagcacccttcagagtggcgtcccttcccggttcagtggctccggaagcgggaccgattactccctgaccatttctaatctggagccagaggacataggaacgtattattgccagcagtatagtaaactgccacgaacttttggaggggggacgaaactggagatcaaactcgagatccagaaccctgatcctgccgtgtaccagctgcgggatagcaagagcagcgacaagagcgtgtgtctgttcaccgacttcgacagccagaccaacgtgtcccagagcaaggactccgacgtgtacatcaccgataagtgcgtgctggacatgcggagcatggacttcaagagcaactccgccgtggcctggtccaacaagtccgatttcgcctgcgccaacgccttcaacaacagcattatccccgaggacacattcttcccaagccccgagagcagctgcgacgtgaagctggtggaaaagagcttcgagacagacaccaacctgaacttccagaacctgagcgtgatcggcttcagaatcctgctgctgaaagtggccggctttaacctgctgatgaccctgcggctgtggtccagccgcgccaagagaagcggatctggcgtgaagcagaccctgaatttcgacctgctgaagctggctggcgacgtggaatccaacccaggccctactagtatggactggatttggcgcatccttttccttgtcggcgctgctaccggcgcgcattccgggccccagctccagctgcaagagtctggacctggcctggtcaagcctagcgagacactgagcctgacctgtaccgtgtccggcgatagcatcagcagcggcgattactactggggctggatcagacagcctcctggcaaaggactggaatggatcggccacatctactacagcggcgtgacctactacaaccccagcctgaagtccagagtgaccatcagcgtggacaccagccggaaccagttctccctgaagctgtctagcgtgacagccgccgataccgccgtgtactactgcaccagagaggacagcagcaactggcggagtagaggccagggaacactggtcacagttagctctggatccggcggaggcggaagtggaggcggaggatctggcggcggaggctctttcgaacaggtgcaactccagcagtccggaagcgagcttatgatgccaggggcatcagtgaagatcagctgcaaggctactggctacaccttctctaattactggatagagtgggttaaacaaaggccagggcacggcctggaatggatcggcgagatcctgcctgggacaggccgaaccatttataacgagaagttcaaaggcaaggctactttcaccgcagatataagctctaatacagtgcaaatgcagctctcttccctgacaagtgaggatagtgccgtgtattattgcgcacgaagagattactatggaaatttttattacgctatggattattggggtcaaggaacaagtgtgaccgttagcagcacgcgtgaggacctgaagaacgtgttcccacctgaggtggccgtgttcgagcctagcgaggccgagatcagccacacccagaaagccaccctcgtgtgcctggctaccggcttctaccccgaccatgtggaactgtcttggtgggtcaacggcaaagaggtgcacagcggcgtgtgtaccgacccccagccactgaaagaacagcccgccctgaacgacagccggtactgcctgagcagcagactgagagtgtccgccaccttctggcagaacccccggaaccacttcagatgccaggtgcagttctacggcctgagcgagaacgacgagtggacccaggacagagccaagcccgtgacccagatcgtgtctgccgaagcctggggcagagccgattgcggctttaccagcgagagctaccagcagggcgtgctgagcgccaccatcctgtacgagatcctgctgggcaaggccaccctgtacgccgtgctggtgtctgccctggtgctgatggctatggtcaagcggaaggacagccgggga

SEQ ID NO: 2538 - DNA, 2679 bp, Artificial Sequence
  Synthetic Polynucloetide
atggccttaccagtgaccgccttgctcctgccgctggccttgctgctccacgccgccaggccggaagtgcagctggttgaatctggcggaggactggttcagcctggcggatctctgagactgtcttgtgccgccagcggcttcagcttcagcgacttttggatgagctgggtccgacaggcccctggcaaaggacttgaatgggtcgccacaatcagccaggccggcagcgagaaggactacgtggactctgtgaagggcagattcaccatcagccgggacaacgccaagaagtccctgtacctccagatgaacagcctgagagccgaggacaccgccgtgtactattgtgcctctggcgtgtacagcttcgactacagaggccagggcaccctggtcacagtctcttctggtaccggcggaggcggatctggcggcggaggtagcggtggcggaggatctgaattcgacatccagatgacccagagccctgccagcctgtccgtgtctgtgggcgagacagtgaccatcacctgtcgggccagcgagaacatctacagcaacctggcctggtatcagcagaagcagggcaagagcccccaactgctggtgtacgccgccaccaatctggccgatggcgtgcccagcagattttccggctctggcagcggcacccagtacagcctgaagatcaacagcctccagagcgaggacttcggcagctactactgccagcacttctggggcacctggacctttggaggaggcaccaccctggaaatcaagctcgagatccagaaccctgatcctgccgtgtaccagctgcgggatagcaagagcagcgacaagagcgtgtgtctgttcaccgacttcgacagccagaccaacgtgtcccagagcaaggactccgacgtgtacatcaccgataagtgcgtgctggacatgcggagcatggacttcaagagcaactccgccgtggcctggtccaacaagtccgatttcgcctgcgccaacgccttcaacaacagcattatccccgaggacacattcttcccaagccccgagagcagctgcgacgtgaagctggtggaaaagagcttcgagacagacaccaacctgaacttccagaacctgagcgtgatcggcttcagaatcctgctgctgaaagtggccggctttaacctgctgatgaccctgcggctgtggtccagccgcgccaagagaagcggatctggcgtgaagcagaccctgaatttcgacctgctgaagctggctggcgacgtggaatccaacccaggccctactagtatggactggatttggcgcatccttttccttgtcggcgctgctaccggcgcgcattccgggccccagctccagctgcaagagtctggacctggcctggtcaagcctagcgagacactgagcctgacctgtaccgtgtccggcgatagcatcagcagcggcgattactactggggctggatcagacagcctcctggcaaaggactggaatggatcggccacatctactacagcggcgtgacctactacaaccccagcctgaagtccagagtgaccatcagcgtggacaccagccggaaccagttctccctgaagctgtctagcgtgacagccgccgataccgccgtgtactactgcaccagagaggacagcagcaactggcggagtagaggccagggaacactggtcacagttagctctggatccggcggaggcggaagtggaggcggaggatctggcggcggaggctctttcgaagaagtgcaactccagcagagcggccctgagcttgtgaagcctggcgcttccgtgaagatgagctgcaaggccagcggctacaccttcaccgactactacatgaagtggatgaagcagagccacggcaagtccctggaatggatcggcgacatcaaccccaacaacggcggcaccacctacaaccagaagttcaagggcaaggccaccctgaccgtggacaagagcagcagcaccgcctacatgcaactgaacagcctgaccagcgaggacagcgccgtgtactactgcgccagagactacggctacggctatttcgactactggggccagggcacaaccctgacagtgtcctctacgcgtgaggacctgaagaacgtgttcccacctgaggtggccgtgttcgagcctagcgaggccgagatcagccacacccagaaagccaccctcgtgtgcctggctaccggcttctaccccgaccatgtggaactgtcttggtgggtcaacggcaaagaggtgcacagcggcgtgtgtaccgacccccagccactgaaagaacagcccgccctgaacgacagccggtactgcctgagcagcagactgagagtgtccgccaccttctggcagaacccccggaaccacttcagatgccaggtgcagttctacggcctgagcgagaacgacgagtggacccaggacagagccaagcccgtgacccagatcgtgtctgccgaagcctggggcagagccgattgcggctttaccagcgagagctaccagcagggcgtgctgagcgccaccatcctgtacgagatcctgctgggcaaggccaccctgtacgccgtgctggtgtctgccctggtgctgatggctatggtcaagcggaaggacagccgggga

SEQ ID NO: 2539 - DNA, 2688 bp, Artificial Sequence
  Synthetic Polynucloetide
atggccttaccagtgaccgccttgctcctgccgctggccttgctgctccacgccgccaggccggaagtgcagctggttgaatctggcggaggactggttcagcctggcggatctctgagactgtcttgtgccgccagcggcttcagcttcagcgacttttggatgagctgggtccgacaggcccctggcaaaggacttgaatgggtcgccacaatcagccaggccggcagcgagaaggactacgtggactctgtgaagggcagattcaccatcagccgggacaacgccaagaagtccctgtacctccagatgaacagcctgagagccgaggacaccgccgtgtactattgtgcctctggcgtgtacagcttcgactacagaggccagggcaccctggtcacagtctcttctggtaccggcggaggcggatctggcggcggaggtagcggtggcggaggatctgaattcgagatcgtgctgacacagagccctggcaccctgagcctgtctccaggcgaaagagccacactgagctgtcgggcctctcagagcgtgggaggctacctggcttggtatcagcagaagccaggccaggcccccagactgctgatctacgacgccagcaatcgggccacaggcatccccgccagattttctggcagcggctccggcaccgacttcaccctgacaatcagcagcctggaacccgaggacttcgccgtgtactactgccagcagcggaacaactggccccccatgtacacattcggccagggcaccaagctggaaatcaagagactcgagatccagaaccctgatcctgccgtgtaccagctgcgggatagcaagagcagcgacaagagcgtgtgtctgttcaccgacttcgacagccagaccaacgtgtcccagagcaaggactccgacgtgtacatcaccgataagtgcgtgctggacatgcggagcatggacttcaagagcaactccgccgtggcctggtccaacaagtccgatttcgcctgcgccaacgccttcaacaacagcattatccccgaggacacattcttcccaagccccgagagcagctgcgacgtgaagctggtggaaaagagcttcgagacagacaccaacctgaacttccagaacctgagcgtgatcggcttcagaatcctgctgctgaaagtggccggctttaacctgctgatgaccctgcggctgtggtccagccgcgccaagagaagcggatctggcgtgaagcagaccctgaatttcgacctgctgaagctggctggcgacgtggaatccaacccaggccctactagtatggactggatttggcgcatccttttccttgtcggcgctgctaccggcgcgcattccgggccccagctccagctgcaagagtctggacctggcctggtcaagcctagcgagacactgagcctgacctgtaccgtgtccggcgatagcatcagcagcggcgattactactggggctggatcagacagcctcctggcaaaggactggaatggatcggccacatctactacagcggcgtgacctactacaaccccagcctgaagtccagagtgaccatcagcgtggacaccagccggaaccagttctccctgaagctgtctagcgtgacagccgccgataccgccgtgtactactgcaccagagaggacagcagcaactggcggagtagaggccagggaacactggtcacagttagctctggatccggcggaggcggaagtggaggcggaggatctggcggcggaggctctttcgaacaggtgcaactggtgcagagcggagccgaagtgaagaaacccggcagcagcgtgaaggtgtcctgcaaggcttccggcggcaccttcagcagctacgccatttcttgggtgcgccaggctcctggacagggcctggaatggatgggcggcatcatccctatcctgggcaccgccaactacgcccagaaattccagggcagagtgaccatcaccgccgacgagagcaccagcaccgcctacatggaactgagcagcctgcggagcgaggacacagccgtgtattattgcgccagatggggcggaggggccttcgacatttggggccagggaacaatggtcaccgtgtccagcacgcgtgaggacctgaagaacgtgttcccacctgaggtggccgtgttcgagcctagcgaggccgagatcagccacacccagaaagccaccctcgtgtgcctggctaccggcttctaccccgaccatgtggaactgtcttggtgggtcaacggcaaagaggtgcacagcggcgtgtgtaccgacccccagccactgaaagaacagcccgccctgaacgacagccggtactgcctgagcagcagactgagagtgtccgccaccttctggcagaacccccggaaccacttcagatgccaggtgcagttctacggcctgagcgagaacgacgagtggacccaggacagagccaagcccgtgacccagatcgtgtctgccgaagcctggggcagagccgattgcggctttaccagcgagagctaccagcagggcgtgctgagcgccaccatcctgtacgagatcctgctgggcaaggccaccctgtacgccgtgctggtgtctgccctggtgctgatggctatggtcaagcggaaggacagccgggga

SEQ ID NO: 2540 - DNA, 2673 bp, Artificial Sequence
  Synthetic Polynucloetide
atggccttaccagtgaccgccttgctcctgccgctggccttgctgctccacgccgccaggccggaagtgcagctggttgaatctggcggaggactggttcagcctggcggatctctgagactgtcttgtgccgccagcggcttcagcttcagcgacttttggatgagctgggtccgacaggcccctggcaaaggacttgaatgggtcgccacaatcagccaggccggcagcgagaaggactacgtggactctgtgaagggcagattcaccatcagccgggacaacgccaagaagtccctgtacctccagatgaacagcctgagagccgaggacaccgccgtgtactattgtgcctctggcgtgtacagcttcgactacagaggccagggcaccctggtcacagtctcttctggtaccggcggaggcggatctggcggcggaggtagcggtggcggaggatctgaattccagatcgtgctgacacagagccctgccctgatgagcgccagccctggcgagaaagtgaccatgacctgtagcgccagcagcagcgtgcgctacatgtactggtatcagcagaagcccagaagcagccccaagccctggattcacctgaccagcaatctggcctctggcgtgcccgctagattttccggctctggcagcggcaccagctacagcctgaccatcagcagcatggaagccgaggacgccgccacctactactgccagcagtggtccagccaccccttcacatttggctccggcaccaagctggaaatcaagctcgagatccagaaccctgatcctgccgtgtaccagctgcgggatagcaagagcagcgacaagagcgtgtgtctgttcaccgacttcgacagccagaccaacgtgtcccagagcaaggactccgacgtgtacatcaccgataagtgcgtgctggacatgcggagcatggacttcaagagcaactccgccgtggcctggtccaacaagtccgatttcgcctgcgccaacgccttcaacaacagcattatccccgaggacacattcttcccaagccccgagagcagctgcgacgtgaagctggtggaaaagagcttcgagacagacaccaacctgaacttccagaacctgagcgtgatcggcttcagaatcctgctgctgaaagtggccggctttaacctgctgatgaccctgcggctgtggtccagccgcgccaagagaagcggatctggcgtgaagcagaccctgaatttcgacctgctgaagctggctggcgacgtggaatccaacccaggccctactagtatggactggatttggcgcatccttttccttgtcggcgctgctaccggcgcgcattccgggccccagctccagctgcaagagtctggacctggcctggtcaagcctagcgagacactgagcctgacctgtaccgtgtccggcgatagcatcagcagcggcgattactactggggctggatcagacagcctcctggcaaaggactggaatggatcggccacatctactacagcggcgtgacctactacaaccccagcctgaagtccagagtgaccatcagcgtggacaccagccggaaccagttctccctgaagctgtctagcgtgacagccgccgataccgccgtgtactactgcaccagagaggacagcagcaactggcggagtagaggccagggaacactggtcacagttagctctggatccggcggaggcggaagtggaggcggaggatctggcggcggaggctctttcgaagatgtgcaactccaggaaagcggccctggccttgtgaagcctagccagagcctgtccctgacctgtaccgtgaccggcttcagcatcaccagcgactactcttggaactggatcagacagttccctggcaacaaactggaatggatgggctacatcagctactccggccacacctcctacaaccccagcctggaaagccggatctccatcaccagagacaccagcaagaaccagttcttcttgcaactgaacagcgtgaccaccgaggataccgccacatattactgtaccagaggcaactgggacgtggtgtactggggccagggcacacttgtgaccgtgtctgctacgcgtgaggacctgaagaacgtgttcccacctgaggtggccgtgttcgagcctagcgaggccgagatcagccacacccagaaagccaccctcgtgtgcctggctaccggcttctaccccgaccatgtggaactgtcttggtgggtcaacggcaaagaggtgcacagcggcgtgtgtaccgacccccagccactgaaagaacagcccgccctgaacgacagccggtactgcctgagcagcagactgagagtgtccgccaccttctggcagaacccccggaaccacttcagatgccaggtgcagttctacggcctgagcgagaacgacgagtggacccaggacagagccaagcccgtgacccagatcgtgtctgccgaagcctggggcagagccgattgcggctttaccagcgagagctaccagcagggcgtgctgagcgccaccatcctgtacgagatcctgctgggcaaggccaccctgtacgccgtgctggtgtctgccctggtgctgatggctatggtcaagcggaaggacagccgggga

SEQ ID NO: 2541 - DNA, 2703 bp, Artificial Sequence
  Synthetic Polynucloetide
atggccttaccagtgaccgccttgctcctgccgctggccttgctgctccacgccgccaggccggaagtgcagctggttgaatctggcggaggactggttcagcctggcggatctctgagactgtcttgtgccgccagcggcttcagcttcagcgacttttggatgagctgggtccgacaggcccctggcaaaggacttgaatgggtcgccacaatcagccaggccggcagcgagaaggactacgtggactctgtgaagggcagattcaccatcagccgggacaacgccaagaagtccctgtacctccagatgaacagcctgagagccgaggacaccgccgtgtactattgtgcctctggcgtgtacagcttcgactacagaggccagggcaccctggtcacagtctcttctggtaccggcggaggcggatctggcggcggaggtagcggtggcggaggatctgaattcgacgtcgtgatgacccagagccctctgagcctgcctgtgacactgggacagcctgccagcatctcctgtcggagcagccagagcatcgtgcacagcgacggcaacacctacctggaatggtatcagcagcggccaggccagagccccagacggctgatctacaaggtgtccaacagattcagcggcgtgcccgacagattctccggcagcggctctggcaccgacttcaccctgaagatcagcagagtggaagccgaggacgtgggcgtgtactactgttttcaaggcagccacgccccctggacctttggcggaggaacaaaggtggaaatcaagctcgagatccagaaccctgatcctgccgtgtaccagctgcgggatagcaagagcagcgacaagagcgtgtgtctgttcaccgacttcgacagccagaccaacgtgtcccagagcaaggactccgacgtgtacatcaccgataagtgcgtgctggacatgcggagcatggacttcaagagcaactccgccgtggcctggtccaacaagtccgatttcgcctgcgccaacgccttcaacaacagcattatccccgaggacacattcttcccaagccccgagagcagctgcgacgtgaagctggtggaaaagagcttcgagacagacaccaacctgaacttccagaacctgagcgtgatcggcttcagaatcctgctgctgaaagtggccggctttaacctgctgatgaccctgcggctgtggtccagccgcgccaagagaagcggatctggcgtgaagcagaccctgaatttcgacctgctgaagctggctggcgacgtggaatccaacccaggccctactagtatggactggatttggcgcatccttttccttgtcggcgctgctaccggcgcgcattccgggccccagctccagctgcaagagtctggacctggcctggtcaagcctagcgagacactgagcctgacctgtaccgtgtccggcgatagcatcagcagcggcgattactactggggctggatcagacagcctcctggcaaaggactggaatggatcggccacatctactacagcggcgtgacctactacaaccccagcctgaagtccagagtgaccatcagcgtggacaccagccggaaccagttctccctgaagctgtctagcgtgacagccgccgataccgccgtgtactactgcaccagagaggacagcagcaactggcggagtagaggccagggaacactggtcacagttagctctggatccggcggaggcggaagtggaggcggaggatctggcggcggaggctctttcgaagaagtgcaactggtggaatcaggcggcggactggtgcagcctggcggatctctgagactgagctgtgccgccagcggcttcaccttcagcagctacggaatgcactgggtgcgccaggcccctggcaaaggactggaatgggtggcctacatcaccaccagaagcagcaccatctactacgccgacagcgtgaagggccggttcaccatctccagagacaacgccaagaacagcctgtacctccagatgaactccctgcgggccgaggacaccgccgtgtactattgcaccagagagcccctgaccggctactacgctatggactattggggccagggcaccagcgtgaccgtgtctagtacgcgtgaggacctgaagaacgtgttcccacctgaggtggccgtgttcgagcctagcgaggccgagatcagccacacccagaaagccaccctcgtgtgcctggctaccggcttctaccccgaccatgtggaactgtcttggtgggtcaacggcaaagaggtgcacagcggcgtgtgtaccgacccccagccactgaaagaacagcccgccctgaacgacagccggtactgcctgagcagcagactgagagtgtccgccaccttctggcagaacccccggaaccacttcagatgccaggtgcagttctacggcctgagcgagaacgacgagtggacccaggacagagccaagcccgtgacccagatcgtgtctgccgaagcctggggcagagccgattgcggctttaccagcgagagctaccagcagggcgtgctgagcgccaccatcctgtacgagatcctgctgggcaaggccaccctgtacgccgtgctggtgtctgccctggtgctgatggctatggtcaagcggaaggacagccgggga

SEQ ID NO: 2542 - DNA, 2679 bp, Artificial Sequence
  Synthetic Polynucloetide
atggccttaccagtgaccgccttgctcctgccgctggccttgctgctccacgccgccaggccggaagtgcagctggttgaatctggcggaggactggttcagcctggcggatctctgagactgtcttgtgccgccagcggcttcagcttcagcgacttttggatgagctgggtccgacaggcccctggcaaaggacttgaatgggtcgccacaatcagccaggccggcagcgagaaggactacgtggactctgtgaagggcagattcaccatcagccgggacaacgccaagaagtccctgtacctccagatgaacagcctgagagccgaggacaccgccgtgtactattgtgcctctggcgtgtacagcttcgactacagaggccagggcaccctggtcacagtctcttctggtaccggcggaggcggatctggcggcggaggtagcggtggcggaggatctgaattcgacatccagatgacccagagccccagcagcctgtctgccagcgtgggcgacagagtgaccatcacctgtagagccagccagagcatcagcctgtggctgaactggtatcagcagaagcccggcaaggcccccaagctgctgatctacgccgccagcacactccagagcggcgtgccaagcagattttccggcagcggctccggcaccgacttcaccctgacaatcagctccctccagcccgaggacttcgccacctactactgccagcagtactacaccagcccctacaccttcggccagggcaccaaggtggaaatcaagagactcgagatccagaaccctgatcctgccgtgtaccagctgcgggatagcaagagcagcgacaagagcgtgtgtctgttcaccgacttcgacagccagaccaacgtgtcccagagcaaggactccgacgtgtacatcaccgataagtgcgtgctggacatgcggagcatggacttcaagagcaactccgccgtggcctggtccaacaagtccgatttcgcctgcgccaacgccttcaacaacagcattatccccgaggacacattcttcccaagccccgagagcagctgcgacgtgaagctggtggaaaagagcttcgagacagacaccaacctgaacttccagaacctgagcgtgatcggcttcagaatcctgctgctgaaagtggccggctttaacctgctgatgaccctgcggctgtggtccagccgcgccaagagaagcggatctggcgtgaagcagaccctgaatttcgacctgctgaagctggctggcgacgtggaatccaacccaggccctactagtatggactggatttggcgcatccttttccttgtcggcgctgctaccggcgcgcattccgggccccagctccagctgcaagagtctggacctggcctggtcaagcctagcgagacactgagcctgacctgtaccgtgtccggcgatagcatcagcagcggcgattactactggggctggatcagacagcctcctggcaaaggactggaatggatcggccacatctactacagcggcgtgacctactacaaccccagcctgaagtccagagtgaccatcagcgtggacaccagccggaaccagttctccctgaagctgtctagcgtgacagccgccgataccgccgtgtactactgcaccagagaggacagcagcaactggcggagtagaggccagggaacactggtcacagttagctctggatccggcggaggcggaagtggaggcggaggatctggcggcggaggctctttcgaacaggtgcaactgctggaatctggcggcggactggtgcagcctggcggatctctgagactgagctgtgccgccagcggcttcaccttcagcagctacgccatgagctgggtgcgccaggcccctggaaaaggactggaatgggtgtccgtgatccggtccagcggcagcagcacctattacgccgatagcgtgaagggccggttcaccatcagccgggacaacagcaagaacaccctgtacctccagatgaacagcctgcgggccgaggacaccgccgtgtactattgtgctaggggaggcggctacttcgactactggggccagggaacactcgtgaccgtgtcctctacgcgtgaggacctgaagaacgtgttcccacctgaggtggccgtgttcgagcctagcgaggccgagatcagccacacccagaaagccaccctcgtgtgcctggctaccggcttctaccccgaccatgtggaactgtcttggtgggtcaacggcaaagaggtgcacagcggcgtgtgtaccgacccccagccactgaaagaacagcccgccctgaacgacagccggtactgcctgagcagcagactgagagtgtccgccaccttctggcagaacccccggaaccacttcagatgccaggtgcagttctacggcctgagcgagaacgacgagtggacccaggacagagccaagcccgtgacccagatcgtgtctgccgaagcctggggcagagccgattgcggctttaccagcgagagctaccagcagggcgtgctgagcgccaccatcctgtacgagatcctgctgggcaaggccaccctgtacgccgtgctggtgtctgccctggtgctgatggctatggtcaagcggaaggacagccgggga

SEQ ID NO: 2543 - DNA, 2688 bp, Artificial Sequence
  Synthetic Polynucloetide
atggccttaccagtgaccgccttgctcctgccgctggccttgctgctccacgccgccaggccggaagtgcagctggttgaatctggcggaggactggttcagcctggcggatctctgagactgtcttgtgccgccagcggcttcagcttcagcgacttttggatgagctgggtccgacaggcccctggcaaaggacttgaatgggtcgccacaatcagccaggccggcagcgagaaggactacgtggactctgtgaagggcagattcaccatcagccgggacaacgccaagaagtccctgtacctccagatgaacagcctgagagccgaggacaccgccgtgtactattgtgcctctggcgtgtacagcttcgactacagaggccagggcaccctggtcacagtctcttctggtaccggcggaggcggatctggcggcggaggtagcggtggcggaggatctgaattcgacatccagatgacccagagccccagcagcctgtctgccagcgtgggcgacagagtgaccatcacctgtagagccagccagagcatcagcagctacctgaactggtatcagcagaagcccggcaaggcccccaaactgctgatctacgccgtgtccacactccagagcggcgtgcccagcagattttctggcagcggctccggcaccgacttcaccctgacaatcagctccctccagcccgaggacttcgccacctactactgtcagcagagcggcaccttccctcccaccacatttggacagggcaccaaggtggaaatcaagagactcgagatccagaaccctgatcctgccgtgtaccagctgcgggatagcaagagcagcgacaagagcgtgtgtctgttcaccgacttcgacagccagaccaacgtgtcccagagcaaggactccgacgtgtacatcaccgataagtgcgtgctggacatgcggagcatggacttcaagagcaactccgccgtggcctggtccaacaagtccgatttcgcctgcgccaacgccttcaacaacagcattatccccgaggacacattcttcccaagccccgagagcagctgcgacgtgaagctggtggaaaagagcttcgagacagacaccaacctgaacttccagaacctgagcgtgatcggcttcagaatcctgctgctgaaagtggccggctttaacctgctgatgaccctgcggctgtggtccagccgcgccaagagaagcggatctggcgtgaagcagaccctgaatttcgacctgctgaagctggctggcgacgtggaatccaacccaggccctactagtatggactggatttggcgcatccttttccttgtcggcgctgctaccggcgcgcattccgggccccagctccagctgcaagagtctggacctggcctggtcaagcctagcgagacactgagcctgacctgtaccgtgtccggcgatagcatcagcagcggcgattactactggggctggatcagacagcctcctggcaaaggactggaatggatcggccacatctactacagcggcgtgacctactacaaccccagcctgaagtccagagtgaccatcagcgtggacaccagccggaaccagttctccctgaagctgtctagcgtgacagccgccgataccgccgtgtactactgcaccagagaggacagcagcaactggcggagtagaggccagggaacactggtcacagttagctctggatccggcggaggcggaagtggaggcggaggatctggcggcggaggctctttcgaacaggtgcaactgctggaatctggcggcggactggtgcagcctggcggatctctgagactgagctgtgccgccagcggcttcaccttcagcagccacggaatgcactgggtgcgccaggcccctggaaagggactggaatgggtgtccgtgatctccggcagcggcagcaataccggctacgccgatagcgtgaagggccggttcaccatcagccgggacaacagcaagaacaccctgtacctccagatgaacagcctgcgggccgaggacaccgccgtgtactattgtgccagacagtggggcagctacgccttcgattcttggggccagggcaccctcgtgaccgtgtcatctacgcgtgaggacctgaagaacgtgttcccacctgaggtggccgtgttcgagcctagcgaggccgagatcagccacacccagaaagccaccctcgtgtgcctggctaccggcttctaccccgaccatgtggaactgtcttggtgggtcaacggcaaagaggtgcacagcggcgtgtgtaccgacccccagccactgaaagaacagcccgccctgaacgacagccggtactgcctgagcagcagactgagagtgtccgccaccttctggcagaacccccggaaccacttcagatgccaggtgcagttctacggcctgagcgagaacgacgagtggacccaggacagagccaagcccgtgacccagatcgtgtctgccgaagcctggggcagagccgattgcggctttaccagcgagagctaccagcagggcgtgctgagcgccaccatcctgtacgagatcctgctgggcaaggccaccctgtacgccgtgctggtgtctgccctggtgctgatggctatggtcaagcggaaggacagccgggga

SEQ ID NO: 2544 - DNA, 2718 bp, Artificial Sequence
  Synthetic Polynucloetide
atggccttaccagtgaccgccttgctcctgccgctggccttgctgctccacgccgccaggccggaagtgcagctggttgaatctggcggaggactggttcagcctggcggatctctgagactgtcttgtgccgccagcggcttcagcttcagcgacttttggatgagctgggtccgacaggcccctggcaaaggacttgaatgggtcgccacaatcagccaggccggcagcgagaaggactacgtggactctgtgaagggcagattcaccatcagccgggacaacgccaagaagtccctgtacctccagatgaacagcctgagagccgaggacaccgccgtgtactattgtgcctctggcgtgtacagcttcgactacagaggccagggcaccctggtcacagtctcttctggtaccggcggaggcggatctggcggcggaggtagcggtggcggaggatctgaattcgacatcgtgatgagccagagccctagcagcctggccgtgtccgtgggcgagaaagtgaccatgagctgcaagagcagccagtccctgctgcacagcagcaaccagaagaactacctggcctggtatcagcagaagcccggccagtcccccaaggtgctgatctactgggccagcaccagagaaagcggcgtgcccgatagattcaccggcagcggctctggcaccgacttcaccctgaccatcaccagcgtgaagtccgaggacctggctgtgtactactgccagcagtattacagctacccctggaccttcggcggaggcacccggctggaaatcaaaagactcgagatccagaaccctgatcctgccgtgtaccagctgcgggatagcaagagcagcgacaagagcgtgtgtctgttcaccgacttcgacagccagaccaacgtgtcccagagcaaggactccgacgtgtacatcaccgataagtgcgtgctggacatgcggagcatggacttcaagagcaactccgccgtggcctggtccaacaagtccgatttcgcctgcgccaacgccttcaacaacagcattatccccgaggacacattcttcccaagccccgagagcagctgcgacgtgaagctggtggaaaagagcttcgagacagacaccaacctgaacttccagaacctgagcgtgatcggcttcagaatcctgctgctgaaagtggccggctttaacctgctgatgaccctgcggctgtggtccagccgcgccaagagaagcggatctggcgtgaagcagaccctgaatttcgacctgctgaagctggctggcgacgtggaatccaacccaggccctactagtatggactggatttggcgcatccttttccttgtcggcgctgctaccggcgcgcattccgggccccagctccagctgcaagagtctggacctggcctggtcaagcctagcgagacactgagcctgacctgtaccgtgtccggcgatagcatcagcagcggcgattactactggggctggatcagacagcctcctggcaaaggactggaatggatcggccacatctactacagcggcgtgacctactacaaccccagcctgaagtccagagtgaccatcagcgtggacaccagccggaaccagttctccctgaagctgtctagcgtgacagccgccgataccgccgtgtactactgcaccagagaggacagcagcaactggcggagtagaggccagggaacactggtcacagttagctctggatccggcggaggcggaagtggaggcggaggatctggcggcggaggctctttcgaagaagtgcaactccagcagagcgtggccgagcttgtgaagcctggcgcttccgtgaagatgtcctgcaaggtgtccggctacaccctgacagaccacaccatccactggatgaagcagcggcctgagcagggcctggaatggatcggctacatctaccccagggacggcatcaccggctacaacgagaagttcaagggcaaggccacactgaccgccgacaccagcagcagcacagcctacatgcaactgaacagcctgaccagcgaggacagcgccgtgtacttctgtgccagatggggctacagctacagaaactacgcctactactacgactactggggccagggcacaaccctgaccgtgtctagtacgcgtgaggacctgaagaacgtgttcccacctgaggtggccgtgttcgagcctagcgaggccgagatcagccacacccagaaagccaccctcgtgtgcctggctaccggcttctaccccgaccatgtggaactgtcttggtgggtcaacggcaaagaggtgcacagcggcgtgtgtaccgacccccagccactgaaagaacagcccgccctgaacgacagccggtactgcctgagcagcagactgagagtgtccgccaccttctggcagaacccccggaaccacttcagatgccaggtgcagttctacggcctgagcgagaacgacgagtggacccaggacagagccaagcccgtgacccagatcgtgtctgccgaagcctggggcagagccgattgcggctttaccagcgagagctaccagcagggcgtgctgagcgccaccatcctgtacgagatcctgctgggcaaggccaccctgtacgccgtgctggtgtctgccctggtgctgatggctatggtcaagcggaaggacagccgggga

SEQ ID NO: 2545 - DNA, 2709 bp, Artificial Sequence
  Synthetic Polynucloetide
atggccttaccagtgaccgccttgctcctgccgctggccttgctgctccacgccgccaggccggaagtgcagctggttgaatctggcggaggactggttcagcctggcggatctctgagactgtcttgtgccgccagcggcttcagcttcagcgacttttggatgagctgggtccgacaggcccctggcaaaggacttgaatgggtcgccacaatcagccaggccggcagcgagaaggactacgtggactctgtgaagggcagattcaccatcagccgggacaacgccaagaagtccctgtacctccagatgaacagcctgagagccgaggacaccgccgtgtactattgtgcctctggcgtgtacagcttcgactacagaggccagggcaccctggtcacagtctcttctggtaccggcggaggcggatctggcggcggaggtagcggtggcggaggatctgaattcgagatcgtgctgacacagagccctggcaccctgagcctgtctccaggcgaaagagccacactgagctgtcgggccagccagagcgtgtccagctcttacctggcctggtatcagcagaagcccggccaggctccccggctgctgatctacggaacaagcagcagagccaccggcatccccgacagattttctggcagcggctccggcaccgacttcaccctgacaatcagcagactggaacccgaggacttcgccgtgtactactgccagcagtacggcagcagccccttcacctttggcggaggcaccaaggtggaaatcaagagactcgagatccagaaccctgatcctgccgtgtaccagctgcgggatagcaagagcagcgacaagagcgtgtgtctgttcaccgacttcgacagccagaccaacgtgtcccagagcaaggactccgacgtgtacatcaccgataagtgcgtgctggacatgcggagcatggacttcaagagcaactccgccgtggcctggtccaacaagtccgatttcgcctgcgccaacgccttcaacaacagcattatccccgaggacacattcttcccaagccccgagagcagctgcgacgtgaagctggtggaaaagagcttcgagacagacaccaacctgaacttccagaacctgagcgtgatcggcttcagaatcctgctgctgaaagtggccggctttaacctgctgatgaccctgcggctgtggtccagccgcgccaagagaagcggatctggcgtgaagcagaccctgaatttcgacctgctgaagctggctggcgacgtggaatccaacccaggccctactagtatggactggatttggcgcatccttttccttgtcggcgctgctaccggcgcgcattccgggccccagctccagctgcaagagtctggacctggcctggtcaagcctagcgagacactgagcctgacctgtaccgtgtccggcgatagcatcagcagcggcgattactactggggctggatcagacagcctcctggcaaaggactggaatggatcggccacatctactacagcggcgtgacctactacaaccccagcctgaagtccagagtgaccatcagcgtggacaccagccggaaccagttctccctgaagctgtctagcgtgacagccgccgataccgccgtgtactactgcaccagagaggacagcagcaactggcggagtagaggccagggaacactggtcacagttagctctggatccggcggaggcggaagtggaggcggaggatctggcggcggaggctctttcgaacaggtgcaactccaggaatctggccccggactggctaagcccagcgagacactgagcctgacctgtaccgtgtccggcgacagcatcaccagctactactggtcctggatcagacagccccctggcaagggcctggaatggatcggctacatctactacagcggcagcaccaactacaaccccagcctgaagtccagagtgaccatcagcgtggacaccagcaagaaccagttctccctgaagctgagcagcgtgacagccgccgacaccgccgtgtattattgcgccagagatcagcggagaatcgccgctgccggcacccacttttacggcatggatgtgtggggccagggcaccaccgtgaccgtgtcatctacgcgtgaggacctgaagaacgtgttcccacctgaggtggccgtgttcgagcctagcgaggccgagatcagccacacccagaaagccaccctcgtgtgcctggctaccggcttctaccccgaccatgtggaactgtcttggtgggtcaacggcaaagaggtgcacagcggcgtgtgtaccgacccccagccactgaaagaacagcccgccctgaacgacagccggtactgcctgagcagcagactgagagtgtccgccaccttctggcagaacccccggaaccacttcagatgccaggtgcagttctacggcctgagcgagaacgacgagtggacccaggacagagccaagcccgtgacccagatcgtgtctgccgaagcctggggcagagccgattgcggctttaccagcgagagctaccagcagggcgtgctgagcgccaccatcctgtacgagatcctgctgggcaaggccaccctgtacgccgtgctggtgtctgccctggtgctgatggctatggtcaagcggaaggacagccgggga

SEQ ID NO: 2546 - DNA, 2685 bp, Artificial Sequence
  Synthetic Polynucloetide
atggccttaccagtgaccgccttgctcctgccgctggccttgctgctccacgccgccaggccggaagtgcagctggttgaatctggcggaggactggttcagcctggcggatctctgagactgtcttgtgccgccagcggcttcagcttcagcgacttttggatgagctgggtccgacaggcccctggcaaaggacttgaatgggtcgccacaatcagccaggccggcagcgagaaggactacgtggactctgtgaagggcagattcaccatcagccgggacaacgccaagaagtccctgtacctccagatgaacagcctgagagccgaggacaccgccgtgtactattgtgcctctggcgtgtacagcttcgactacagaggccagggcaccctggtcacagtctcttctggtaccggcggaggcggatctggcggcggaggtagcggtggcggaggatctgaattcgacatcctgctgacccagagccccgtgatcctgtccgtgtctcctggcgagagagtgtccttcagctgtcgggccagccagagcatcggcaccaacatccactggtatcagcagcggaccaacggcagccccagactgctgattaagtacgccagcgagtccatcagcggcatccccagcagattttccggcagcggctccggcaccgacttcaccctgagcatcaacagcgtggaaagcgaggacattgccgactactactgccagcagaacaacaactggcccaccaccttcggagccggcaccaagctggaactgaagctcgagatccagaaccctgatcctgccgtgtaccagctgcgggatagcaagagcagcgacaagagcgtgtgtctgttcaccgacttcgacagccagaccaacgtgtcccagagcaaggactccgacgtgtacatcaccgataagtgcgtgctggacatgcggagcatggacttcaagagcaactccgccgtggcctggtccaacaagtccgatttcgcctgcgccaacgccttcaacaacagcattatccccgaggacacattcttcccaagccccgagagcagctgcgacgtgaagctggtggaaaagagcttcgagacagacaccaacctgaacttccagaacctgagcgtgatcggcttcagaatcctgctgctgaaagtggccggctttaacctgctgatgaccctgcggctgtggtccagccgcgccaagagaagcggatctggcgtgaagcagaccctgaatttcgacctgctgaagctggctggcgacgtggaatccaacccaggccctactagtatggactggatttggcgcatccttttccttgtcggcgctgctaccggcgcgcattccgggccccagctccagctgcaagagtctggacctggcctggtcaagcctagcgagacactgagcctgacctgtaccgtgtccggcgatagcatcagcagcggcgattactactggggctggatcagacagcctcctggcaaaggactggaatggatcggccacatctactacagcggcgtgacctactacaaccccagcctgaagtccagagtgaccatcagcgtggacaccagccggaaccagttctccctgaagctgtctagcgtgacagccgccgataccgccgtgtactactgcaccagagaggacagcagcaactggcggagtagaggccagggaacactggtcacagttagctctggatccggcggaggcggaagtggaggcggaggatctggcggcggaggctctttcgaacaggtgcagctgaagcagagcggacctggcctggtgcagcctagccagagcctgtccatcacctgtaccgtgtccggcttcagcctgaccaactacggcgtgcactgggtgcgccagagccctggaaaaggactggaatggctgggagtgatttggagcggcggcaacaccgactacaacacccccttcaccagcagactgtctatcaacaaggacaacagcaagagccaggtgttcttcaagatgaacagcctccagagcaacgacaccgccatctactactgtgctagagccctgacctactatgactacgagttcgcctactggggccagggcacactcgtgacagtgtctgctacgcgtgaggacctgaagaacgtgttcccacctgaggtggccgtgttcgagcctagcgaggccgagatcagccacacccagaaagccaccctcgtgtgcctggctaccggcttctaccccgaccatgtggaactgtcttggtgggtcaacggcaaagaggtgcacagcggcgtgtgtaccgacccccagccactgaaagaacagcccgccctgaacgacagccggtactgcctgagcagcagactgagagtgtccgccaccttctggcagaacccccggaaccacttcagatgccaggtgcagttctacggcctgagcgagaacgacgagtggacccaggacagagccaagcccgtgacccagatcgtgtctgccgaagcctggggcagagccgattgcggctttaccagcgagagctaccagcagggcgtgctgagcgccaccatcctgtacgagatcctgctgggcaaggccaccctgtacgccgtgctggtgtctgccctggtgctgatggctatggtcaagcggaaggacagccgggga

SEQ ID NO: 2547 - DNA, 2664 bp, Artificial Sequence
  Synthetic Polynucloetide
atggccttaccagtgaccgccttgctcctgccgctggccttgctgctccacgccgccaggccggaagtgcagctggttgaatctggcggaggactggttcagcctggcggatctctgagactgtcttgtgccgccagcggcttcagcttcagcgacttttggatgagctgggtccgacaggcccctggcaaaggacttgaatgggtcgccacaatcagccaggccggcagcgagaaggactacgtggactctgtgaagggcagattcaccatcagccgggacaacgccaagaagtccctgtacctccagatgaacagcctgagagccgaggacaccgccgtgtactattgtgcctctggcgtgtacagcttcgactacagaggccagggcaccctggtcacagtctcttctggtaccggcggaggcggatctggcggcggaggtagcggtggcggaggatctgaattcatgacccagagccccaagttcctgctggtgtctgccggcgacagagtgaccctgacatgcaaggccagccagagcgtgaacaacgacgtgtactggtatcagcaggaacccggccagtcccccaagctgctgatctactgggccagcaccagagaaagcggcgtgcccgatagattcaccggcagcggctctggcaccgacttcaccctgacaatcagcagcgtgcaggccgaggacctggccgtgtactactgcaagcagagctacaacctgtacaccttcggcggaggcaccaagctggaaatcaagagactcgagatccagaaccctgatcctgccgtgtaccagctgcgggatagcaagagcagcgacaagagcgtgtgtctgttcaccgacttcgacagccagaccaacgtgtcccagagcaaggactccgacgtgtacatcaccgataagtgcgtgctggacatgcggagcatggacttcaagagcaactccgccgtggcctggtccaacaagtccgatttcgcctgcgccaacgccttcaacaacagcattatccccgaggacacattcttcccaagccccgagagcagctgcgacgtgaagctggtggaaaagagcttcgagacagacaccaacctgaacttccagaacctgagcgtgatcggcttcagaatcctgctgctgaaagtggccggctttaacctgctgatgaccctgcggctgtggtccagccgcgccaagagaagcggatctggcgtgaagcagaccctgaatttcgacctgctgaagctggctggcgacgtggaatccaacccaggccctactagtatggactggatttggcgcatccttttccttgtcggcgctgctaccggcgcgcattccgggccccagctccagctgcaagagtctggacctggcctggtcaagcctagcgagacactgagcctgacctgtaccgtgtccggcgatagcatcagcagcggcgattactactggggctggatcagacagcctcctggcaaaggactggaatggatcggccacatctactacagcggcgtgacctactacaaccccagcctgaagtccagagtgaccatcagcgtggacaccagccggaaccagttctccctgaagctgtctagcgtgacagccgccgataccgccgtgtactactgcaccagagaggacagcagcaactggcggagtagaggccagggaacactggtcacagttagctctggatccggcggaggcggaagtggaggcggaggatctggcggcggaggctctttcgaagaatctggaagaggactggtgcagcctggcggcagcagaaagctgtcttgtgccgccagcggcttcaccttcagcaccagcggaatgcactgggtgcgccaggcccctgagaagggactggaatgggtggcctacatcagctccggcagcaccaccatctaccacgccgataccgtgaagggccggttcaccatcagccgggacaaccccaagaataccctgttcctccagatgaccagcctgcggagcgaggacaccgccatgtactattgctgcgccagaagcggccagttcggcaactacttcgactactggggccagggcaccaccctgaccgtgtcatctacgcgtgaggacctgaagaacgtgttcccacctgaggtggccgtgttcgagcctagcgaggccgagatcagccacacccagaaagccaccctcgtgtgcctggctaccggcttctaccccgaccatgtggaactgtcttggtgggtcaacggcaaagaggtgcacagcggcgtgtgtaccgacccccagccactgaaagaacagcccgccctgaacgacagccggtactgcctgagcagcagactgagagtgtccgccaccttctggcagaacccccggaaccacttcagatgccaggtgcagttctacggcctgagcgagaacgacgagtggacccaggacagagccaagcccgtgacccagatcgtgtctgccgaagcctggggcagagccgattgcggctttaccagcgagagctaccagcagggcgtgctgagcgccaccatcctgtacgagatcctgctgggcaaggccaccctgtacgccgtgctggtgtctgccctggtgctgatggctatggtcaagcggaaggacagccgggga

SEQ ID NO: 2548 - DNA, 2679 bp, Artificial Sequence
  Synthetic Polynucloetide
atggccttaccagtgaccgccttgctcctgccgctggccttgctgctccacgccgccaggccggaagtgcagctggttgaatctggcggaggactggttcagcctggcggatctctgagactgtcttgtgccgccagcggcttcagcttcagcgacttttggatgagctgggtccgacaggcccctggcaaaggacttgaatgggtcgccacaatcagccaggccggcagcgagaaggactacgtggactctgtgaagggcagattcaccatcagccgggacaacgccaagaagtccctgtacctccagatgaacagcctgagagccgaggacaccgccgtgtactattgtgcctctggcgtgtacagcttcgactacagaggccagggcaccctggtcacagtctcttctggtaccggcggaggcggatctggcggcggaggtagcggtggcggaggatctgaattccagagcccatctagcctggctgtgtctgccggcgagaaagtgaccatgagctgcaagagcagccagagcctgctgaacagccggacccggaagaactacctggcctggtatcagcagaagcccggccagagccccaagctgctgatctactgggccagcaccagagaaagcggcgtgcccgatagattcaccggctctggcagcggcaccgacttcaccctgacaatcagcagcgtgcaggccgaggacctggccgtgtactactgcaagcagagcaacctgtacaccttcggcggaggcaccaagctggaaatcaagctcgagatccagaaccctgatcctgccgtgtaccagctgcgggatagcaagagcagcgacaagagcgtgtgtctgttcaccgacttcgacagccagaccaacgtgtcccagagcaaggactccgacgtgtacatcaccgataagtgcgtgctggacatgcggagcatggacttcaagagcaactccgccgtggcctggtccaacaagtccgatttcgcctgcgccaacgccttcaacaacagcattatccccgaggacacattcttcccaagccccgagagcagctgcgacgtgaagctggtggaaaagagcttcgagacagacaccaacctgaacttccagaacctgagcgtgatcggcttcagaatcctgctgctgaaagtggccggctttaacctgctgatgaccctgcggctgtggtccagccgcgccaagagaagcggatctggcgtgaagcagaccctgaatttcgacctgctgaagctggctggcgacgtggaatccaacccaggccctactagtatggactggatttggcgcatccttttccttgtcggcgctgctaccggcgcgcattccgggccccagctccagctgcaagagtctggacctggcctggtcaagcctagcgagacactgagcctgacctgtaccgtgtccggcgatagcatcagcagcggcgattactactggggctggatcagacagcctcctggcaaaggactggaatggatcggccacatctactacagcggcgtgacctactacaaccccagcctgaagtccagagtgaccatcagcgtggacaccagccggaaccagttctccctgaagctgtctagcgtgacagccgccgataccgccgtgtactactgcaccagagaggacagcagcaactggcggagtagaggccagggaacactggtcacagttagctctggatccggcggaggcggaagtggaggcggaggatctggcggcggaggctctttcgaacaggtgcagctggaagagtctggacccgagcttgtgaagcctggggccagcgtgaagctgtcctgtaaagccagcggctacaccttcaccgagtacatcatccactgggtcaagcagcggagcggccagggcctggaatggatcggctggttttaccctggctccggcagcatcaagtacaacgagaagttcaaggacaaggccaccctgaccgccgacaagtccagcagcaccgtgtacatggaactgagcggcctgaccagcgaggacagcgccgtgtatttctgcgccagacacgacggctacagctacttcgactattggggccagggcaccacactgaccgtgtcctctacgcgtgaggacctgaagaacgtgttcccacctgaggtggccgtgttcgagcctagcgaggccgagatcagccacacccagaaagccaccctcgtgtgcctggctaccggcttctaccccgaccatgtggaactgtcttggtgggtcaacggcaaagaggtgcacagcggcgtgtgtaccgacccccagccactgaaagaacagcccgccctgaacgacagccggtactgcctgagcagcagactgagagtgtccgccaccttctggcagaacccccggaaccacttcagatgccaggtgcagttctacggcctgagcgagaacgacgagtggacccaggacagagccaagcccgtgacccagatcgtgtctgccgaagcctggggcagagccgattgcggctttaccagcgagagctaccagcagggcgtgctgagcgccaccatcctgtacgagatcctgctgggcaaggccaccctgtacgccgtgctggtgtctgccctggtgctgatggctatggtcaagcggaaggacagccgggga

SEQ ID NO: 2549 - DNA, 2688 bp, Artificial Sequence
  Synthetic Polynucloetide
atggccttaccagtgaccgccttgctcctgccgctggccttgctgctccacgccgccaggccggaagtgcagctggttgaatctggcggaggactggttcagcctggcggatctctgagactgtcttgtgccgccagcggcttcagcttcagcgacttttggatgagctgggtccgacaggcccctggcaaaggacttgaatgggtcgccacaatcagccaggccggcagcgagaaggactacgtggactctgtgaagggcagattcaccatcagccgggacaacgccaagaagtccctgtacctccagatgaacagcctgagagccgaggacaccgccgtgtactattgtgcctctggcgtgtacagcttcgactacagaggccagggcaccctggtcacagtctcttctggtaccggcggaggcggatctggcggcggaggtagcggtggcggaggatctgaattcgacatccagatgacccagagccccagcagcctgtctgcctctctgggcgagagagtgtccctgacctgtcgggccacacaggaactgagcggctacctgtcttggctgcagcagaagcccgacggcaccatcaagcggctgatctacgccgccagcaccctggatagcggcgtgcccaagagattcagcggcaacagaagcggcagcgactacagcctgaccatcagctccctggaaagcgaggacttcgccgactactactgcctgcagtacgccatctacccctacaccttcggcggaggcaccaagctggaaatcaagctcgagatccagaaccctgatcctgccgtgtaccagctgcgggatagcaagagcagcgacaagagcgtgtgtctgttcaccgacttcgacagccagaccaacgtgtcccagagcaaggactccgacgtgtacatcaccgataagtgcgtgctggacatgcggagcatggacttcaagagcaactccgccgtggcctggtccaacaagtccgatttcgcctgcgccaacgccttcaacaacagcattatccccgaggacacattcttcccaagccccgagagcagctgcgacgtgaagctggtggaaaagagcttcgagacagacaccaacctgaacttccagaacctgagcgtgatcggcttcagaatcctgctgctgaaagtggccggctttaacctgctgatgaccctgcggctgtggtccagccgcgccaagagaagcggatctggcgtgaagcagaccctgaatttcgacctgctgaagctggctggcgacgtggaatccaacccaggccctactagtatggactggatttggcgcatccttttccttgtcggcgctgctaccggcgcgcattccgggccccagctccagctgcaagagtctggacctggcctggtcaagcctagcgagacactgagcctgacctgtaccgtgtccggcgatagcatcagcagcggcgattactactggggctggatcagacagcctcctggcaaaggactggaatggatcggccacatctactacagcggcgtgacctactacaaccccagcctgaagtccagagtgaccatcagcgtggacaccagccggaaccagttctccctgaagctgtctagcgtgacagccgccgataccgccgtgtactactgcaccagagaggacagcagcaactggcggagtagaggccagggaacactggtcacagttagctctggatccggcggaggcggaagtggaggcggaggatctggcggcggaggctctttcgaagaggtgcaactgcagcagtctggccccgagcttgtgaagcctggcgcctccgtgaagatgagctgcaaggccagcggctacacctttaccagctacttcatccactgggtcaagcagaaacccggccagggcctggaatggatcggcttcatcaacccttacaacgacggcagcaagtacaacgagaagttcaagggcaaggccaccctgaccagcgacaagagcagcagcaccgcctacatggaactgtccagcctgacatccgaggacagcgccgtgtactactgcaccagggacgacggctactacggctacgccatggactactggggccagggaacaagcgtcaccgtgtcctctacgcgtgaggacctgaagaacgtgttcccacctgaggtggccgtgttcgagcctagcgaggccgagatcagccacacccagaaagccaccctcgtgtgcctggctaccggcttctaccccgaccatgtggaactgtcttggtgggtcaacggcaaagaggtgcacagcggcgtgtgtaccgacccccagccactgaaagaacagcccgccctgaacgacagccggtactgcctgagcagcagactgagagtgtccgccaccttctggcagaacccccggaaccacttcagatgccaggtgcagttctacggcctgagcgagaacgacgagtggacccaggacagagccaagcccgtgacccagatcgtgtctgccgaagcctggggcagagccgattgcggctttaccagcgagagctaccagcagggcgtgctgagcgccaccatcctgtacgagatcctgctgggcaaggccaccctgtacgccgtgctggtgtctgccctggtgctgatggctatggtcaagcggaaggacagccgggga

SEQ ID NO: 2550 - DNA, 2703 bp, Artificial Sequence
  Synthetic Polynucloetide
atggccttaccagtgaccgccttgctcctgccgctggccttgctgctccacgccgccaggccggaagtgcagctggttgaatctggcggaggactggttcagcctggcggatctctgagactgtcttgtgccgccagcggcttcagcttcagcgacttttggatgagctgggtccgacaggcccctggcaaaggacttgaatgggtcgccacaatcagccaggccggcagcgagaaggactacgtggactctgtgaagggcagattcaccatcagccgggacaacgccaagaagtccctgtacctccagatgaacagcctgagagccgaggacaccgccgtgtactattgtgcctctggcgtgtacagcttcgactacagaggccagggcaccctggtcacagtctcttctggtaccggcggaggcggatctggcggcggaggtagcggtggcggaggatctgaattcgacaccatcgtgctgacacagagccctgcttccctggccgtgtccctgggacagagagccaccatctcttgcagagccagcgagagcgtggacagctacggcaacagcttcatgcactggtatcagcagaagcccggccagccccccaagctgctgatctacctggcctccaacctggaaagcggcgtgcccgccagattttctggcagcggcagcagaaccgacttcaccctgaccatcgaccccgtggaagccgatgatgccgccacctactactgccagcagaacaactacgacccctggaccttcggcggaggcaccaagctggaaatcaagctcgagatccagaaccctgatcctgccgtgtaccagctgcgggatagcaagagcagcgacaagagcgtgtgtctgttcaccgacttcgacagccagaccaacgtgtcccagagcaaggactccgacgtgtacatcaccgataagtgcgtgctggacatgcggagcatggacttcaagagcaactccgccgtggcctggtccaacaagtccgatttcgcctgcgccaacgccttcaacaacagcattatccccgaggacacattcttcccaagccccgagagcagctgcgacgtgaagctggtggaaaagagcttcgagacagacaccaacctgaacttccagaacctgagcgtgatcggcttcagaatcctgctgctgaaagtggccggctttaacctgctgatgaccctgcggctgtggtccagccgcgccaagagaagcggatctggcgtgaagcagaccctgaatttcgacctgctgaagctggctggcgacgtggaatccaacccaggccctactagtatggactggatttggcgcatccttttccttgtcggcgctgctaccggcgcgcattccgggccccagctccagctgcaagagtctggacctggcctggtcaagcctagcgagacactgagcctgacctgtaccgtgtccggcgatagcatcagcagcggcgattactactggggctggatcagacagcctcctggcaaaggactggaatggatcggccacatctactacagcggcgtgacctactacaaccccagcctgaagtccagagtgaccatcagcgtggacaccagccggaaccagttctccctgaagctgtctagcgtgacagccgccgataccgccgtgtactactgcaccagagaggacagcagcaactggcggagtagaggccagggaacactggtcacagttagctctggatccggcggaggcggaagtggaggcggaggatctggcggcggaggctctttcgaagaagtgcaactccagcagagcggccctgagcttgtgaagcctggcgcttccgtgaagatgagctgcaaggccagcggctacaccttcaccagctacgtgatgcactgggtcaagcagaaacctggacagggcctggaatggatcggctacatcaacccctacaacgacggcaccaagtacaacgagaagttcaagggcaaggccaccctgacaagcgacaccagcagcagcaccgcctacatggaactgaacagcctgaccagcgaggacagcgccgtgtacttctgcgccagacccatctacttcgacaacgactacttcgattactggggccagggcaccaccctgaaggtgtcctctacgcgtgaggacctgaagaacgtgttcccacctgaggtggccgtgttcgagcctagcgaggccgagatcagccacacccagaaagccaccctcgtgtgcctggctaccggcttctaccccgaccatgtggaactgtcttggtgggtcaacggcaaagaggtgcacagcggcgtgtgtaccgacccccagccactgaaagaacagcccgccctgaacgacagccggtactgcctgagcagcagactgagagtgtccgccaccttctggcagaacccccggaaccacttcagatgccaggtgcagttctacggcctgagcgagaacgacgagtggacccaggacagagccaagcccgtgacccagatcgtgtctgccgaagcctggggcagagccgattgcggctttaccagcgagagctaccagcagggcgtgctgagcgccaccatcctgtacgagatcctgctgggcaaggccaccctgtacgccgtgctggtgtctgccctggtgctgatggctatggtcaagcggaaggacagccgggga

SEQ ID NO: 2551 - DNA, 2688 bp, Artificial Sequence
  Synthetic Polynucloetide
atggccttaccagtgaccgccttgctcctgccgctggccttgctgctccacgccgccaggccggaagtgcagctggttgaatctggcggaggactggttcagcctggcggatctctgagactgtcttgtgccgccagcggcttcagcttcagcgacttttggatgagctgggtccgacaggcccctggcaaaggacttgaatgggtcgccacaatcagccaggccggcagcgagaaggactacgtggactctgtgaagggcagattcaccatcagccgggacaacgccaagaagtccctgtacctccagatgaacagcctgagagccgaggacaccgccgtgtactattgtgcctctggcgtgtacagcttcgactacagaggccagggcaccctggtcacagtctcttctggtaccggcggaggcggatctggcggcggaggtagcggtggcggaggatctgaattcgacatccagatgacccagagccccagcagcctgtctgccagcgtgggcgacagagtgaccatcacatgcaaggccagccaggacgtgggaatcgccgtggcctggtatcagcagaaacccggcaaggtgcccaagctgctgatctactgggccagcaccagacacaccggcgtgcccgatagattttccggcagcggctccggcaccgacttcaccctgacaatcagctccctccagcccgaggacgtggcaacctactactgccagcagtacagcagctacccctacaccttcggccagggcaccaaggtggaaatcaagagactcgagatccagaaccctgatcctgccgtgtaccagctgcgggatagcaagagcagcgacaagagcgtgtgtctgttcaccgacttcgacagccagaccaacgtgtcccagagcaaggactccgacgtgtacatcaccgataagtgcgtgctggacatgcggagcatggacttcaagagcaactccgccgtggcctggtccaacaagtccgatttcgcctgcgccaacgccttcaacaacagcattatccccgaggacacattcttcccaagccccgagagcagctgcgacgtgaagctggtggaaaagagcttcgagacagacaccaacctgaacttccagaacctgagcgtgatcggcttcagaatcctgctgctgaaagtggccggctttaacctgctgatgaccctgcggctgtggtccagccgcgccaagagaagcggatctggcgtgaagcagaccctgaatttcgacctgctgaagctggctggcgacgtggaatccaacccaggccctactagtatggactggatttggcgcatccttttccttgtcggcgctgctaccggcgcgcattccgggccccagctccagctgcaagagtctggacctggcctggtcaagcctagcgagacactgagcctgacctgtaccgtgtccggcgatagcatcagcagcggcgattactactggggctggatcagacagcctcctggcaaaggactggaatggatcggccacatctactacagcggcgtgacctactacaaccccagcctgaagtccagagtgaccatcagcgtggacaccagccggaaccagttctccctgaagctgtctagcgtgacagccgccgataccgccgtgtactactgcaccagagaggacagcagcaactggcggagtagaggccagggaacactggtcacagttagctctggatccggcggaggcggaagtggaggcggaggatctggcggcggaggctctttcgaagaagtgcaactggtggaatcaggcggcggactggtgcagcctggcggatctctgagactgagctgtgccgccagcggcttcgacttcagccggtactggatgagctgggtgcgccaggcccctggcaaaggactggaatggatcggcgagatcaaccccgacagcagcaccatcaactacgcccccagcctgaaggacaagttcatcatcagccgggacaacgccaagaacagcctgtacctccagatgaactccctgcgggccgaggacaccgccgtgtactattgcgccagacccgacggcaactactggtacttcgacgtgtggggccagggaaccctcgtgaccgtgtcatctacgcgtgaggacctgaagaacgtgttcccacctgaggtggccgtgttcgagcctagcgaggccgagatcagccacacccagaaagccaccctcgtgtgcctggctaccggcttctaccccgaccatgtggaactgtcttggtgggtcaacggcaaagaggtgcacagcggcgtgtgtaccgacccccagccactgaaagaacagcccgccctgaacgacagccggtactgcctgagcagcagactgagagtgtccgccaccttctggcagaacccccggaaccacttcagatgccaggtgcagttctacggcctgagcgagaacgacgagtggacccaggacagagccaagcccgtgacccagatcgtgtctgccgaagcctggggcagagccgattgcggctttaccagcgagagctaccagcagggcgtgctgagcgccaccatcctgtacgagatcctgctgggcaaggccaccctgtacgccgtgctggtgtctgccctggtgctgatggctatggtcaagcggaaggacagccgggga

SEQ ID NO: 2552 - DNA, 2688 bp, Artificial Sequence
  Synthetic Polynucloetide
atggccttaccagtgaccgccttgctcctgccgctggccttgctgctccacgccgccaggccggaagtgcagctggttgaatctggcggaggactggttcagcctggcggatctctgagactgtcttgtgccgccagcggcttcagcttcagcgacttttggatgagctgggtccgacaggcccctggcaaaggacttgaatgggtcgccacaatcagccaggccggcagcgagaaggactacgtggactctgtgaagggcagattcaccatcagccgggacaacgccaagaagtccctgtacctccagatgaacagcctgagagccgaggacaccgccgtgtactattgtgcctctggcgtgtacagcttcgactacagaggccagggcaccctggtcacagtctcttctggtaccggcggaggcggatctggcggcggaggtagcggtggcggaggatctgaattcgacatcgtgatgacccagagccagaagagcatgagcaccagcgtgggcgacagagtgagcatcacctgcaaggccagccaggacgtgatcaccggcgtggcctggtaccagcagaagcccggccagagccccaagctgctgatctacagcgccagctacagatacaccggcgtgcccgacagattcaccggcagcggcagcggcaccgacttcaccttcaccatcagcaacgtgcaggccgaggacctggccgtgtactactgccagcagcactacagcacccccctgaccttcggcgccggcaccaagctggagctgaagctcgagatccagaaccctgatcctgccgtgtaccagctgcgggatagcaagagcagcgacaagagcgtgtgtctgttcaccgacttcgacagccagaccaacgtgtcccagagcaaggactccgacgtgtacatcaccgataagtgcgtgctggacatgcggagcatggacttcaagagcaactccgccgtggcctggtccaacaagtccgatttcgcctgcgccaacgccttcaacaacagcattatccccgaggacacattcttcccaagccccgagagcagctgcgacgtgaagctggtggaaaagagcttcgagacagacaccaacctgaacttccagaacctgagcgtgatcggcttcagaatcctgctgctgaaagtggccggctttaacctgctgatgaccctgcggctgtggtccagccgcgccaagagaagcggatctggcgtgaagcagaccctgaatttcgacctgctgaagctggctggcgacgtggaatccaacccaggccctactagtatggactggatttggcgcatccttttccttgtcggcgctgctaccggcgcgcattccgggccccagctccagctgcaagagtctggacctggcctggtcaagcctagcgagacactgagcctgacctgtaccgtgtccggcgatagcatcagcagcggcgattactactggggctggatcagacagcctcctggcaaaggactggaatggatcggccacatctactacagcggcgtgacctactacaaccccagcctgaagtccagagtgaccatcagcgtggacaccagccggaaccagttctccctgaagctgtctagcgtgacagccgccgataccgccgtgtactactgcaccagagaggacagcagcaactggcggagtagaggccagggaacactggtcacagttagctctggatccggcggaggcggaagtggaggcggaggatctggcggcggaggctctttcgaacaggtgcagctgcagcagcccggcgccgagctggtgagacccggcgccagcgtgaagctgagctgcaaggccagcggctacagcttcaccacctactggatgaactgggtgaagcagagacccggccagggcctggagtggatcggcatgatccaccccagcgacagcgagaccagactgaaccagaagttcaaggacaaggccaccctgaccgtggacaagagcagcagcaccgcctacatgcagctgagcagccccaccagcgaggacagcgccgtgtactactgcgccagaagcaccatgatcgccaccagagccatggactactggggccagggcaccagcgtgaccgtgagcagcacgcgtgaggacctgaagaacgtgttcccacctgaggtggccgtgttcgagcctagcgaggccgagatcagccacacccagaaagccaccctcgtgtgcctggctaccggcttctaccccgaccatgtggaactgtcttggtgggtcaacggcaaagaggtgcacagcggcgtgtgtaccgacccccagccactgaaagaacagcccgccctgaacgacagccggtactgcctgagcagcagactgagagtgtccgccaccttctggcagaacccccggaaccacttcagatgccaggtgcagttctacggcctgagcgagaacgacgagtggacccaggacagagccaagcccgtgacccagatcgtgtctgccgaagcctggggcagagccgattgcggctttaccagcgagagctaccagcagggcgtgctgagcgccaccatcctgtacgagatcctgctgggcaaggccaccctgtacgccgtgctggtgtctgccctggtgctgatggctatggtcaagcggaaggacagccgggga

SEQ ID NO: 2553 - DNA, 2706 bp, Artificial Sequence
  Synthetic Polynucloetide
atggccttaccagtgaccgccttgctcctgccgctggccttgctgctccacgccgccaggccggaagtgcagctggttgaatctggcggaggactggttcagcctggcggatctctgagactgtcttgtgccgccagcggcttcagcttcagcgacttttggatgagctgggtccgacaggcccctggcaaaggacttgaatgggtcgccacaatcagccaggccggcagcgagaaggactacgtggactctgtgaagggcagattcaccatcagccgggacaacgccaagaagtccctgtacctccagatgaacagcctgagagccgaggacaccgccgtgtactattgtgcctctggcgtgtacagcttcgactacagaggccagggcaccctggtcacagtctcttctggtaccggcggaggcggatctggcggcggaggtagcggtggcggaggatctgaattccagagcgtgctgacacagcctccatccgtgtctggcgctccaggccagagagtgaccatctcctgtaccggcagcggcagcaacatcggagccccctacgacgtgtcctggtatcagcaactgcctggcaccgcccccaagctgctgatctaccacaacaacaagcggcccagcggcgtgcccgatagattcagcggctctaagagcggcaccagcgccagcctggctatcactggactccaggccgaggacgaggccgactactactgtgccacagtggaagccggcctgagcggctctgtgtttggcggcggaacaaagctgaccgtgctgggagctctcgagatccagaaccctgatcctgccgtgtaccagctgcgggatagcaagagcagcgacaagagcgtgtgtctgttcaccgacttcgacagccagaccaacgtgtcccagagcaaggactccgacgtgtacatcaccgataagtgcgtgctggacatgcggagcatggacttcaagagcaactccgccgtggcctggtccaacaagtccgatttcgcctgcgccaacgccttcaacaacagcattatccccgaggacacattcttcccaagccccgagagcagctgcgacgtgaagctggtggaaaagagcttcgagacagacaccaacctgaacttccagaacctgagcgtgatcggcttcagaatcctgctgctgaaagtggccggctttaacctgctgatgaccctgcggctgtggtccagccgcgccaagagaagcggatctggcgtgaagcagaccctgaatttcgacctgctgaagctggctggcgacgtggaatccaacccaggccctactagtatggactggatttggcgcatccttttccttgtcggcgctgctaccggcgcgcattccgggccccagctccagctgcaagagtctggacctggcctggtcaagcctagcgagacactgagcctgacctgtaccgtgtccggcgatagcatcagcagcggcgattactactggggctggatcagacagcctcctggcaaaggactggaatggatcggccacatctactacagcggcgtgacctactacaaccccagcctgaagtccagagtgaccatcagcgtggacaccagccggaaccagttctccctgaagctgtctagcgtgacagccgccgataccgccgtgtactactgcaccagagaggacagcagcaactggcggagtagaggccagggaacactggtcacagttagctctggatccggcggaggcggaagtggaggcggaggatctggcggcggaggctctttcgaacaggtgcaactggtgcagagcggagccgaagtgaagaaacctggggccagcgtgaaggtgtcctgcaaggtgtccggctacaccctgaccgagctgagcattcactgggtgcgccaggcccctggcaagggactggaatggatgggcggcttcgaccccgaagagaacgagatcgtgtacgcccagcggttccagggcagagtgacaatgaccgaggacaccagcaccgacaccgcctacatggaactgagcagcctgcggagcgaggataccgccgtgtactactgcgccatcgtgggcagcttcagccctctgacactgggcctgtggggccagggaactatggtcaccgtgtccagcacgcgtgaggacctgaagaacgtgttcccacctgaggtggccgtgttcgagcctagcgaggccgagatcagccacacccagaaagccaccctcgtgtgcctggctaccggcttctaccccgaccatgtggaactgtcttggtgggtcaacggcaaagaggtgcacagcggcgtgtgtaccgacccccagccactgaaagaacagcccgccctgaacgacagccggtactgcctgagcagcagactgagagtgtccgccaccttctggcagaacccccggaaccacttcagatgccaggtgcagttctacggcctgagcgagaacgacgagtggacccaggacagagccaagcccgtgacccagatcgtgtctgccgaagcctggggcagagccgattgcggctttaccagcgagagctaccagcagggcgtgctgagcgccaccatcctgtacgagatcctgctgggcaaggccaccctgtacgccgtgctggtgtctgccctggtgctgatggctatggtcaagcggaaggacagccgggga

SEQ ID NO: 2554 - DNA, 2706 bp, Artificial Sequence
  Synthetic Polynucloetide
atggccttaccagtgaccgccttgctcctgccgctggccttgctgctccacgccgccaggccggaagtgcagctggttgaatctggcggaggactggttcagcctggcggatctctgagactgtcttgtgccgccagcggcttcagcttcagcgacttttggatgagctgggtccgacaggcccctggcaaaggacttgaatgggtcgccacaatcagccaggccggcagcgagaaggactacgtggactctgtgaagggcagattcaccatcagccgggacaacgccaagaagtccctgtacctccagatgaacagcctgagagccgaggacaccgccgtgtactattgtgcctctggcgtgtacagcttcgactacagaggccagggcaccctggtcacagtctcttctggtaccggcggaggcggatctggcggcggaggtagcggtggcggaggatctgaattccagagcgtgctgacacagcctccatccgtgtctggcgctccaggccagagagtgaccatctcctgtaccggcagcggcagcaacatcggagccccctacgacgtgtcctggtatcagcaactgcctggcaccgcccccaagctgctgatctaccacaacaacaagcggcccagcggcgtgcccgatagattcagcggctctaagagcggcaccagcgccagcctggctatcactggactccaggccgaggacgaggccgactactactgccagagctacgacagcagcagcatcagcaccatcttcggcggaggcaccaagctgacagtgctgggagctctcgagatccagaaccctgatcctgccgtgtaccagctgcgggatagcaagagcagcgacaagagcgtgtgtctgttcaccgacttcgacagccagaccaacgtgtcccagagcaaggactccgacgtgtacatcaccgataagtgcgtgctggacatgcggagcatggacttcaagagcaactccgccgtggcctggtccaacaagtccgatttcgcctgcgccaacgccttcaacaacagcattatccccgaggacacattcttcccaagccccgagagcagctgcgacgtgaagctggtggaaaagagcttcgagacagacaccaacctgaacttccagaacctgagcgtgatcggcttcagaatcctgctgctgaaagtggccggctttaacctgctgatgaccctgcggctgtggtccagccgcgccaagagaagcggatctggcgtgaagcagaccctgaatttcgacctgctgaagctggctggcgacgtggaatccaacccaggccctactagtatggactggatttggcgcatccttttccttgtcggcgctgctaccggcgcgcattccgggccccagctccagctgcaagagtctggacctggcctggtcaagcctagcgagacactgagcctgacctgtaccgtgtccggcgatagcatcagcagcggcgattactactggggctggatcagacagcctcctggcaaaggactggaatggatcggccacatctactacagcggcgtgacctactacaaccccagcctgaagtccagagtgaccatcagcgtggacaccagccggaaccagttctccctgaagctgtctagcgtgacagccgccgataccgccgtgtactactgcaccagagaggacagcagcaactggcggagtagaggccagggaacactggtcacagttagctctggatccggcggaggcggaagtggaggcggaggatctggcggcggaggctctttcgaacaggtgcaactggtgcagagcggagccgaagtgaagaaacctggggccagcgtgaaggtgtcctgcaaggtgtccggctacaccctgaccgagctgagcattcactgggtgcgccaggcccctggcaagggactggaatggatgggcggcttcgaccccgaagagaacgagatcgtgtacgcccagcggttccagggcagagtgacaatgaccgaggacaccagcaccgacaccgcctacatggaactgagcagcctgcggagcgaggataccgccgtgtactactgtgccatcgtgggcagcttcagcggaatcgcctacagaccttggggccagggcacaatggtcaccgtgtctagcacgcgtgaggacctgaagaacgtgttcccacctgaggtggccgtgttcgagcctagcgaggccgagatcagccacacccagaaagccaccctcgtgtgcctggctaccggcttctaccccgaccatgtggaactgtcttggtgggtcaacggcaaagaggtgcacagcggcgtgtgtaccgacccccagccactgaaagaacagcccgccctgaacgacagccggtactgcctgagcagcagactgagagtgtccgccaccttctggcagaacccccggaaccacttcagatgccaggtgcagttctacggcctgagcgagaacgacgagtggacccaggacagagccaagcccgtgacccagatcgtgtctgccgaagcctggggcagagccgattgcggctttaccagcgagagctaccagcagggcgtgctgagcgccaccatcctgtacgagatcctgctgggcaaggccaccctgtacgccgtgctggtgtctgccctggtgctgatggctatggtcaagcggaaggacagccgggga

SEQ ID NO: 2555 - DNA, 2670 bp, Artificial Sequence
  Synthetic Polynucloetide
atggccttaccagtgaccgccttgctcctgccgctggccttgctgctccacgccgccaggccggaagtgcagctggttgaatctggcggaggactggttcagcctggcggatctctgagactgtcttgtgccgccagcggcttcagcttcagcgacttttggatgagctgggtccgacaggcccctggcaaaggacttgaatgggtcgccacaatcagccaggccggcagcgagaaggactacgtggactctgtgaagggcagattcaccatcagccgggacaacgccaagaagtccctgtacctccagatgaacagcctgagagccgaggacaccgccgtgtactattgtgcctctggcgtgtacagcttcgactacagaggccagggcaccctggtcacagtctcttctggtaccggcggaggcggatctggcggcggaggtagcggtggcggaggatctgaattcgacatccagatgacccagagccccagcagcctgtctgccagcgtgggcgacagagtgaccatcacctgtagagccagccagggcatcagaaacaacctggcctggtatcagcagaagcccggcaaggcccccaagcggctgatctacgccgccagcaatctccagagcggcgtgcccagcagattcacaggctctggcagcggcaccgagttcaccctgatcgtgtctagcctccagcccgaggacttcgccacctactactgcctccagcaccacagctaccccctgacatctggcggaggcaccaaggtggaactcgagatccagaaccctgatcctgccgtgtaccagctgcgggatagcaagagcagcgacaagagcgtgtgtctgttcaccgacttcgacagccagaccaacgtgtcccagagcaaggactccgacgtgtacatcaccgataagtgcgtgctggacatgcggagcatggacttcaagagcaactccgccgtggcctggtccaacaagtccgatttcgcctgcgccaacgccttcaacaacagcattatccccgaggacacattcttcccaagccccgagagcagctgcgacgtgaagctggtggaaaagagcttcgagacagacaccaacctgaacttccagaacctgagcgtgatcggcttcagaatcctgctgctgaaagtggccggctttaacctgctgatgaccctgcggctgtggtccagccgcgccaagagaagcggatctggcgtgaagcagaccctgaatttcgacctgctgaagctggctggcgacgtggaatccaacccaggccctactagtatggactggatttggcgcatccttttccttgtcggcgctgctaccggcgcgcattccgggccccagctccagctgcaagagtctggacctggcctggtcaagcctagcgagacactgagcctgacctgtaccgtgtccggcgatagcatcagcagcggcgattactactggggctggatcagacagcctcctggcaaaggactggaatggatcggccacatctactacagcggcgtgacctactacaaccccagcctgaagtccagagtgaccatcagcgtggacaccagccggaaccagttctccctgaagctgtctagcgtgacagccgccgataccgccgtgtactactgcaccagagaggacagcagcaactggcggagtagaggccagggaacactggtcacagttagctctggatccggcggaggcggaagtggaggcggaggatctggcggcggaggctctttcgaagaggtgcaggtgctggaaagtggcggaggactggtgcagcctggcggctctctgagactgtcttgtgccgccagcggcttcaccttcagcagctacgccatgagctgggtgcgccaggcccctggaaaaggactggaatgggtgtccgccatcagcggctctggcgggtctaccaactacgccgatagcgtgaagggccggttcaccatcagccgggacaacagcaagaacaccctgtacctccagatgaacagcctgcgggccgaggacaccgccgtgtattattgtgccggcagcagcgggtggagcgagtattggggacagggcaccctcgtgaccgtgtcctctacgcgtgaggacctgaagaacgtgttcccacctgaggtggccgtgttcgagcctagcgaggccgagatcagccacacccagaaagccaccctcgtgtgcctggctaccggcttctaccccgaccatgtggaactgtcttggtgggtcaacggcaaagaggtgcacagcggcgtgtgtaccgacccccagccactgaaagaacagcccgccctgaacgacagccggtactgcctgagcagcagactgagagtgtccgccaccttctggcagaacccccggaaccacttcagatgccaggtgcagttctacggcctgagcgagaacgacgagtggacccaggacagagccaagcccgtgacccagatcgtgtctgccgaagcctggggcagagccgattgcggctttaccagcgagagctaccagcagggcgtgctgagcgccaccatcctgtacgagatcctgctgggcaaggccaccctgtacgccgtgctggtgtctgccctggtgctgatggctatggtcaagcggaaggacagccgggga

SEQ ID NO: 2556 - DNA, 2688 bp, Artificial Sequence
  Synthetic Polynucloetide
atggccttaccagtgaccgccttgctcctgccgctggccttgctgctccacgccgccaggccggaagtgcagctggttgaatctggcggaggactggttcagcctggcggatctctgagactgtcttgtgccgccagcggcttcagcttcagcgacttttggatgagctgggtccgacaggcccctggcaaaggacttgaatgggtcgccacaatcagccaggccggcagcgagaaggactacgtggactctgtgaagggcagattcaccatcagccgggacaacgccaagaagtccctgtacctccagatgaacagcctgagagccgaggacaccgccgtgtactattgtgcctctggcgtgtacagcttcgactacagaggccagggcaccctggtcacagtctcttctggtaccggcggaggcggatctggcggcggaggtagcggtggcggaggatctgaattcgacgagatccagctggtgcagagcggagccgaagtgaagaagcctggcgagagcctgcggatcagctgcaagggcagcggcttcaacatcgaggactactacatccactgggtgcgccagatgcccggcaagggcctggaatggatgggcagaatcgaccccgagaacgacgagactaagtacggccccatcttccagggccacgtgaccatcagcgccgacaccagcatcaacaccgtgtacctccagtggtccagcctgaaggccagcgacaccgccatgtactactgcgcctttagaggcggcgtgtactggggccagggcaccacagtgacagtgtctagcctcgagatccagaaccctgatcctgccgtgtaccagctgcgggatagcaagagcagcgacaagagcgtgtgtctgttcaccgacttcgacagccagaccaacgtgtcccagagcaaggactccgacgtgtacatcaccgataagtgcgtgctggacatgcggagcatggacttcaagagcaactccgccgtggcctggtccaacaagtccgatttcgcctgcgccaacgccttcaacaacagcattatccccgaggacacattcttcccaagccccgagagcagctgcgacgtgaagctggtggaaaagagcttcgagacagacaccaacctgaacttccagaacctgagcgtgatcggcttcagaatcctgctgctgaaagtggccggctttaacctgctgatgaccctgcggctgtggtccagccgcgccaagagaagcggatctggcgtgaagcagaccctgaatttcgacctgctgaagctggctggcgacgtggaatccaacccaggccctactagtatggactggatttggcgcatccttttccttgtcggcgctgctaccggcgcgcattccgggccccagctccagctgcaagagtctggacctggcctggtcaagcctagcgagacactgagcctgacctgtaccgtgtccggcgatagcatcagcagcggcgattactactggggctggatcagacagcctcctggcaaaggactggaatggatcggccacatctactacagcggcgtgacctactacaaccccagcctgaagtccagagtgaccatcagcgtggacaccagccggaaccagttctccctgaagctgtctagcgtgacagccgccgataccgccgtgtactactgcaccagagaggacagcagcaactggcggagtagaggccagggaacactggtcacagttagctctggatccggcggaggcggaagtggaggcggaggatctggcggcggaggctctttcgaagatgtcgtgatgacccagagccccgacagcctggctgtgtctctgggagagagagccaccatcaactgcaagtccagccagtccctgctggacagcgacggcaagacctacctgaactggctccagcagaagcccggccagccccccaagagactgatctccctggtgtccaagctggactccggcgtgcccgatagattttccggctctggcagcggcaccgacttcaccctgacaatcagctcccttcaggccgaggacgtggccgtgtactattgctggcagggcacacacttccccggcacctttggcggaggcaccaaggtggaaatcaagacgcgtgaggacctgaagaacgtgttcccacctgaggtggccgtgttcgagcctagcgaggccgagatcagccacacccagaaagccaccctcgtgtgcctggctaccggcttctaccccgaccatgtggaactgtcttggtgggtcaacggcaaagaggtgcacagcggcgtgtgtaccgacccccagccactgaaagaacagcccgccctgaacgacagccggtactgcctgagcagcagactgagagtgtccgccaccttctggcagaacccccggaaccacttcagatgccaggtgcagttctacggcctgagcgagaacgacgagtggacccaggacagagccaagcccgtgacccagatcgtgtctgccgaagcctggggcagagccgattgcggctttaccagcgagagctaccagcagggcgtgctgagcgccaccatcctgtacgagatcctgctgggcaaggccaccctgtacgccgtgctggtgtctgccctggtgctgatggctatggtcaagcggaaggacagccgggga

SEQ ID NO: 2557 - DNA, 2709 bp, Artificial Sequence
  Synthetic Polynucloetide
atggccttaccagtgaccgccttgctcctgccgctggccttgctgctccacgccgccaggccggaagtgcagctggttgaatctggcggaggactggttcagcctggcggatctctgagactgtcttgtgccgccagcggcttcagcttcagcgacttttggatgagctgggtccgacaggcccctggcaaaggacttgaatgggtcgccacaatcagccaggccggcagcgagaaggactacgtggactctgtgaagggcagattcaccatcagccgggacaacgccaagaagtccctgtacctccagatgaacagcctgagagccgaggacaccgccgtgtactattgtgcctctggcgtgtacagcttcgactacagaggccagggcaccctggtcacagtctcttctggtaccggcggaggcggatctggcggcggaggtagcggtggcggaggatctgaattcgacgagcttgtgatgacccagagccccagcagcctgacagtgacagccggcgagaaagtgaccatgagctgcaagagcagccagagcctgctgaacagcggcaaccagaagaactacctgacctggtatcagcagaagcccggccagccccccaagctgctgatctactgggccagcaccagagaaagcggcgtgcccgatagattcaccggctctggcagcggcaccgacttcaccctgacaatcagcagcgtgcaggccgaggacctggccgtgtactactgccagaacgactacagctaccccctgaccttcggagccggcaccaagctggaaatcaagctcgagatccagaaccctgatcctgccgtgtaccagctgcgggatagcaagagcagcgacaagagcgtgtgtctgttcaccgacttcgacagccagaccaacgtgtcccagagcaaggactccgacgtgtacatcaccgataagtgcgtgctggacatgcggagcatggacttcaagagcaactccgccgtggcctggtccaacaagtccgatttcgcctgcgccaacgccttcaacaacagcattatccccgaggacacattcttcccaagccccgagagcagctgcgacgtgaagctggtggaaaagagcttcgagacagacaccaacctgaacttccagaacctgagcgtgatcggcttcagaatcctgctgctgaaagtggccggctttaacctgctgatgaccctgcggctgtggtccagccgcgccaagagaagcggatctggcgtgaagcagaccctgaatttcgacctgctgaagctggctggcgacgtggaatccaacccaggccctactagtatggactggatttggcgcatccttttccttgtcggcgctgctaccggcgcgcattccgggccccagctccagctgcaagagtctggacctggcctggtcaagcctagcgagacactgagcctgacctgtaccgtgtccggcgatagcatcagcagcggcgattactactggggctggatcagacagcctcctggcaaaggactggaatggatcggccacatctactacagcggcgtgacctactacaaccccagcctgaagtccagagtgaccatcagcgtggacaccagccggaaccagttctccctgaagctgtctagcgtgacagccgccgataccgccgtgtactactgcaccagagaggacagcagcaactggcggagtagaggccagggaacactggtcacagttagctctggatccggcggaggcggaagtggaggcggaggatctggcggcggaggctctttcgaagaagtgcagctgctggaacagtctggcgccgaacttgtgcggcctggcaccagcgtgaagatcagctgtaaagccagcggctacgccttcaccaactactggctgggctgggtcaagcagaggcctggacacggcctggaatggatcggcgacatctttcccggctccggcaacatccactacaacgagaagttcaagggcaaggccaccctgaccgccgacaagtctagcagcaccgcctacatgcagctgtccagcctgacctttgaggacagcgccgtgtatttctgtgcccggctgcggaactgggacgagcccatggattattggggccagggcaccaccgtgaccgtgtctagtacgcgtgaggacctgaagaacgtgttcccacctgaggtggccgtgttcgagcctagcgaggccgagatcagccacacccagaaagccaccctcgtgtgcctggctaccggcttctaccccgaccatgtggaactgtcttggtgggtcaacggcaaagaggtgcacagcggcgtgtgtaccgacccccagccactgaaagaacagcccgccctgaacgacagccggtactgcctgagcagcagactgagagtgtccgccaccttctggcagaacccccggaaccacttcagatgccaggtgcagttctacggcctgagcgagaacgacgagtggacccaggacagagccaagcccgtgacccagatcgtgtctgccgaagcctggggcagagccgattgcggctttaccagcgagagctaccagcagggcgtgctgagcgccaccatcctgtacgagatcctgctgggcaaggccaccctgtacgccgtgctggtgtctgccctggtgctgatggctatggtcaagcggaaggacagccgggga

SEQ ID NO: 2558 - DNA, 2712 bp, Artificial Sequence
  Synthetic Polynucloetide
atggccttaccagtgaccgccttgctcctgccgctggccttgctgctccacgccgccaggccggaagtgcagctggttgaatctggcggaggactggttcagcctggcggatctctgagactgtcttgtgccgccagcggcttcagcttcagcgacttttggatgagctgggtccgacaggcccctggcaaaggacttgaatgggtcgccacaatcagccaggccggcagcgagaaggactacgtggactctgtgaagggcagattcaccatcagccgggacaacgccaagaagtccctgtacctccagatgaacagcctgagagccgaggacaccgccgtgtactattgtgcctctggcgtgtacagcttcgactacagaggccagggcaccctggtcacagtctcttctggtaccggcggaggcggatctggcggcggaggtagcggtggcggaggatctgaattcgacgagctgcagatgacccagagccctagcagcctgtctgccagcgtgggcgacagagtgaccatcacctgtagagccagccagagcatcagcagctacctgaactggtatcagcagaagcccggccagccccccaaactgctgatctactgggccagcaccagagaaagcggcgtgcccgatagattcagcggcagcgagagcggcaccaactacaccctgaccatcagctccctgcagcccgaggacttcgccacctacttttgccagcagagcgacagcctgcccatcacctttggacagggcacccggctggacattcagctcgagatccagaaccctgatcctgccgtgtaccagctgcgggatagcaagagcagcgacaagagcgtgtgtctgttcaccgacttcgacagccagaccaacgtgtcccagagcaaggactccgacgtgtacatcaccgataagtgcgtgctggacatgcggagcatggacttcaagagcaactccgccgtggcctggtccaacaagtccgatttcgcctgcgccaacgccttcaacaacagcattatccccgaggacacattcttcccaagccccgagagcagctgcgacgtgaagctggtggaaaagagcttcgagacagacaccaacctgaacttccagaacctgagcgtgatcggcttcagaatcctgctgctgaaagtggccggctttaacctgctgatgaccctgcggctgtggtccagccgcgccaagagaagcggatctggcgtgaagcagaccctgaatttcgacctgctgaagctggctggcgacgtggaatccaacccaggccctactagtatggactggatttggcgcatccttttccttgtcggcgctgctaccggcgcgcattccgggccccagctccagctgcaagagtctggacctggcctggtcaagcctagcgagacactgagcctgacctgtaccgtgtccggcgatagcatcagcagcggcgattactactggggctggatcagacagcctcctggcaaaggactggaatggatcggccacatctactacagcggcgtgacctactacaaccccagcctgaagtccagagtgaccatcagcgtggacaccagccggaaccagttctccctgaagctgtctagcgtgacagccgccgataccgccgtgtactactgcaccagagaggacagcagcaactggcggagtagaggccagggaacactggtcacagttagctctggatccggcggaggcggaagtggaggcggaggatctggcggcggaggctctttcgaagaggtgcaactgctggaatctgggggcggagtggtgcagcctggcagaagcctgagactgagctgtgccgccagcggcttcaccttcagctcctacggaatgcactgggtgcgccaggcccctggcaaaggactggaatgggtggccgtgatctcctacgacggcagcaacaagtactacgccgacagcgtgaagggccggttcaccatcagccgggacaacagcaagaacaccctgtacctgcagatgaacagcctgcgggccgaggacaccgccgtgtactactgcgccaaggatatgggctggggcagcggctggcggccttactactactacggcatggacgtgtggggccagggcaccaccgtgacagtgtcatctacgcgtgaggacctgaagaacgtgttcccacctgaggtggccgtgttcgagcctagcgaggccgagatcagccacacccagaaagccaccctcgtgtgcctggctaccggcttctaccccgaccatgtggaactgtcttggtgggtcaacggcaaagaggtgcacagcggcgtgtgtaccgacccccagccactgaaagaacagcccgccctgaacgacagccggtactgcctgagcagcagactgagagtgtccgccaccttctggcagaacccccggaaccacttcagatgccaggtgcagttctacggcctgagcgagaacgacgagtggacccaggacagagccaagcccgtgacccagatcgtgtctgccgaagcctggggcagagccgattgcggctttaccagcgagagctaccagcagggcgtgctgagcgccaccatcctgtacgagatcctgctgggcaaggccaccctgtacgccgtgctggtgtctgccctggtgctgatggctatggtcaagcggaaggacagccgggga

SEQ ID NO: 2559 - DNA, 2703 bp, Artificial Sequence
  Synthetic Polynucloetide
atggccttaccagtgaccgccttgctcctgccgctggccttgctgctccacgccgccaggccggaagtgcagctggttgaatctggcggaggactggttcagcctggcggatctctgagactgtcttgtgccgccagcggcttcagcttcagcgacttttggatgagctgggtccgacaggcccctggcaaaggacttgaatgggtcgccacaatcagccaggccggcagcgagaaggactacgtggactctgtgaagggcagattcaccatcagccgggacaacgccaagaagtccctgtacctccagatgaacagcctgagagccgaggacaccgccgtgtactattgtgcctctggcgtgtacagcttcgactacagaggccagggcaccctggtcacagtctcttctggtaccggcggaggcggatctggcggcggaggtagcggtggcggaggatctgaattcgacgacatccaaatgacacagagtccttctagtttgagtgcgagcgtgggggacagggtgaccattacctgcagggccagccagagcataagctcataccttaattggtaccagcaaaaaccaggtaaggcccctaagctcctgatctacgcggcctcttcacttcaatctggggtcccttcccgcttcagtggctccggcagcggcaccgacttcacgctcactatatcaagtctgcagcctgaggatctcgccacctattactgtcaacaaagttattccacccctttcacctttggaccgggcacgaaagtggatattaagctcgagatccagaaccctgatcctgccgtgtaccagctgcgggatagcaagagcagcgacaagagcgtgtgtctgttcaccgacttcgacagccagaccaacgtgtcccagagcaaggactccgacgtgtacatcaccgataagtgcgtgctggacatgcggagcatggacttcaagagcaactccgccgtggcctggtccaacaagtccgatttcgcctgcgccaacgccttcaacaacagcattatccccgaggacacattcttcccaagccccgagagcagctgcgacgtgaagctggtggaaaagagcttcgagacagacaccaacctgaacttccagaacctgagcgtgatcggcttcagaatcctgctgctgaaagtggccggctttaacctgctgatgaccctgcggctgtggtccagccgcgccaagagaagcggatctggcgtgaagcagaccctgaatttcgacctgctgaagctggctggcgacgtggaatccaacccaggccctactagtatggactggatttggcgcatccttttccttgtcggcgctgctaccggcgcgcattccgggccccagctccagctgcaagagtctggacctggcctggtcaagcctagcgagacactgagcctgacctgtaccgtgtccggcgatagcatcagcagcggcgattactactggggctggatcagacagcctcctggcaaaggactggaatggatcggccacatctactacagcggcgtgacctactacaaccccagcctgaagtccagagtgaccatcagcgtggacaccagccggaaccagttctccctgaagctgtctagcgtgacagccgccgataccgccgtgtactactgcaccagagaggacagcagcaactggcggagtagaggccagggaacactggtcacagttagctctggatccggcggaggcggaagtggaggcggaggatctggcggcggaggctctttcgaagtgcacgaggtccagcttgtgcagtccggggcagaggtcaagaagcctggttctagcgtaaaagtgagttgcaaagcctcaggtgggacattttcatcctacgcgatcagttgggttagacaggctcctggtcaagggctggaatggatgggcggaattattccaatcttcggaacagcgaattacgcgcagaagttccagggtagagtaaccatcactgctgacaagtccacctccaccgcatacatggaattgtctagtctccggagcgaggatacggcggtgtattattgtgctacgttcgccctgtttggcttccgcgaacaggctttcgacatctgggggcagggcacgacagtcacggttagtagtacgcgtgaggacctgaagaacgtgttcccacctgaggtggccgtgttcgagcctagcgaggccgagatcagccacacccagaaagccaccctcgtgtgcctggctaccggcttctaccccgaccatgtggaactgtcttggtgggtcaacggcaaagaggtgcacagcggcgtgtgtaccgacccccagccactgaaagaacagcccgccctgaacgacagccggtactgcctgagcagcagactgagagtgtccgccaccttctggcagaacccccggaaccacttcagatgccaggtgcagttctacggcctgagcgagaacgacgagtggacccaggacagagccaagcccgtgacccagatcgtgtctgccgaagcctggggcagagccgattgcggctttaccagcgagagctaccagcagggcgtgctgagcgccaccatcctgtacgagatcctgctgggcaaggccaccctgtacgccgtgctggtgtctgccctggtgctgatggctatggtcaagcggaaggacagccgggga

SEQ ID NO: 2560 - DNA, 2697 bp, Artificial Sequence
  Synthetic Polynucloetide
atggccttaccagtgaccgccttgctcctgccgctggccttgctgctccacgccgccaggccggaagtgcagctggttgaatctggcggaggactggttcagcctggcggatctctgagactgtcttgtgccgccagcggcttcagcttcagcgacttttggatgagctgggtccgacaggcccctggcaaaggacttgaatgggtcgccacaatcagccaggccggcagcgagaaggactacgtggactctgtgaagggcagattcaccatcagccgggacaacgccaagaagtccctgtacctccagatgaacagcctgagagccgaggacaccgccgtgtactattgtgcctctggcgtgtacagcttcgactacagaggccagggcaccctggtcacagtctcttctggtaccggcggaggcggatctggcggcggaggtagcggtggcggaggatctgaattcgacatcgtgctgacccagagccctctgagcctggccgtgtctctgggacagcctgccatcatcagctgcaaggccagccagagcgtgtcctttgccggcacctctctgatgcactggtatcaccagaagcccggccagcagcccagactgctgatctacagagccagcaacctggaagccggcgtgcccgatagattttccggcagcggcagcaagaccgacttcaccctgaccatcagccccgtggaagccgaagatgccgccacctactactgccagcagagcagagagtacccctacaccttcggcggaggcaccaagctggaaatcaagaggctcgagatccagaaccctgatcctgccgtgtaccagctgcgggatagcaagagcagcgacaagagcgtgtgtctgttcaccgacttcgacagccagaccaacgtgtcccagagcaaggactccgacgtgtacatcaccgataagtgcgtgctggacatgcggagcatggacttcaagagcaactccgccgtggcctggtccaacaagtccgatttcgcctgcgccaacgccttcaacaacagcattatccccgaggacacattcttcccaagccccgagagcagctgcgacgtgaagctggtggaaaagagcttcgagacagacaccaacctgaacttccagaacctgagcgtgatcggcttcagaatcctgctgctgaaagtggccggctttaacctgctgatgaccctgcggctgtggtccagccgcgccaagagaagcggatctggcgtgaagcagaccctgaatttcgacctgctgaagctggctggcgacgtggaatccaacccaggccctactagtatggactggatttggcgcatccttttccttgtcggcgctgctaccggcgcgcattccgggccccagctccagctgcaagagtctggacctggcctggtcaagcctagcgagacactgagcctgacctgtaccgtgtccggcgatagcatcagcagcggcgattactactggggctggatcagacagcctcctggcaaaggactggaatggatcggccacatctactacagcggcgtgacctactacaaccccagcctgaagtccagagtgaccatcagcgtggacaccagccggaaccagttctccctgaagctgtctagcgtgacagccgccgataccgccgtgtactactgcaccagagaggacagcagcaactggcggagtagaggccagggaacactggtcacagttagctctggatccggcggaggcggaagtggaggcggaggatctggcggcggaggctctttcgaacaggtccaactggtgcagagcggagccgaggtcgtgaagcctggcgcttccgtgaagattagctgcaaagccagcggctacacctttaccggctactttatgaactgggtcaagcagagccctggccagagcctggaatggatcggcagaatccacccctacgacggcgacaccttctacaaccagaagttccagggcaaggccaccctgacagtggacaagagcagcaacaccgcccacatggaactgctgagcctgaccagcgaggacttcgccgtgtactactgcaccagatacgacggcagccgggctatggactattggggccagggcaccaccgtgaccgtgtctagtacgcgtgaggacctgaagaacgtgttcccacctgaggtggccgtgttcgagcctagcgaggccgagatcagccacacccagaaagccaccctcgtgtgcctggctaccggcttctaccccgaccatgtggaactgtcttggtgggtcaacggcaaagaggtgcacagcggcgtgtgtaccgacccccagccactgaaagaacagcccgccctgaacgacagccggtactgcctgagcagcagactgagagtgtccgccaccttctggcagaacccccggaaccacttcagatgccaggtgcagttctacggcctgagcgagaacgacgagtggacccaggacagagccaagcccgtgacccagatcgtgtctgccgaagcctggggcagagccgattgcggctttaccagcgagagctaccagcagggcgtgctgagcgccaccatcctgtacgagatcctgctgggcaaggccaccctgtacgccgtgctggtgtctgccctggtgctgatggctatggtcaagcggaaggacagccgggga

SEQ ID NO: 2561 - DNA, 2688 bp, Artificial Sequence
  Synthetic Polynucloetide
atggccttaccagtgaccgccttgctcctgccgctggccttgctgctccacgccgccaggccggaagtgcagctggttgaatctggcggaggactggttcagcctggcggatctctgagactgtcttgtgccgccagcggcttcagcttcagcgacttttggatgagctgggtccgacaggcccctggcaaaggacttgaatgggtcgccacaatcagccaggccggcagcgagaaggactacgtggactctgtgaagggcagattcaccatcagccgggacaacgccaagaagtccctgtacctccagatgaacagcctgagagccgaggacaccgccgtgtactattgtgcctctggcgtgtacagcttcgactacagaggccagggcaccctggtcacagtctcttctggtaccggcggaggcggatctggcggcggaggtagcggtggcggaggatctgaattcgacgacgttgtgatgacccagacccccctgagcctgcctgtgacacctggcgaacctgccagcatcagctgtcggagcagccagagcctggtgcacagaaacggcaacacctacctgcactggtatctccagaagcccggccagagccccaagctgctgatccacaaggtgtccaacagattcagcggcgtgcccgacagattctccggcagcggctctggcaccgacttcaccctgaagatcagccgggtggaagccgaggacctgggcgtgtacttctgtagccagagcacccatgtgccccccctgacatttggagccggcaccaagctggaactgaagctcgagatccagaaccctgatcctgccgtgtaccagctgcgggatagcaagagcagcgacaagagcgtgtgtctgttcaccgacttcgacagccagaccaacgtgtcccagagcaaggactccgacgtgtacatcaccgataagtgcgtgctggacatgcggagcatggacttcaagagcaactccgccgtggcctggtccaacaagtccgatttcgcctgcgccaacgccttcaacaacagcattatccccgaggacacattcttcccaagccccgagagcagctgcgacgtgaagctggtggaaaagagcttcgagacagacaccaacctgaacttccagaacctgagcgtgatcggcttcagaatcctgctgctgaaagtggccggctttaacctgctgatgaccctgcggctgtggtccagccgcgccaagagaagcggatctggcgtgaagcagaccctgaatttcgacctgctgaagctggctggcgacgtggaatccaacccaggccctactagtatggactggatttggcgcatccttttccttgtcggcgctgctaccggcgcgcattccgggccccagctccagctgcaagagtctggacctggcctggtcaagcctagcgagacactgagcctgacctgtaccgtgtccggcgatagcatcagcagcggcgattactactggggctggatcagacagcctcctggcaaaggactggaatggatcggccacatctactacagcggcgtgacctactacaaccccagcctgaagtccagagtgaccatcagcgtggacaccagccggaaccagttctccctgaagctgtctagcgtgacagccgccgataccgccgtgtactactgcaccagagaggacagcagcaactggcggagtagaggccagggaacactggtcacagttagctctggatccggcggaggcggaagtggaggcggaggatctggcggcggaggctctttcgaagaagtgcagctggtgcagtctggcgctgaggtggaaaagcctggggccagcgtgaagattagctgcaaggccagcggcagcagcttcaccggctacaacatgaactgggtgcgccagaacatcggcaagagcctggaatggatcggagccatcgacccctactacggcggcaccagctacaaccagaagttcaagggcagagccaccctgaccgtggacaagagcaccagcaccgcctacatgcacctgaagtccctgcggagcgaggacaccgccgtgtactactgtgtgtccggcatggaatattggggccagggcaccagcgtgaccgtgtctagtacgcgtgaggacctgaagaacgtgttcccacctgaggtggccgtgttcgagcctagcgaggccgagatcagccacacccagaaagccaccctcgtgtgcctggctaccggcttctaccccgaccatgtggaactgtcttggtgggtcaacggcaaagaggtgcacagcggcgtgtgtaccgacccccagccactgaaagaacagcccgccctgaacgacagccggtactgcctgagcagcagactgagagtgtccgccaccttctggcagaacccccggaaccacttcagatgccaggtgcagttctacggcctgagcgagaacgacgagtggacccaggacagagccaagcccgtgacccagatcgtgtctgccgaagcctggggcagagccgattgcggctttaccagcgagagctaccagcagggcgtgctgagcgccaccatcctgtacgagatcctgctgggcaaggccaccctgtacgccgtgctggtgtctgccctggtgctgatggctatggtcaagcggaaggacagccgggga

SEQ ID NO: 2562 - DNA, 2682 bp, Artificial Sequence
  Synthetic Polynucloetide
atggccttaccagtgaccgccttgctcctgccgctggccttgctgctccacgccgccaggccggaagtgcagctggttgaatctggcggaggactggttcagcctggcggatctctgagactgtcttgtgccgccagcggcttcagcttcagcgacttttggatgagctgggtccgacaggcccctggcaaaggacttgaatgggtcgccacaatcagccaggccggcagcgagaaggactacgtggactctgtgaagggcagattcaccatcagccgggacaacgccaagaagtccctgtacctccagatgaacagcctgagagccgaggacaccgccgtgtactattgtgcctctggcgtgtacagcttcgactacagaggccagggcaccctggtcacagtctcttctggtaccggcggaggcggatctggcggcggaggtagcggtggcggaggatctgaattcgacgagatcgtgatgacccagacccctgccaccctgtctgtgtctgccggcgagagagtgaccattacctgcaaggccagccagagcgtgtccaacgacgtgacctggtatcagcagaagcccggccaggcccccagactgctgatctacagcgccagcaacagatacagcggcgtgcccgccagattttccggcagcggctacggcaccgagttcaccttcaccatcagcagcgtgcagagcgaggacttcgccgtgtacttctgtcagcaagactacagcagcttcggccagggcaccaagctggaaatcaagaggctcgagatccagaaccctgatcctgccgtgtaccagctgcgggatagcaagagcagcgacaagagcgtgtgtctgttcaccgacttcgacagccagaccaacgtgtcccagagcaaggactccgacgtgtacatcaccgataagtgcgtgctggacatgcggagcatggacttcaagagcaactccgccgtggcctggtccaacaagtccgatttcgcctgcgccaacgccttcaacaacagcattatccccgaggacacattcttcccaagccccgagagcagctgcgacgtgaagctggtggaaaagagcttcgagacagacaccaacctgaacttccagaacctgagcgtgatcggcttcagaatcctgctgctgaaagtggccggctttaacctgctgatgaccctgcggctgtggtccagccgcgccaagagaagcggatctggcgtgaagcagaccctgaatttcgacctgctgaagctggctggcgacgtggaatccaacccaggccctactagtatggactggatttggcgcatccttttccttgtcggcgctgctaccggcgcgcattccgggccccagctccagctgcaagagtctggacctggcctggtcaagcctagcgagacactgagcctgacctgtaccgtgtccggcgatagcatcagcagcggcgattactactggggctggatcagacagcctcctggcaaaggactggaatggatcggccacatctactacagcggcgtgacctactacaaccccagcctgaagtccagagtgaccatcagcgtggacaccagccggaaccagttctccctgaagctgtctagcgtgacagccgccgataccgccgtgtactactgcaccagagaggacagcagcaactggcggagtagaggccagggaacactggtcacagttagctctggatccggcggaggcggaagtggaggcggaggatctggcggcggaggctctttcgaacaggtgcagctggtggaatctggacctggcgtggtgcagcctggcagaagcctgagaatcagctgtgccgtgtccggcttcagcgtgaccaactacggcgtgcactgggtgcgccagccacctggaaaaggactggaatggctgggcgtgatctgggctggcggcatcaccaactacaacagcgccttcatgtcccggctgaccatctccaaggacaacagcaagaacaccgtgtacctccagatgaacagcctgcgggccgaggacaccgccatgtactactgtgcttccagaggcggccactacggctacgccctggattattggggccagggaaccctcgtgaccgtgtcctctacgcgtgaggacctgaagaacgtgttcccacctgaggtggccgtgttcgagcctagcgaggccgagatcagccacacccagaaagccaccctcgtgtgcctggctaccggcttctaccccgaccatgtggaactgtcttggtgggtcaacggcaaagaggtgcacagcggcgtgtgtaccgacccccagccactgaaagaacagcccgccctgaacgacagccggtactgcctgagcagcagactgagagtgtccgccaccttctggcagaacccccggaaccacttcagatgccaggtgcagttctacggcctgagcgagaacgacgagtggacccaggacagagccaagcccgtgacccagatcgtgtctgccgaagcctggggcagagccgattgcggctttaccagcgagagctaccagcagggcgtgctgagcgccaccatcctgtacgagatcctgctgggcaaggccaccctgtacgccgtgctggtgtctgccctggtgctgatggctatggtcaagcggaaggacagccgggga

SEQ ID NO: 2563 - DNA, 2688 bp, Artificial Sequence
  Synthetic Polynucloetide
atggccttaccagtgaccgccttgctcctgccgctggccttgctgctccacgccgccaggccggaagtgcagctggttgaatctggcggaggactggttcagcctggcggatctctgagactgtcttgtgccgccagcggcttcagcttcagcgacttttggatgagctgggtccgacaggcccctggcaaaggacttgaatgggtcgccacaatcagccaggccggcagcgagaaggactacgtggactctgtgaagggcagattcaccatcagccgggacaacgccaagaagtccctgtacctccagatgaacagcctgagagccgaggacaccgccgtgtactattgtgcctctggcgtgtacagcttcgactacagaggccagggcaccctggtcacagtctcttctggtaccggcggaggcggatctggcggcggaggtagcggtggcggaggatctgaattcgacatccagatgacccagaccgccagcagcctgcctgcctctctgggcgacagagtgaccatctcctgtagcgccagccaggacatcagcaactacctgaactggtatcagcagaaacccgacggcaccgtgaagctgctgatcttctacagcagcaacctgcacagcggcgtgcccagcagattttctggcggcggaagcggcaccgactacagcctgaccatcagcaatctggaacccgaggacattgccacctacttttgccaccagtacagcaagctgccctggacctttggcggaggcaccaagctggaaatcaagagactcgagatccagaaccctgatcctgccgtgtaccagctgcgggatagcaagagcagcgacaagagcgtgtgtctgttcaccgacttcgacagccagaccaacgtgtcccagagcaaggactccgacgtgtacatcaccgataagtgcgtgctggacatgcggagcatggacttcaagagcaactccgccgtggcctggtccaacaagtccgatttcgcctgcgccaacgccttcaacaacagcattatccccgaggacacattcttcccaagccccgagagcagctgcgacgtgaagctggtggaaaagagcttcgagacagacaccaacctgaacttccagaacctgagcgtgatcggcttcagaatcctgctgctgaaagtggccggctttaacctgctgatgaccctgcggctgtggtccagccgcgccaagagaagcggatctggcgtgaagcagaccctgaatttcgacctgctgaagctggctggcgacgtggaatccaacccaggccctactagtatggactggatttggcgcatccttttccttgtcggcgctgctaccggcgcgcattccgggccccagctccagctgcaagagtctggacctggcctggtcaagcctagcgagacactgagcctgacctgtaccgtgtccggcgatagcatcagcagcggcgattactactggggctggatcagacagcctcctggcaaaggactggaatggatcggccacatctactacagcggcgtgacctactacaaccccagcctgaagtccagagtgaccatcagcgtggacaccagccggaaccagttctccctgaagctgtctagcgtgacagccgccgataccgccgtgtactactgcaccagagaggacagcagcaactggcggagtagaggccagggaacactggtcacagttagctctggatccggcggaggcggaagtggaggcggaggatctggcggcggaggctctttcgaagaagtgaccctggtggaaagcggcggagacttcgtgaagcctggcggctctctgaaggtgtcctgtgccgccagcggcttcgcctttagccactacgccatgagctgggtgcgccagacccctgccaagagactggaatgggtggcctacatcagcagcggcggctccggcacctactactccgatagcgtgaagggccggttcaccatcagccgggacaacgccaagaacaccctgtacctccagatgcggagcctgcggagcgaggacagcgccatgtatttctgcaccagagtgaagctgggcacctattacttcgactcttggggccagggcaccaccctgaccgtgtcatctacgcgtgaggacctgaagaacgtgttcccacctgaggtggccgtgttcgagcctagcgaggccgagatcagccacacccagaaagccaccctcgtgtgcctggctaccggcttctaccccgaccatgtggaactgtcttggtgggtcaacggcaaagaggtgcacagcggcgtgtgtaccgacccccagccactgaaagaacagcccgccctgaacgacagccggtactgcctgagcagcagactgagagtgtccgccaccttctggcagaacccccggaaccacttcagatgccaggtgcagttctacggcctgagcgagaacgacgagtggacccaggacagagccaagcccgtgacccagatcgtgtctgccgaagcctggggcagagccgattgcggctttaccagcgagagctaccagcagggcgtgctgagcgccaccatcctgtacgagatcctgctgggcaaggccaccctgtacgccgtgctggtgtctgccctggtgctgatggctatggtcaagcggaaggacagccgggga

SEQ ID NO: 2564 - DNA, 2694 bp, Artificial Sequence
  Synthetic Polynucloetide
atggccttaccagtgaccgccttgctcctgccgctggccttgctgctccacgccgccaggccggaagtgcagctggttgaatctggcggaggactggttcagcctggcggatctctgagactgtcttgtgccgccagcggcttcagcttcagcgacttttggatgagctgggtccgacaggcccctggcaaaggacttgaatgggtcgccacaatcagccaggccggcagcgagaaggactacgtggactctgtgaagggcagattcaccatcagccgggacaacgccaagaagtccctgtacctccagatgaacagcctgagagccgaggacaccgccgtgtactattgtgcctctggcgtgtacagcttcgactacagaggccagggcaccctggtcacagtctcttctggtaccggcggaggcggatctggcggcggaggtagcggtggcggaggatctgaattccagttcgtgctgacccagagcccttctgcctctgctgccctgggagcctctgccaagctgacctgtacactgagcagcgcccacaagacctacaccatcgactggtatcagcagcagaagggaaaggcccccagatacctgatccaagtgaagtccgacggcacctacacaaaggccaccggcgtgcccgatagattcagcggcagtagcagcggagccgatagatacctgattatccccagcgtgcaggccgacgacgaggccgattactactgcggcaccgattacaccggcggctacgtgttcggcggaggcacacaactgaccgtgacactcgagatccagaaccctgatcctgccgtgtaccagctgcgggatagcaagagcagcgacaagagcgtgtgtctgttcaccgacttcgacagccagaccaacgtgtcccagagcaaggactccgacgtgtacatcaccgataagtgcgtgctggacatgcggagcatggacttcaagagcaactccgccgtggcctggtccaacaagtccgatttcgcctgcgccaacgccttcaacaacagcattatccccgaggacacattcttcccaagccccgagagcagctgcgacgtgaagctggtggaaaagagcttcgagacagacaccaacctgaacttccagaacctgagcgtgatcggcttcagaatcctgctgctgaaagtggccggctttaacctgctgatgaccctgcggctgtggtccagccgcgccaagagaagcggatctggcgtgaagcagaccctgaatttcgacctgctgaagctggctggcgacgtggaatccaacccaggccctactagtatggactggatttggcgcatccttttccttgtcggcgctgctaccggcgcgcattccgggccccagctccagctgcaagagtctggacctggcctggtcaagcctagcgagacactgagcctgacctgtaccgtgtccggcgatagcatcagcagcggcgattactactggggctggatcagacagcctcctggcaaaggactggaatggatcggccacatctactacagcggcgtgacctactacaaccccagcctgaagtccagagtgaccatcagcgtggacaccagccggaaccagttctccctgaagctgtctagcgtgacagccgccgataccgccgtgtactactgcaccagagaggacagcagcaactggcggagtagaggccagggaacactggtcacagttagctctggatccggcggaggcggaagtggaggcggaggatctggcggcggaggctctttcgaagagcaactgaaagagtctggcggcggactgttcaagcccaccgataccctgaccctgacctgcaccgtgtccggcttcagcctgagctactacggcgtgaactgggtgcgccaggcccctggcaatggcctggaatggatcggcacaatcggcggcagcggcgacacctactatgcctcttgggccaagtccagaagcaccatcatcagaaacaccaacgagaacaccgtgaccctgaagatgaccagcctgacagccgccgacaccgccacctacttttgcgtcagatacgccaacatcggctacgagtatttcaacgtgtggggacccggcaccctcgtgaccgtgtcatctacgcgtgaggacctgaagaacgtgttcccacctgaggtggccgtgttcgagcctagcgaggccgagatcagccacacccagaaagccaccctcgtgtgcctggctaccggcttctaccccgaccatgtggaactgtcttggtgggtcaacggcaaagaggtgcacagcggcgtgtgtaccgacccccagccactgaaagaacagcccgccctgaacgacagccggtactgcctgagcagcagactgagagtgtccgccaccttctggcagaacccccggaaccacttcagatgccaggtgcagttctacggcctgagcgagaacgacgagtggacccaggacagagccaagcccgtgacccagatcgtgtctgccgaagcctggggcagagccgattgcggctttaccagcgagagctaccagcagggcgtgctgagcgccaccatcctgtacgagatcctgctgggcaaggccaccctgtacgccgtgctggtgtctgccctggtgctgatggctatggtcaagcggaaggacagccgggga

SEQ ID NO: 2565 - DNA, 2709 bp, Artificial Sequence
  Synthetic Polynucloetide
atggccttaccagtgaccgccttgctcctgccgctggccttgctgctccacgccgccaggccggaagtgcagctggttgaatctggcggaggactggttcagcctggcggatctctgagactgtcttgtgccgccagcggcttcagcttcagcgacttttggatgagctgggtccgacaggcccctggcaaaggacttgaatgggtcgccacaatcagccaggccggcagcgagaaggactacgtggactctgtgaagggcagattcaccatcagccgggacaacgccaagaagtccctgtacctccagatgaacagcctgagagccgaggacaccgccgtgtactattgtgcctctggcgtgtacagcttcgactacagaggccagggcaccctggtcacagtctcttctggtaccggcggaggcggatctggcggcggaggtagcggtggcggaggatctgaattccagttcgtgctgacccagagcccttctgtgtctgccgccctgggagcctctgccaagctgacctgtacactgagcagcgcccacaagacctacaccatcgactggtatcagcagcagcagggcgaggcccccagatacctgatgcaagtgaagtccgacggcagctacaccaagggcaccggcgtgcccgatagattcagcggcagtagcagcggagccgatagatacctgattatccccagcgtgcaggccgacgacgaggccggatatgtgtgcggcgctgacgacaatggcggctacgtgttcggcggaggcacccaactgacagtgacactcgagatccagaaccctgatcctgccgtgtaccagctgcgggatagcaagagcagcgacaagagcgtgtgtctgttcaccgacttcgacagccagaccaacgtgtcccagagcaaggactccgacgtgtacatcaccgataagtgcgtgctggacatgcggagcatggacttcaagagcaactccgccgtggcctggtccaacaagtccgatttcgcctgcgccaacgccttcaacaacagcattatccccgaggacacattcttcccaagccccgagagcagctgcgacgtgaagctggtggaaaagagcttcgagacagacaccaacctgaacttccagaacctgagcgtgatcggcttcagaatcctgctgctgaaagtggccggctttaacctgctgatgaccctgcggctgtggtccagccgcgccaagagaagcggatctggcgtgaagcagaccctgaatttcgacctgctgaagctggctggcgacgtggaatccaacccaggccctactagtatggactggatttggcgcatccttttccttgtcggcgctgctaccggcgcgcattccgggccccagctccagctgcaagagtctggacctggcctggtcaagcctagcgagacactgagcctgacctgtaccgtgtccggcgatagcatcagcagcggcgattactactggggctggatcagacagcctcctggcaaaggactggaatggatcggccacatctactacagcggcgtgacctactacaaccccagcctgaagtccagagtgaccatcagcgtggacaccagccggaaccagttctccctgaagctgtctagcgtgacagccgccgataccgccgtgtactactgcaccagagaggacagcagcaactggcggagtagaggccagggaacactggtcacagttagctctggatccggcggaggcggaagtggaggcggaggatctggcggcggaggctctttcgaacagagcgtgaaagagtctgagggcggcctgttcaagcccaccgataccctgaccctgacctgcaccgtgtccggcttcagcctgagcagacacgccctgacatgggtgcgccaggcccctggaaatggcctggaatggatcggagccatcgacaacgccggcaccacctactatgcctcttgggccaagtccagaagcaccatcacccggaacaccgacctgcacaccgtgaccctgaagatgaccagcctgaccgccagcgacaccgccacctacttttgcgccagagtgttctacgacatcaacagcggctactacctggacggcatggacctgtggggacctggcacacttgtgaccgtgtccagcacgcgtgaggacctgaagaacgtgttcccacctgaggtggccgtgttcgagcctagcgaggccgagatcagccacacccagaaagccaccctcgtgtgcctggctaccggcttctaccccgaccatgtggaactgtcttggtgggtcaacggcaaagaggtgcacagcggcgtgtgtaccgacccccagccactgaaagaacagcccgccctgaacgacagccggtactgcctgagcagcagactgagagtgtccgccaccttctggcagaacccccggaaccacttcagatgccaggtgcagttctacggcctgagcgagaacgacgagtggacccaggacagagccaagcccgtgacccagatcgtgtctgccgaagcctggggcagagccgattgcggctttaccagcgagagctaccagcagggcgtgctgagcgccaccatcctgtacgagatcctgctgggcaaggccaccctgtacgccgtgctggtgtctgccctggtgctgatggctatggtcaagcggaaggacagccgggga

SEQ ID NO: 2566 - DNA, 2691 bp, Artificial Sequence
  Synthetic Polynucloetide
atggccttaccagtgaccgccttgctcctgccgctggccttgctgctccacgccgccaggccggaagtgcagctggttgaatctggcggaggactggttcagcctggcggatctctgagactgtcttgtgccgccagcggcttcagcttcagcgacttttggatgagctgggtccgacaggcccctggcaaaggacttgaatgggtcgccacaatcagccaggccggcagcgagaaggactacgtggactctgtgaagggcagattcaccatcagccgggacaacgccaagaagtccctgtacctccagatgaacagcctgagagccgaggacaccgccgtgtactattgtgcctctggcgtgtacagcttcgactacagaggccagggcaccctggtcacagtctcttctggtaccggcggaggcggatctggcggcggaggtagcggtggcggaggatctgaattcgacatccagatgacccagagccccagcagcctgtctgccagcgtgggcgacagagtgaccatcacctgtagagccagccagggcatcagctcttggctggcctggtatcagcagaagcccgagaaggcccccaagagcctgatctacgccgcctctagtctccagagcggcgtgcccagcagattttctggcagcggctccggcaccgacttcaccctgacaatcagctccctccagcccgaggacttcgccacctactactgccagcagtacaacagctacccccccacctttggcggaggcaccaaggtggaaatcaagctcgagatccagaaccctgatcctgccgtgtaccagctgcgggatagcaagagcagcgacaagagcgtgtgtctgttcaccgacttcgacagccagaccaacgtgtcccagagcaaggactccgacgtgtacatcaccgataagtgcgtgctggacatgcggagcatggacttcaagagcaactccgccgtggcctggtccaacaagtccgatttcgcctgcgccaacgccttcaacaacagcattatccccgaggacacattcttcccaagccccgagagcagctgcgacgtgaagctggtggaaaagagcttcgagacagacaccaacctgaacttccagaacctgagcgtgatcggcttcagaatcctgctgctgaaagtggccggctttaacctgctgatgaccctgcggctgtggtccagccgcgccaagagaagcggatctggcgtgaagcagaccctgaatttcgacctgctgaagctggctggcgacgtggaatccaacccaggccctactagtatggactggatttggcgcatccttttccttgtcggcgctgctaccggcgcgcattccgggccccagctccagctgcaagagtctggacctggcctggtcaagcctagcgagacactgagcctgacctgtaccgtgtccggcgatagcatcagcagcggcgattactactggggctggatcagacagcctcctggcaaaggactggaatggatcggccacatctactacagcggcgtgacctactacaaccccagcctgaagtccagagtgaccatcagcgtggacaccagccggaaccagttctccctgaagctgtctagcgtgacagccgccgataccgccgtgtactactgcaccagagaggacagcagcaactggcggagtagaggccagggaacactggtcacagttagctctggatccggcggaggcggaagtggaggcggaggatctggcggcggaggctctttcgaagaagtgcaactggtggaatcaggcggcggactggtgcagcctggcgagtctctgagactgagctgtgtggcctccggcttcaccttcagccggtacaagatgaactgggtgcgccaggcccctggcaagggactggaatgggtgtcctacatcagccgcagcggcagagacatctactacgccgacagcgtgaagggccggttcaccatcagcagagacaacgccaagaacagcctgtacctccagatgaactccctgcgggacgaggacaccgccgtgtactactgtgccggaaccgtgaccacctattactacttcggcatggacgtgtggggccacggcaccaccgtgacagtgtcatctacgcgtgaggacctgaagaacgtgttcccacctgaggtggccgtgttcgagcctagcgaggccgagatcagccacacccagaaagccaccctcgtgtgcctggctaccggcttctaccccgaccatgtggaactgtcttggtgggtcaacggcaaagaggtgcacagcggcgtgtgtaccgacccccagccactgaaagaacagcccgccctgaacgacagccggtactgcctgagcagcagactgagagtgtccgccaccttctggcagaacccccggaaccacttcagatgccaggtgcagttctacggcctgagcgagaacgacgagtggacccaggacagagccaagcccgtgacccagatcgtgtctgccgaagcctggggcagagccgattgcggctttaccagcgagagctaccagcagggcgtgctgagcgccaccatcctgtacgagatcctgctgggcaaggccaccctgtacgccgtgctggtgtctgccctggtgctgatggctatggtcaagcggaaggacagccgggga

SEQ ID NO: 2567 - DNA, 2694 bp, Artificial Sequence
  Synthetic Polynucloetide
atggccttaccagtgaccgccttgctcctgccgctggccttgctgctccacgccgccaggccggaagtgcagctggttgaatctggcggaggactggttcagcctggcggatctctgagactgtcttgtgccgccagcggcttcagcttcagcgacttttggatgagctgggtccgacaggcccctggcaaaggacttgaatgggtcgccacaatcagccaggccggcagcgagaaggactacgtggactctgtgaagggcagattcaccatcagccgggacaacgccaagaagtccctgtacctccagatgaacagcctgagagccgaggacaccgccgtgtactattgtgcctctggcgtgtacagcttcgactacagaggccagggcaccctggtcacagtctcttctggtaccggcggaggcggatctggcggcggaggtagcggtggcggaggatctgaattcgacatccagatgacccagagccccagcagcctgtctgccagcgtgggcgacagagtgaccatcacctgtagagccagccagggcatcagctcttggctggcctggtatcagcagaagcccgagaaggcccccaagagcctgatctacgccgcctctagtctccagagcggcgtgcccagcagattttctggcagcggctccggcaccgacttcaccctgacaatcagctccctccagcccgaggacttcgccacctactactgccagcagtacaacagctaccctcccacctttggcggaggcaccaaggtggaaatcaagctcgagatccagaaccctgatcctgccgtgtaccagctgcgggatagcaagagcagcgacaagagcgtgtgtctgttcaccgacttcgacagccagaccaacgtgtcccagagcaaggactccgacgtgtacatcaccgataagtgcgtgctggacatgcggagcatggacttcaagagcaactccgccgtggcctggtccaacaagtccgatttcgcctgcgccaacgccttcaacaacagcattatccccgaggacacattcttcccaagccccgagagcagctgcgacgtgaagctggtggaaaagagcttcgagacagacaccaacctgaacttccagaacctgagcgtgatcggcttcagaatcctgctgctgaaagtggccggctttaacctgctgatgaccctgcggctgtggtccagccgcgccaagagaagcggatctggcgtgaagcagaccctgaatttcgacctgctgaagctggctggcgacgtggaatccaacccaggccctactagtatggactggatttggcgcatccttttccttgtcggcgctgctaccggcgcgcattccgggccccagctccagctgcaagagtctggacctggcctggtcaagcctagcgagacactgagcctgacctgtaccgtgtccggcgatagcatcagcagcggcgattactactggggctggatcagacagcctcctggcaaaggactggaatggatcggccacatctactacagcggcgtgacctactacaaccccagcctgaagtccagagtgaccatcagcgtggacaccagccggaaccagttctccctgaagctgtctagcgtgacagccgccgataccgccgtgtactactgcaccagagaggacagcagcaactggcggagtagaggccagggaacactggtcacagttagctctggatccggcggaggcggaagtggaggcggaggatctggcggcggaggctctttcgaagaagtgcaactggtggaatccgggggaggctctgtgcagcctggcgagtctctgagactgagctgtgtggcctccggcttcaccttcagccggtacaagatgaactgggtgcgccaggcccctggcaagggactggaatgggtgtcctacatcagccgcagcggcagagacatctactacgccgacagcgtgaagggccggttcaccatcagcagagacaacgccaagaacagcctgtacctccagatgaactccctgcgggacgaggacaccgccgtgtactactgtgccggaaccgtgaccacctattactacgacttcggcatggacgtgtggggccagggcacaaccgtgacagtgtctagcacgcgtgaggacctgaagaacgtgttcccacctgaggtggccgtgttcgagcctagcgaggccgagatcagccacacccagaaagccaccctcgtgtgcctggctaccggcttctaccccgaccatgtggaactgtcttggtgggtcaacggcaaagaggtgcacagcggcgtgtgtaccgacccccagccactgaaagaacagcccgccctgaacgacagccggtactgcctgagcagcagactgagagtgtccgccaccttctggcagaacccccggaaccacttcagatgccaggtgcagttctacggcctgagcgagaacgacgagtggacccaggacagagccaagcccgtgacccagatcgtgtctgccgaagcctggggcagagccgattgcggctttaccagcgagagctaccagcagggcgtgctgagcgccaccatcctgtacgagatcctgctgggcaaggccaccctgtacgccgtgctggtgtctgccctggtgctgatggctatggtcaagcggaaggacagccgggga

SEQ ID NO: 2568 - DNA, 2688 bp, Artificial Sequence
  Synthetic Polynucloetide
atggccttaccagtgaccgccttgctcctgccgctggccttgctgctccacgccgccaggccggaagtgcagctggttgaatctggcggaggactggttcagcctggcggatctctgagactgtcttgtgccgccagcggcttcagcttcagcgacttttggatgagctgggtccgacaggcccctggcaaaggacttgaatgggtcgccacaatcagccaggccggcagcgagaaggactacgtggactctgtgaagggcagattcaccatcagccgggacaacgccaagaagtccctgtacctccagatgaacagcctgagagccgaggacaccgccgtgtactattgtgcctctggcgtgtacagcttcgactacagaggccagggcaccctggtcacagtctcttctggtaccggcggaggcggatctggcggcggaggtagcggtggcggaggatctgaattccagtctgtgctgacacagcctccatctgcctctggcacacctggacagagagtgaccatcagctgtagcggcagcagaagcaacgtcggcggcaactacgtgttctggtatcagcaggtcccaggcgctacccctaagctgctgatctacagaagcaatcagcggcctagcggcgtgcccgatagatttgccggaagcaagagcggcagctctgccagccttgccatctctggactgagaagcgaggacgaggccgactactactgtgccacctgggatgatagcctgagcggcttcgtgtttggcaccggcaccaaagtgacagtgcttggtctcgagatccagaaccctgatcctgccgtgtaccagctgcgggatagcaagagcagcgacaagagcgtgtgtctgttcaccgacttcgacagccagaccaacgtgtcccagagcaaggactccgacgtgtacatcaccgataagtgcgtgctggacatgcggagcatggacttcaagagcaactccgccgtggcctggtccaacaagtccgatttcgcctgcgccaacgccttcaacaacagcattatccccgaggacacattcttcccaagccccgagagcagctgcgacgtgaagctggtggaaaagagcttcgagacagacaccaacctgaacttccagaacctgagcgtgatcggcttcagaatcctgctgctgaaagtggccggctttaacctgctgatgaccctgcggctgtggtccagccgcgccaagagaagcggatctggcgtgaagcagaccctgaatttcgacctgctgaagctggctggcgacgtggaatccaacccaggccctactagtatggactggatttggcgcatccttttccttgtcggcgctgctaccggcgcgcattccgggccccagctccagctgcaagagtctggacctggcctggtcaagcctagcgagacactgagcctgacctgtaccgtgtccggcgatagcatcagcagcggcgattactactggggctggatcagacagcctcctggcaaaggactggaatggatcggccacatctactacagcggcgtgacctactacaaccccagcctgaagtccagagtgaccatcagcgtggacaccagccggaaccagttctccctgaagctgtctagcgtgacagccgccgataccgccgtgtactactgcaccagagaggacagcagcaactggcggagtagaggccagggaacactggtcacagttagctctggatccggcggaggcggaagtggaggcggaggatctggcggcggaggctctttcgaagttcagctggttgaatctggcggcggactggttaagcctggcggatctctgagactgtcttgtgccgccagcggcttcaccttcagcgattactacatgagctggatcagacaggcccctggcaaaggactggaatgggtgtcctacatcagcagcagcggctccaccatctactacgccgatagcgtgaagggcagattcaccatcagccgggacaacgccaagaacagcctgtacctccagatgaactccctgagagccgaggacaccgccgtgtactattgcgccagaggctacggcaaagcctacgatcaatggggccagggcacactggtcaccgtttcttctacgcgtgaggacctgaagaacgtgttcccacctgaggtggccgtgttcgagcctagcgaggccgagatcagccacacccagaaagccaccctcgtgtgcctggctaccggcttctaccccgaccatgtggaactgtcttggtgggtcaacggcaaagaggtgcacagcggcgtgtgtaccgacccccagccactgaaagaacagcccgccctgaacgacagccggtactgcctgagcagcagactgagagtgtccgccaccttctggcagaacccccggaaccacttcagatgccaggtgcagttctacggcctgagcgagaacgacgagtggacccaggacagagccaagcccgtgacccagatcgtgtctgccgaagcctggggcagagccgattgcggctttaccagcgagagctaccagcagggcgtgctgagcgccaccatcctgtacgagatcctgctgggcaaggccaccctgtacgccgtgctggtgtctgccctggtgctgatggctatggtcaagcggaaggacagccgggga

SEQ ID NO: 2569 - DNA, 2685 bp, Artificial Sequence
  Synthetic Polynucloetide
atggccttaccagtgaccgccttgctcctgccgctggccttgctgctccacgccgccaggccggaagtgcagctggttgaatctggcggaggactggttcagcctggcggatctctgagactgtcttgtgccgccagcggcttcagcttcagcgacttttggatgagctgggtccgacaggcccctggcaaaggacttgaatgggtcgccacaatcagccaggccggcagcgagaaggactacgtggactctgtgaagggcagattcaccatcagccgggacaacgccaagaagtccctgtacctccagatgaacagcctgagagccgaggacaccgccgtgtactattgtgcctctggcgtgtacagcttcgactacagaggccagggcaccctggtcacagtctcttctggtaccggcggaggcggatctggcggcggaggtagcggtggcggaggatctgaattccagtctgtggtcacacagccacctagcatgtctgccgctccaggccagcaagtgaccatctcttgtagcggcggcaacagcaacatcgagcggaactacgtgtcctggtatctgcaactgcctggcacagcccctaagctggtcatcttcgacaacgacagacggcccagcggcatccccgatagattttctggcagcaagagcggcaccagcgccacactgggaattaccggacttcagacaggcgacgaggccgactactactgtggcacatgggactctagcctgagaggctgggttttcggcggaggcacaaagctgacagtgcttggtctcgagatccagaaccctgatcctgccgtgtaccagctgcgggatagcaagagcagcgacaagagcgtgtgtctgttcaccgacttcgacagccagaccaacgtgtcccagagcaaggactccgacgtgtacatcaccgataagtgcgtgctggacatgcggagcatggacttcaagagcaactccgccgtggcctggtccaacaagtccgatttcgcctgcgccaacgccttcaacaacagcattatccccgaggacacattcttcccaagccccgagagcagctgcgacgtgaagctggtggaaaagagcttcgagacagacaccaacctgaacttccagaacctgagcgtgatcggcttcagaatcctgctgctgaaagtggccggctttaacctgctgatgaccctgcggctgtggtccagccgcgccaagagaagcggatctggcgtgaagcagaccctgaatttcgacctgctgaagctggctggcgacgtggaatccaacccaggccctactagtatggactggatttggcgcatccttttccttgtcggcgctgctaccggcgcgcattccgggccccagctccagctgcaagagtctggacctggcctggtcaagcctagcgagacactgagcctgacctgtaccgtgtccggcgatagcatcagcagcggcgattactactggggctggatcagacagcctcctggcaaaggactggaatggatcggccacatctactacagcggcgtgacctactacaaccccagcctgaagtccagagtgaccatcagcgtggacaccagccggaaccagttctccctgaagctgtctagcgtgacagccgccgataccgccgtgtactactgcaccagagaggacagcagcaactggcggagtagaggccagggaacactggtcacagttagctctggatccggcggaggcggaagtggaggcggaggatctggcggcggaggctctttcgaagtgcagctcgttgagtctggcggcggactgattcaacctggcggaagcctgagactgagctgtgccgcttccggcttcaccttcagcaactacgccatgaactgggttcgacaggcccctggcaaaggactggaatgggtgtccaccatcaacggcagaggcagcagcaccatctacgccgattctgtgaagggcagattcaccatcagccgggacaacagcaagaacaccctgtacctccagatgaactccctgagagccgaggacaccgccacctattactgtgcccggtacatcagcagaggactgggcgattcttggggccagggcacactggttacagtgacgcgtgaggacctgaagaacgtgttcccacctgaggtggccgtgttcgagcctagcgaggccgagatcagccacacccagaaagccaccctcgtgtgcctggctaccggcttctaccccgaccatgtggaactgtcttggtgggtcaacggcaaagaggtgcacagcggcgtgtgtaccgacccccagccactgaaagaacagcccgccctgaacgacagccggtactgcctgagcagcagactgagagtgtccgccaccttctggcagaacccccggaaccacttcagatgccaggtgcagttctacggcctgagcgagaacgacgagtggacccaggacagagccaagcccgtgacccagatcgtgtctgccgaagcctggggcagagccgattgcggctttaccagcgagagctaccagcagggcgtgctgagcgccaccatcctgtacgagatcctgctgggcaaggccaccctgtacgccgtgctggtgtctgccctggtgctgatggctatggtcaagcggaaggacagccgggga

SEQ ID NO: 2570 - DNA, 2688 bp, Artificial Sequence
  Synthetic Polynucloetide
atggccttaccagtgaccgccttgctcctgccgctggccttgctgctccacgccgccaggccggaagtgcagctggttgaatctggcggaggactggttcagcctggcggatctctgagactgtcttgtgccgccagcggcttcagcttcagcgacttttggatgagctgggtccgacaggcccctggcaaaggacttgaatgggtcgccacaatcagccaggccggcagcgagaaggactacgtggactctgtgaagggcagattcaccatcagccgggacaacgccaagaagtccctgtacctccagatgaacagcctgagagccgaggacaccgccgtgtactattgtgcctctggcgtgtacagcttcgactacagaggccagggcaccctggtcacagtctcttctggtaccggcggaggcggatctggcggcggaggtagcggtggcggaggatctgaattcgacgtcgtgatgacccagacccctctgagcctgcctgtgtccctgggcgatcaggccagcatcagctgtagaagcagccagagcctggtgcacagcaacggcaacacctacctgcactggtatctccagaagcccggccagagccccaagctgctgatctacaaggtgtccaacagattcagcggcgtgcccgacagattctccggcagcggctctggcaccgacttcaccctgaagatcagccgggtggaagccgaggacctgggcgtgtacttctgtagccagaacacccccgtgccccccaagtttggcagcggcaccaagctggaaatcaagctcgagatccagaaccctgatcctgccgtgtaccagctgcgggatagcaagagcagcgacaagagcgtgtgtctgttcaccgacttcgacagccagaccaacgtgtcccagagcaaggactccgacgtgtacatcaccgataagtgcgtgctggacatgcggagcatggacttcaagagcaactccgccgtggcctggtccaacaagtccgatttcgcctgcgccaacgccttcaacaacagcattatccccgaggacacattcttcccaagccccgagagcagctgcgacgtgaagctggtggaaaagagcttcgagacagacaccaacctgaacttccagaacctgagcgtgatcggcttcagaatcctgctgctgaaagtggccggctttaacctgctgatgaccctgcggctgtggtccagccgcgccaagagaagcggatctggcgtgaagcagaccctgaatttcgacctgctgaagctggctggcgacgtggaatccaacccaggccctactagtatggactggatttggcgcatccttttccttgtcggcgctgctaccggcgcgcattccgggccccagctccagctgcaagagtctggacctggcctggtcaagcctagcgagacactgagcctgacctgtaccgtgtccggcgatagcatcagcagcggcgattactactggggctggatcagacagcctcctggcaaaggactggaatggatcggccacatctactacagcggcgtgacctactacaaccccagcctgaagtccagagtgaccatcagcgtggacaccagccggaaccagttctccctgaagctgtctagcgtgacagccgccgataccgccgtgtactactgcaccagagaggacagcagcaactggcggagtagaggccagggaacactggtcacagttagctctggatccggcggaggcggaagtggaggcggaggatctggcggcggaggctctttcgaacaggtgcagctccagcagtctggcgctgaactcgtgcggcctggcgcttctgtgaagctgtcttgcaaggccagcggctacaccttcaacgactacgagatgcactgggtcaagcagacccctgtgcacggcctgaagtggatcggagccctggaacccaagaccggcgataccgcctacagccagaagttcaagggcaaggccaccctgaccgccgacaagagcagcagcacagcctacatggaactgcggagcctgaccagcgaggacagcgccgtgtactactgcaccagctgctactactacacctacagcggccagggcaccctcgtgacagtgtctgctacgcgtgaggacctgaagaacgtgttcccacctgaggtggccgtgttcgagcctagcgaggccgagatcagccacacccagaaagccaccctcgtgtgcctggctaccggcttctaccccgaccatgtggaactgtcttggtgggtcaacggcaaagaggtgcacagcggcgtgtgtaccgacccccagccactgaaagaacagcccgccctgaacgacagccggtactgcctgagcagcagactgagagtgtccgccaccttctggcagaacccccggaaccacttcagatgccaggtgcagttctacggcctgagcgagaacgacgagtggacccaggacagagccaagcccgtgacccagatcgtgtctgccgaagcctggggcagagccgattgcggctttaccagcgagagctaccagcagggcgtgctgagcgccaccatcctgtacgagatcctgctgggcaaggccaccctgtacgccgtgctggtgtctgccctggtgctgatggctatggtcaagcggaaggacagccgggga

SEQ ID NO: 2571 - DNA, 2685 bp, Artificial Sequence
  Synthetic Polynucloetide
atggccttaccagtgaccgccttgctcctgccgctggccttgctgctccacgccgccaggccggaagtgcagctggttgaatctggcggaggactggttcagcctggcggatctctgagactgtcttgtgccgccagcggcttcagcttcagcgacttttggatgagctgggtccgacaggcccctggcaaaggacttgaatgggtcgccacaatcagccaggccggcagcgagaaggactacgtggactctgtgaagggcagattcaccatcagccgggacaacgccaagaagtccctgtacctccagatgaacagcctgagagccgaggacaccgccgtgtactattgtgcctctggcgtgtacagcttcgactacagaggccagggcaccctggtcacagtctcttctggtaccggcggaggcggatctggcggcggaggtagcggtggcggaggatctgaattcgacatccaactgacccagagccccagcagcctgtctgcctctgtgggcgacagagtgaccatcacctgtagagccagccagggcatcagaaacgacctgggctggtatcagcagaagcccggcaaggcccccaagcggctgatctatgctgccagctccctccagaatggcgtgcccagcagattttccggcagcggctctggcaccgagttcaccctgaccatcagctccctccagcccgaggacttcgccacctactactgcctccagcacaacacctaccccgccttcggccagggcaccaaggtggaaatcaagagactcgagatccagaaccctgatcctgccgtgtaccagctgcgggatagcaagagcagcgacaagagcgtgtgtctgttcaccgacttcgacagccagaccaacgtgtcccagagcaaggactccgacgtgtacatcaccgataagtgcgtgctggacatgcggagcatggacttcaagagcaactccgccgtggcctggtccaacaagtccgatttcgcctgcgccaacgccttcaacaacagcattatccccgaggacacattcttcccaagccccgagagcagctgcgacgtgaagctggtggaaaagagcttcgagacagacaccaacctgaacttccagaacctgagcgtgatcggcttcagaatcctgctgctgaaagtggccggctttaacctgctgatgaccctgcggctgtggtccagccgcgccaagagaagcggatctggcgtgaagcagaccctgaatttcgacctgctgaagctggctggcgacgtggaatccaacccaggccctactagtatggactggatttggcgcatccttttccttgtcggcgctgctaccggcgcgcattccgggccccagctccagctgcaagagtctggacctggcctggtcaagcctagcgagacactgagcctgacctgtaccgtgtccggcgatagcatcagcagcggcgattactactggggctggatcagacagcctcctggcaaaggactggaatggatcggccacatctactacagcggcgtgacctactacaaccccagcctgaagtccagagtgaccatcagcgtggacaccagccggaaccagttctccctgaagctgtctagcgtgacagccgccgataccgccgtgtactactgcaccagagaggacagcagcaactggcggagtagaggccagggaacactggtcacagttagctctggatccggcggaggcggaagtggaggcggaggatctggcggcggaggctctttcgaacaggtgcaactccaggaatctggccctggcctcgtgaagcctagccagaccctgagcctgacctgtaccgtgtctggcggcagcatcagcagcttcaactactactggtcctggatcagacaccaccctggcaagggcctggaatggatcggctacatctactacagcggcagcacctacagcaaccccagcctgaagtcccgcgtgaccatctccgtggacaccagcaagaaccagtttagcctgaccctgtccagcgtgacagccgccgataccgccgtgtactactgcgccagaggctacaactggaactacttcgactactggggccagggaaccctcgtgaccgtgtctagtacgcgtgaggacctgaagaacgtgttcccacctgaggtggccgtgttcgagcctagcgaggccgagatcagccacacccagaaagccaccctcgtgtgcctggctaccggcttctaccccgaccatgtggaactgtcttggtgggtcaacggcaaagaggtgcacagcggcgtgtgtaccgacccccagccactgaaagaacagcccgccctgaacgacagccggtactgcctgagcagcagactgagagtgtccgccaccttctggcagaacccccggaaccacttcagatgccaggtgcagttctacggcctgagcgagaacgacgagtggacccaggacagagccaagcccgtgacccagatcgtgtctgccgaagcctggggcagagccgattgcggctttaccagcgagagctaccagcagggcgtgctgagcgccaccatcctgtacgagatcctgctgggcaaggccaccctgtacgccgtgctggtgtctgccctggtgctgatggctatggtcaagcggaaggacagccgggga

SEQ ID NO: 2572 - DNA, 2691 bp, Artificial Sequence
  Synthetic Polynucloetide
atggccttaccagtgaccgccttgctcctgccgctggccttgctgctccacgccgccaggccggaagtgcagctggttgaatctggcggaggactggttcagcctggcggatctctgagactgtcttgtgccgccagcggcttcagcttcagcgacttttggatgagctgggtccgacaggcccctggcaaaggacttgaatgggtcgccacaatcagccaggccggcagcgagaaggactacgtggactctgtgaagggcagattcaccatcagccgggacaacgccaagaagtccctgtacctccagatgaacagcctgagagccgaggacaccgccgtgtactattgtgcctctggcgtgtacagcttcgactacagaggccagggcaccctggtcacagtctcttctggtaccggcggaggcggatctggcggcggaggtagcggtggcggaggatctgaattcgacgacatcgtgctgacccagagccccgccagcctggccgtgagcctgggccagagcgtgaccatcagctgcagagccagcgagagcgtggagtactacggcaccagcctgatgcagtggtaccagcagaagcccggccagccccccaagctgctgatctacgccaccagcaacgtggagagcggcgtgcccgccagattcagcggcagcggcagcggcaccgacttcagcctgaacatccaccccgtggaggaggacgacatcgccatgtacttctgccagcagagcagaaagctgcccagcaccttcggcggcggcaccaagctggagatcaagctcgagatccagaaccctgatcctgccgtgtaccagctgcgggatagcaagagcagcgacaagagcgtgtgtctgttcaccgacttcgacagccagaccaacgtgtcccagagcaaggactccgacgtgtacatcaccgataagtgcgtgctggacatgcggagcatggacttcaagagcaactccgccgtggcctggtccaacaagtccgatttcgcctgcgccaacgccttcaacaacagcattatccccgaggacacattcttcccaagccccgagagcagctgcgacgtgaagctggtggaaaagagcttcgagacagacaccaacctgaacttccagaacctgagcgtgatcggcttcagaatcctgctgctgaaagtggccggctttaacctgctgatgaccctgcggctgtggtccagccgcgccaagagaagcggatctggcgtgaagcagaccctgaatttcgacctgctgaagctggctggcgacgtggaatccaacccaggccctactagtatggactggatttggcgcatccttttccttgtcggcgctgctaccggcgcgcattccgggccccagctccagctgcaagagtctggacctggcctggtcaagcctagcgagacactgagcctgacctgtaccgtgtccggcgatagcatcagcagcggcgattactactggggctggatcagacagcctcctggcaaaggactggaatggatcggccacatctactacagcggcgtgacctactacaaccccagcctgaagtccagagtgaccatcagcgtggacaccagccggaaccagttctccctgaagctgtctagcgtgacagccgccgataccgccgtgtactactgcaccagagaggacagcagcaactggcggagtagaggccagggaacactggtcacagttagctctggatccggcggaggcggaagtggaggcggaggatctggcggcggaggctctttcgaagacgtgagactgcaggagagcggccccggccaggtgaagcccagccagaccgtgagcctgacctgcagcgtgaccggctacagcatcaccaacggcaaccactggtggaactggatcagacaggtgagcggcagcaagctggagtggatcggctacatcagcagcagcggcagcaccgacagcaaccccagcctgaagagcagaatcagcatcaccagagacaccagcaagaaccagctgttcctgcagctgaacagcgtgaccaccgaggacatcgccacctactactgcgccagaggctactacttcgactactggggccagggcaccaccctgaccgtgagcagcacgcgtgaggacctgaagaacgtgttcccacctgaggtggccgtgttcgagcctagcgaggccgagatcagccacacccagaaagccaccctcgtgtgcctggctaccggcttctaccccgaccatgtggaactgtcttggtgggtcaacggcaaagaggtgcacagcggcgtgtgtaccgacccccagccactgaaagaacagcccgccctgaacgacagccggtactgcctgagcagcagactgagagtgtccgccaccttctggcagaacccccggaaccacttcagatgccaggtgcagttctacggcctgagcgagaacgacgagtggacccaggacagagccaagcccgtgacccagatcgtgtctgccgaagcctggggcagagccgattgcggctttaccagcgagagctaccagcagggcgtgctgagcgccaccatcctgtacgagatcctgctgggcaaggccaccctgtacgccgtgctggtgtctgccctggtgctgatggctatggtcaagcggaaggacagccgggga

SEQ ID NO: 2573 - DNA, 2688 bp, Artificial Sequence
  Synthetic Polynucloetide
atggccttaccagtgaccgccttgctcctgccgctggccttgctgctccacgccgccaggccggaagtgcagctggttgaatctggcggaggactggttcagcctggcggatctctgagactgtcttgtgccgccagcggcttcagcttcagcgacttttggatgagctgggtccgacaggcccctggcaaaggacttgaatgggtcgccacaatcagccaggccggcagcgagaaggactacgtggactctgtgaagggcagattcaccatcagccgggacaacgccaagaagtccctgtacctccagatgaacagcctgagagccgaggacaccgccgtgtactattgtgcctctggcgtgtacagcttcgactacagaggccagggcaccctggtcacagtctcttctggtaccggcggaggcggatctggcggcggaggtagcggtggcggaggatctgaattcgacatccagatgacccagagccccagcagcctgtctgccagcgtgggcgacagagtgaccatcacctgtagagccagccaggacgtgaacaccgccgtggcctggtatcagcagaagcctggcaaggcccccaagctgctgatctacagcgccagcttcctggaaagcggcgtgcccagcagattcagcggaagcagaagcggcaccgacttcaccctgaccatcagctccctccagcccgaggacttcgccacctactactgccagcagcactacaccacccctcccaccttcggccagaccaaggtggaaatcaagagactcgagatccagaaccctgatcctgccgtgtaccagctgcgggatagcaagagcagcgacaagagcgtgtgtctgttcaccgacttcgacagccagaccaacgtgtcccagagcaaggactccgacgtgtacatcaccgataagtgcgtgctggacatgcggagcatggacttcaagagcaactccgccgtggcctggtccaacaagtccgatttcgcctgcgccaacgccttcaacaacagcattatccccgaggacacattcttcccaagccccgagagcagctgcgacgtgaagctggtggaaaagagcttcgagacagacaccaacctgaacttccagaacctgagcgtgatcggcttcagaatcctgctgctgaaagtggccggctttaacctgctgatgaccctgcggctgtggtccagccgcgccaagagaagcggatctggcgtgaagcagaccctgaatttcgacctgctgaagctggctggcgacgtggaatccaacccaggccctactagtatggactggatttggcgcatccttttccttgtcggcgctgctaccggcgcgcattccgggccccagctccagctgcaagagtctggacctggcctggtcaagcctagcgagacactgagcctgacctgtaccgtgtccggcgatagcatcagcagcggcgattactactggggctggatcagacagcctcctggcaaaggactggaatggatcggccacatctactacagcggcgtgacctactacaaccccagcctgaagtccagagtgaccatcagcgtggacaccagccggaaccagttctccctgaagctgtctagcgtgacagccgccgataccgccgtgtactactgcaccagagaggacagcagcaactggcggagtagaggccagggaacactggtcacagttagctctggatccggcggaggcggaagtggaggcggaggatctggcggcggaggctctttcgaagaagtgcaactggtggaatctggcggcggactggtgcagcctggcggatctctgagactgagctgtgccgccagcggcttcaacatcaaggacacctacatccactgggtgcgccaggcccctggaaagggactggaatgggtggcccggatctaccccaccaacggctacaccagatacgccgacagcgtgaagggccggttcaccatcagcgccgacaccagcaagaataccgcctacctccagatgaacagcctgcgggccgaggataccgccgtgtactactgctcaagatggggaggcgacggcttctacgctatggacgtgtggggccagggcacccttgtgaccgtgtcatctacgcgtgaggacctgaagaacgtgttcccacctgaggtggccgtgttcgagcctagcgaggccgagatcagccacacccagaaagccaccctcgtgtgcctggctaccggcttctaccccgaccatgtggaactgtcttggtgggtcaacggcaaagaggtgcacagcggcgtgtgtaccgacccccagccactgaaagaacagcccgccctgaacgacagccggtactgcctgagcagcagactgagagtgtccgccaccttctggcagaacccccggaaccacttcagatgccaggtgcagttctacggcctgagcgagaacgacgagtggacccaggacagagccaagcccgtgacccagatcgtgtctgccgaagcctggggcagagccgattgcggctttaccagcgagagctaccagcagggcgtgctgagcgccaccatcctgtacgagatcctgctgggcaaggccaccctgtacgccgtgctggtgtctgccctggtgctgatggctatggtcaagcggaaggacagccgggga

SEQ ID NO: 2574 - DNA, 2685 bp, Artificial Sequence
  Synthetic Polynucloetide
atggccttaccagtgaccgccttgctcctgccgctggccttgctgctccacgccgccaggccggaagtgcagctggttgaatctggcggaggactggttcagcctggcggatctctgagactgtcttgtgccgccagcggcttcagcttcagcgacttttggatgagctgggtccgacaggcccctggcaaaggacttgaatgggtcgccacaatcagccaggccggcagcgagaaggactacgtggactctgtgaagggcagattcaccatcagccgggacaacgccaagaagtccctgtacctccagatgaacagcctgagagccgaggacaccgccgtgtactattgtgcctctggcgtgtacagcttcgactacagaggccagggcaccctggtcacagtctcttctggtaccggcggaggcggatctggcggcggaggtagcggtggcggaggatctgaattcgaccagagcgtgctgacacagcctcctagcgtgtcagtggcccctggcaagaccgccagaatcccctgcgagggcaactacatcggcagcagcaacgtgcactggtatcagcagaagcccggccaggctcccgtgctcgtgatccacttcgacagcgacagacccagcggcatccccgacagattcagcggcagcaacagcggcaacatggctaccctgaccatcagcagagtggaagccggggacgaggccgactactactgtcaagtgtgggagaaccacggctgggtgttcggcggaggcaccaagctgacagtgctgtctctcgagatccagaaccctgatcctgccgtgtaccagctgcgggatagcaagagcagcgacaagagcgtgtgtctgttcaccgacttcgacagccagaccaacgtgtcccagagcaaggactccgacgtgtacatcaccgataagtgcgtgctggacatgcggagcatggacttcaagagcaactccgccgtggcctggtccaacaagtccgatttcgcctgcgccaacgccttcaacaacagcattatccccgaggacacattcttcccaagccccgagagcagctgcgacgtgaagctggtggaaaagagcttcgagacagacaccaacctgaacttccagaacctgagcgtgatcggcttcagaatcctgctgctgaaagtggccggctttaacctgctgatgaccctgcggctgtggtccagccgcgccaagagaagcggatctggcgtgaagcagaccctgaatttcgacctgctgaagctggctggcgacgtggaatccaacccaggccctactagtatggactggatttggcgcatccttttccttgtcggcgctgctaccggcgcgcattccgggccccagctccagctgcaagagtctggacctggcctggtcaagcctagcgagacactgagcctgacctgtaccgtgtccggcgatagcatcagcagcggcgattactactggggctggatcagacagcctcctggcaaaggactggaatggatcggccacatctactacagcggcgtgacctactacaaccccagcctgaagtccagagtgaccatcagcgtggacaccagccggaaccagttctccctgaagctgtctagcgtgacagccgccgataccgccgtgtactactgcaccagagaggacagcagcaactggcggagtagaggccagggaacactggtcacagttagctctggatccggcggaggcggaagtggaggcggaggatctggcggcggaggctctttcgaagaggtgcaactggtggaaacaggcggcggactggtgcagcctggcgagtctctgagactgagctgtgccgccagcggcttcaccttcagcgactacgagatgaactgggtgcgccaggcccctggaaagggcctggaatgggtgtcctacatcagcagctccggcagcaccatctactacgccgacagcgtgaagggccggtttaccatctaccgggacaacgccaagaacagcctgtacctccagatgaactccctgcgggccgaggacaccgccctgtactattgtgccagagcctggggcgtgggaccccctgattattggggacagggcaccctcgtgaccgtgtcctctacgcgtgaggacctgaagaacgtgttcccacctgaggtggccgtgttcgagcctagcgaggccgagatcagccacacccagaaagccaccctcgtgtgcctggctaccggcttctaccccgaccatgtggaactgtcttggtgggtcaacggcaaagaggtgcacagcggcgtgtgtaccgacccccagccactgaaagaacagcccgccctgaacgacagccggtactgcctgagcagcagactgagagtgtccgccaccttctggcagaacccccggaaccacttcagatgccaggtgcagttctacggcctgagcgagaacgacgagtggacccaggacagagccaagcccgtgacccagatcgtgtctgccgaagcctggggcagagccgattgcggctttaccagcgagagctaccagcagggcgtgctgagcgccaccatcctgtacgagatcctgctgggcaaggccaccctgtacgccgtgctggtgtctgccctggtgctgatggctatggtcaagcggaaggacagccgggga

SEQ ID NO: 2575 - DNA, 2709 bp, Artificial Sequence
  Synthetic Polynucloetide
atggccttaccagtgaccgccttgctcctgccgctggccttgctgctccacgccgccaggccggaagtgcagctggttgaatctggcggaggactggttcagcctggcggatctctgagactgtcttgtgccgccagcggcttcagcttcagcgacttttggatgagctgggtccgacaggcccctggcaaaggacttgaatgggtcgccacaatcagccaggccggcagcgagaaggactacgtggactctgtgaagggcagattcaccatcagccgggacaacgccaagaagtccctgtacctccagatgaacagcctgagagccgaggacaccgccgtgtactattgtgcctctggcgtgtacagcttcgactacagaggccagggcaccctggtcacagtctcttctggtaccggcggaggcggatctggcggcggaggtagcggtggcggaggatctgaattcgacatccagatgacccagagccccagcagcctgtctgccagcgtgggcgataccgtgaccatcacctgtcaggccaacggctacctgaactggtatcagcagcggagaggcaaggcccccaagctgctgatctacgacggcagcaagctggaaagaggcgtgcccagcagattcagcggcagaagatggggccaggagtacaacctgaccatcaacaacctccagcccgaggatattgccacatacttttgccaggtgtacgagttcgtggtgcccggcacacggctggacctgaagagaacagtggctgctcctctcgagatccagaaccctgatcctgccgtgtaccagctgcgggatagcaagagcagcgacaagagcgtgtgtctgttcaccgacttcgacagccagaccaacgtgtcccagagcaaggactccgacgtgtacatcaccgataagtgcgtgctggacatgcggagcatggacttcaagagcaactccgccgtggcctggtccaacaagtccgatttcgcctgcgccaacgccttcaacaacagcattatccccgaggacacattcttcccaagccccgagagcagctgcgacgtgaagctggtggaaaagagcttcgagacagacaccaacctgaacttccagaacctgagcgtgatcggcttcagaatcctgctgctgaaagtggccggctttaacctgctgatgaccctgcggctgtggtccagccgcgccaagagaagcggatctggcgtgaagcagaccctgaatttcgacctgctgaagctggctggcgacgtggaatccaacccaggccctactagtatggactggatttggcgcatccttttccttgtcggcgctgctaccggcgcgcattccgggccccagctccagctgcaagagtctggacctggcctggtcaagcctagcgagacactgagcctgacctgtaccgtgtccggcgatagcatcagcagcggcgattactactggggctggatcagacagcctcctggcaaaggactggaatggatcggccacatctactacagcggcgtgacctactacaaccccagcctgaagtccagagtgaccatcagcgtggacaccagccggaaccagttctccctgaagctgtctagcgtgacagccgccgataccgccgtgtactactgcaccagagaggacagcagcaactggcggagtagaggccagggaacactggtcacagttagctctggatccggcggaggcggaagtggaggcggaggatctggcggcggaggctctttcgaacaggtgcagctgctccagtctggcgctgccgtgacaaagcctggcgcttctgtgcgggtgtcctgtgaagccagcggctacaacatccgggactacttcatccactggtggcggcaggctccaggccagggactccagtgggtgggatggatcaaccccaagaccggccagcccaacaaccccagacagttccagggcagagtgtccctgaccagacacgccagctgggacttcgacaccttcagcttctacatggatctgaaggccctgcggagcgacgataccgccgtgtacttctgcgccagacagagaagcgactactgggatttcgacgtgtggggcagcggcacccaagtgacagtgtctagcgccagcaccaagggacccacgcgtgaggacctgaagaacgtgttcccacctgaggtggccgtgttcgagcctagcgaggccgagatcagccacacccagaaagccaccctcgtgtgcctggctaccggcttctaccccgaccatgtggaactgtcttggtgggtcaacggcaaagaggtgcacagcggcgtgtgtaccgacccccagccactgaaagaacagcccgccctgaacgacagccggtactgcctgagcagcagactgagagtgtccgccaccttctggcagaacccccggaaccacttcagatgccaggtgcagttctacggcctgagcgagaacgacgagtggacccaggacagagccaagcccgtgacccagatcgtgtctgccgaagcctggggcagagccgattgcggctttaccagcgagagctaccagcagggcgtgctgagcgccaccatcctgtacgagatcctgctgggcaaggccaccctgtacgccgtgctggtgtctgccctggtgctgatggctatggtcaagcggaaggacagccgggga

SEQ ID NO: 2576 - DNA, 2727 bp, Artificial Sequence
  Synthetic Polynucloetide
atggccttaccagtgaccgccttgctcctgccgctggccttgctgctccacgccgccaggccggaagtgcagctggttgaatctggcggaggactggttcagcctggcggatctctgagactgtcttgtgccgccagcggcttcagcttcagcgacttttggatgagctgggtccgacaggcccctggcaaaggacttgaatgggtcgccacaatcagccaggccggcagcgagaaggactacgtggactctgtgaagggcagattcaccatcagccgggacaacgccaagaagtccctgtacctccagatgaacagcctgagagccgaggacaccgccgtgtactattgtgcctctggcgtgtacagcttcgactacagaggccagggcaccctggtcacagtctcttctggtaccggcggaggcggatctggcggcggaggtagcggtggcggaggatctgaattccagtctgccctgacacagcctcctagcgcctctggctctcccggccagagcatcaccatcagctgtaccggcaccagcaacaacttcgtgtcctggtatcagcagcacgccggcaaggcccccaagctcgtgatctacgacgtgaacaagcggcccagcggcgtgcccgatagattcagcggcagcaagagcggcaacaccgccagcctgacagtgtctggcctccagaccgatgacgaggccgtgtactactgcggcagcctcgtgggcaactgggacgtgatctttggcggaggcaccaagctgaccgtgctgctcgagatccagaaccctgatcctgccgtgtaccagctgcgggatagcaagagcagcgacaagagcgtgtgtctgttcaccgacttcgacagccagaccaacgtgtcccagagcaaggactccgacgtgtacatcaccgataagtgcgtgctggacatgcggagcatggacttcaagagcaactccgccgtggcctggtccaacaagtccgatttcgcctgcgccaacgccttcaacaacagcattatccccgaggacacattcttcccaagccccgagagcagctgcgacgtgaagctggtggaaaagagcttcgagacagacaccaacctgaacttccagaacctgagcgtgatcggcttcagaatcctgctgctgaaagtggccggctttaacctgctgatgaccctgcggctgtggtccagccgcgccaagagaagcggatctggcgtgaagcagaccctgaatttcgacctgctgaagctggctggcgacgtggaatccaacccaggccctactagtatggactggatttggcgcatccttttccttgtcggcgctgctaccggcgcgcattccgggccccagctccagctgcaagagtctggacctggcctggtcaagcctagcgagacactgagcctgacctgtaccgtgtccggcgatagcatcagcagcggcgattactactggggctggatcagacagcctcctggcaaaggactggaatggatcggccacatctactacagcggcgtgacctactacaaccccagcctgaagtccagagtgaccatcagcgtggacaccagccggaaccagttctccctgaagctgtctagcgtgacagccgccgataccgccgtgtactactgcaccagagaggacagcagcaactggcggagtagaggccagggaacactggtcacagttagctctggatccggcggaggcggaagtggaggcggaggatctggcggcggaggctctttcgaacagccccagctccaggaatctggccccacactggtggaagccagcgagacactgagcctgacctgtgccgtgtccggcgattctaccgccgcctgcaatagcttctggggctgggtgcgccagcctcctggaaagggactggaatgggtgggaagcctgagccactgcgccagctattggaaccggggctggacctaccacaaccccagcctgaagtccagactgaccctggccctggacacccccaagaacctggtgttcctgaagctgaacagcgtgacagccgccgacaccgccacctactactgtgccagatttggcggcgaggtgctgcggtacaccgactggcctaaacctgcctgggtggacctgtggggcagaggaacactcgtgaccgtgtccagcacgcgtgaggacctgaagaacgtgttcccacctgaggtggccgtgttcgagcctagcgaggccgagatcagccacacccagaaagccaccctcgtgtgcctggctaccggcttctaccccgaccatgtggaactgtcttggtgggtcaacggcaaagaggtgcacagcggcgtgtgtaccgacccccagccactgaaagaacagcccgccctgaacgacagccggtactgcctgagcagcagactgagagtgtccgccaccttctggcagaacccccggaaccacttcagatgccaggtgcagttctacggcctgagcgagaacgacgagtggacccaggacagagccaagcccgtgacccagatcgtgtctgccgaagcctggggcagagccgattgcggctttaccagcgagagctaccagcagggcgtgctgagcgccaccatcctgtacgagatcctgctgggcaaggccaccctgtacgccgtgctggtgtctgccctggtgctgatggctatggtcaagcggaaggacagccgggga

SEQ ID NO: 2577 - DNA, 2682 bp, Artificial Sequence
  Synthetic Polynucloetide
atggccttaccagtgaccgccttgctcctgccgctggccttgctgctccacgccgccaggccggaagtgcagctggttgaatctggcggaggactggttcagcctggcggatctctgagactgtcttgtgccgccagcggcttcagcttcagcgacttttggatgagctgggtccgacaggcccctggcaaaggacttgaatgggtcgccacaatcagccaggccggcagcgagaaggactacgtggactctgtgaagggcagattcaccatcagccgggacaacgccaagaagtccctgtacctccagatgaacagcctgagagccgaggacaccgccgtgtactattgtgcctctggcgtgtacagcttcgactacagaggccagggcaccctggtcacagtctcttctggtaccggcggaggcggatctggcggcggaggtagcggtggcggaggatctgaattcgagatcgtgctgacacagagccctggcaccctgagcctgtctccaggcgagacagccatcatcagctgccggacaagccagtacggcagcctggcctggtatcagcagaggccaggacaggcccccagactcgtgatctacagcggcagcacaagagccgccggaatccccgatagattcagcggctccagatggggacccgactacaacctgaccatcagcaacctggaaagcggcgacttcggcgtgtactactgccagcagtacgagttcttcggccagggcaccaaggtgcaggtggacatcaaaagactcgagatccagaaccctgatcctgccgtgtaccagctgcgggatagcaagagcagcgacaagagcgtgtgtctgttcaccgacttcgacagccagaccaacgtgtcccagagcaaggactccgacgtgtacatcaccgataagtgcgtgctggacatgcggagcatggacttcaagagcaactccgccgtggcctggtccaacaagtccgatttcgcctgcgccaacgccttcaacaacagcattatccccgaggacacattcttcccaagccccgagagcagctgcgacgtgaagctggtggaaaagagcttcgagacagacaccaacctgaacttccagaacctgagcgtgatcggcttcagaatcctgctgctgaaagtggccggctttaacctgctgatgaccctgcggctgtggtccagccgcgccaagagaagcggatctggcgtgaagcagaccctgaatttcgacctgctgaagctggctggcgacgtggaatccaacccaggccctactagtatggactggatttggcgcatccttttccttgtcggcgctgctaccggcgcgcattccgggccccagctccagctgcaagagtctggacctggcctggtcaagcctagcgagacactgagcctgacctgtaccgtgtccggcgatagcatcagcagcggcgattactactggggctggatcagacagcctcctggcaaaggactggaatggatcggccacatctactacagcggcgtgacctactacaaccccagcctgaagtccagagtgaccatcagcgtggacaccagccggaaccagttctccctgaagctgtctagcgtgacagccgccgataccgccgtgtactactgcaccagagaggacagcagcaactggcggagtagaggccagggaacactggtcacagttagctctggatccggcggaggcggaagtggaggcggaggatctggcggcggaggctctttcgaacaggtgcagctggtgcagtctggcggccagatgaagaaacccggcgagagcatgagaatcagctgtcgggcctccggctacgagttcatcgactgcaccctgaactggatcagactggcccctggcaagcggcctgagtggatgggatggctgaagcctagaggcggagccgtgaactacgccagacctctccagggcagagtgaccatgaccagggacgtgtacagcgataccgccttcctggaactgcggagcctgaccgtggatgataccgccgtgtacttctgcaccagaggcaagaactgcgattacaactgggacttcgagcactggggcagaggcacccctgtgatcgtgtctagcacgcgtgaggacctgaagaacgtgttcccacctgaggtggccgtgttcgagcctagcgaggccgagatcagccacacccagaaagccaccctcgtgtgcctggctaccggcttctaccccgaccatgtggaactgtcttggtgggtcaacggcaaagaggtgcacagcggcgtgtgtaccgacccccagccactgaaagaacagcccgccctgaacgacagccggtactgcctgagcagcagactgagagtgtccgccaccttctggcagaacccccggaaccacttcagatgccaggtgcagttctacggcctgagcgagaacgacgagtggacccaggacagagccaagcccgtgacccagatcgtgtctgccgaagcctggggcagagccgattgcggctttaccagcgagagctaccagcagggcgtgctgagcgccaccatcctgtacgagatcctgctgggcaaggccaccctgtacgccgtgctggtgtctgccctggtgctgatggctatggtcaagcggaaggacagccgggga

SEQ ID NO: 2578 - DNA, 2712 bp, Artificial Sequence
  Synthetic Polynucloetide
atggccttaccagtgaccgccttgctcctgccgctggccttgctgctccacgccgccaggccggaagtgcagctggttgaatctggcggaggactggttcagcctggcggatctctgagactgtcttgtgccgccagcggcttcagcttcagcgacttttggatgagctgggtccgacaggcccctggcaaaggacttgaatgggtcgccacaatcagccaggccggcagcgagaaggactacgtggactctgtgaagggcagattcaccatcagccgggacaacgccaagaagtccctgtacctccagatgaacagcctgagagccgaggacaccgccgtgtactattgtgcctctggcgtgtacagcttcgactacagaggccagggcaccctggtcacagtctcttctggtaccggcggaggcggatctggcggcggaggtagcggtggcggaggatctgaattcgagctggtgctgacacagagccctggcaccctgtctctgtctgccggcgaaagagccaccctgagctgtagagccagccagagcgtgtcctctggcagcctggcttggtatcagcagaagccaggccaggcccccagactgctgatctacggcgcttctaccagagccaccggcatccccgatagattcagcggctctggctccggcaccgacttcaccctgacaatcggcagactggaacccgaggacctggccgtgtactactgccagcagtacggcaccagcccctacacattcggccagggcaccaagctggaaatcctcgagatccagaaccctgatcctgccgtgtaccagctgcgggatagcaagagcagcgacaagagcgtgtgtctgttcaccgacttcgacagccagaccaacgtgtcccagagcaaggactccgacgtgtacatcaccgataagtgcgtgctggacatgcggagcatggacttcaagagcaactccgccgtggcctggtccaacaagtccgatttcgcctgcgccaacgccttcaacaacagcattatccccgaggacacattcttcccaagccccgagagcagctgcgacgtgaagctggtggaaaagagcttcgagacagacaccaacctgaacttccagaacctgagcgtgatcggcttcagaatcctgctgctgaaagtggccggctttaacctgctgatgaccctgcggctgtggtccagccgcgccaagagaagcggatctggcgtgaagcagaccctgaatttcgacctgctgaagctggctggcgacgtggaatccaacccaggccctactagtatggactggatttggcgcatccttttccttgtcggcgctgctaccggcgcgcattccgggccccagctccagctgcaagagtctggacctggcctggtcaagcctagcgagacactgagcctgacctgtaccgtgtccggcgatagcatcagcagcggcgattactactggggctggatcagacagcctcctggcaaaggactggaatggatcggccacatctactacagcggcgtgacctactacaaccccagcctgaagtccagagtgaccatcagcgtggacaccagccggaaccagttctccctgaagctgtctagcgtgacagccgccgataccgccgtgtactactgcaccagagaggacagcagcaactggcggagtagaggccagggaacactggtcacagttagctctggatccggcggaggcggaagtggaggcggaggatctggcggcggaggctctttcgaactggaacagagcggagccgaagtgaagaaacccggcagcagcgtgcaggtgtcctgcaaagcaagcggcggcaccttctctatgtacggcttcaactgggtgcgccaggctcctggacacggcctggaatggatgggcggcatcatccccatcttcggcacctccaactacgcccagaaattccggggcagagtgaccttcaccgccgaccaggccacaagcaccgcctacatggaactgaccaacctgcggagcgacgacaccgccgtgtattattgcgccagagacttcggccccgactgggaggatggcgacagctacgatggcagcggcagaggcttcttcgacttctggggccagggaacccttgtgaccgtgtcctcaacgcgtgaggacctgaagaacgtgttcccacctgaggtggccgtgttcgagcctagcgaggccgagatcagccacacccagaaagccaccctcgtgtgcctggctaccggcttctaccccgaccatgtggaactgtcttggtgggtcaacggcaaagaggtgcacagcggcgtgtgtaccgacccccagccactgaaagaacagcccgccctgaacgacagccggtactgcctgagcagcagactgagagtgtccgccaccttctggcagaacccccggaaccacttcagatgccaggtgcagttctacggcctgagcgagaacgacgagtggacccaggacagagccaagcccgtgacccagatcgtgtctgccgaagcctggggcagagccgattgcggctttaccagcgagagctaccagcagggcgtgctgagcgccaccatcctgtacgagatcctgctgggcaaggccaccctgtacgccgtgctggtgtctgccctggtgctgatggctatggtcaagcggaaggacagccgggga

SEQ ID NO: 2579 - DNA, 2652 bp, Artificial Sequence
  Synthetic Polynucloetide
atggccttaccagtgaccgccttgctcctgccgctggccttgctgctccacgccgccaggccggaagtgcagctggttgaatctggcggaggactggttcagcctggcggatctctgagactgtcttgtgccgccagcggcttcagcttcagcgacttttggatgagctgggtccgacaggcccctggcaaaggacttgaatgggtcgccacaatcagccaggccggcagcgagaaggactacgtggactctgtgaagggcagattcaccatcagccgggacaacgccaagaagtccctgtacctccagatgaacagcctgagagccgaggacaccgccgtgtactattgtgcctctggcgtgtacagcttcgactacagaggccagggcaccctggtcacagtctcttctggtaccggcggaggcggatctggcggcggaggtagcggtggcggaggatctgaattcgacatccagatgacccagagccccagcagcctgtctgccagcgtgggcgacagagtgaccatcacctgtcaggccagccaggacatcaacaactacctgaactggtatcagcagaagcccggcaaggcccccaagctgctgatctacgacgccagcaatctgcagaccggcgtgcccagcagattttccggctctggcagcggcaccgacttcaccttcaccatcgaggacattgccacctactactgccagcagtacaccttcggccctggcaccaaggtggacatcaaactcgagatccagaaccctgatcctgccgtgtaccagctgcgggatagcaagagcagcgacaagagcgtgtgtctgttcaccgacttcgacagccagaccaacgtgtcccagagcaaggactccgacgtgtacatcaccgataagtgcgtgctggacatgcggagcatggacttcaagagcaactccgccgtggcctggtccaacaagtccgatttcgcctgcgccaacgccttcaacaacagcattatccccgaggacacattcttcccaagccccgagagcagctgcgacgtgaagctggtggaaaagagcttcgagacagacaccaacctgaacttccagaacctgagcgtgatcggcttcagaatcctgctgctgaaagtggccggctttaacctgctgatgaccctgcggctgtggtccagccgcgccaagagaagcggatctggcgtgaagcagaccctgaatttcgacctgctgaagctggctggcgacgtggaatccaacccaggccctactagtatggactggatttggcgcatccttttccttgtcggcgctgctaccggcgcgcattccgggccccagctccagctgcaagagtctggacctggcctggtcaagcctagcgagacactgagcctgacctgtaccgtgtccggcgatagcatcagcagcggcgattactactggggctggatcagacagcctcctggcaaaggactggaatggatcggccacatctactacagcggcgtgacctactacaaccccagcctgaagtccagagtgaccatcagcgtggacaccagccggaaccagttctccctgaagctgtctagcgtgacagccgccgataccgccgtgtactactgcaccagagaggacagcagcaactggcggagtagaggccagggaacactggtcacagttagctctggatccggcggaggcggaagtggaggcggaggatctggcggcggaggctctttcgaagaagtgcaactgctggaatctggcggcggactggtgcagcctggcggatctctgagactgagctgtgccgccagcggcttcacctttagctggtacagcatgacctgggtgcgccaggcccctggcaaaggactggaatgggtgtccagcatcgtgccctggggcgatttcacccagtacgccgatagcgtgaagggccggttcaccatcagccgggacaacagcaagaacaccctgtacctgcagatgaacagcctgcgggccgaggacaccgccgtgtactattgtgccaagggacctggctggggcagcttcgatctgtggggcagaggaacccttgtgaccgtgtccagcacgcgtgaggacctgaagaacgtgttcccacctgaggtggccgtgttcgagcctagcgaggccgagatcagccacacccagaaagccaccctcgtgtgcctggctaccggcttctaccccgaccatgtggaactgtcttggtgggtcaacggcaaagaggtgcacagcggcgtgtgtaccgacccccagccactgaaagaacagcccgccctgaacgacagccggtactgcctgagcagcagactgagagtgtccgccaccttctggcagaacccccggaaccacttcagatgccaggtgcagttctacggcctgagcgagaacgacgagtggacccaggacagagccaagcccgtgacccagatcgtgtctgccgaagcctggggcagagccgattgcggctttaccagcgagagctaccagcagggcgtgctgagcgccaccatcctgtacgagatcctgctgggcaaggccaccctgtacgccgtgctggtgtctgccctggtgctgatggctatggtcaagcggaaggacagccgggga

SEQ ID NO: 2580 - DNA, 2682 bp, Artificial Sequence
  Synthetic Polynucloetide
atggccttaccagtgaccgccttgctcctgccgctggccttgctgctccacgccgccaggccggaagtgcagctggttgaatctggcggaggactggttcagcctggcggatctctgagactgtcttgtgccgccagcggcttcagcttcagcgacttttggatgagctgggtccgacaggcccctggcaaaggacttgaatgggtcgccacaatcagccaggccggcagcgagaaggactacgtggactctgtgaagggcagattcaccatcagccgggacaacgccaagaagtccctgtacctccagatgaacagcctgagagccgaggacaccgccgtgtactattgtgcctctggcgtgtacagcttcgactacagaggccagggcaccctggtcacagtctcttctggtaccggcggaggcggatctggcggcggaggtagcggtggcggaggatctgaattcgacatccagatgacccagagccccagcagcctgtctgccagcgtgggcgacagagtgaccatcacctgtaccgccagcctgagcgtgtccagcacctacctgcactggtatcagcagaagcccggcagcagccccaagctgtggatctacagcaccagcaacctggcctccggcgtgcccagcagattttctggcagcggctctggcaccagctacaccctgaccatcagctccctccagcccgaggacttcgccacctactactgccaccagtaccacagaagccccctgacctttggcggaggcaccaaggtggaaatcaagagactcgagatccagaaccctgatcctgccgtgtaccagctgcgggatagcaagagcagcgacaagagcgtgtgtctgttcaccgacttcgacagccagaccaacgtgtcccagagcaaggactccgacgtgtacatcaccgataagtgcgtgctggacatgcggagcatggacttcaagagcaactccgccgtggcctggtccaacaagtccgatttcgcctgcgccaacgccttcaacaacagcattatccccgaggacacattcttcccaagccccgagagcagctgcgacgtgaagctggtggaaaagagcttcgagacagacaccaacctgaacttccagaacctgagcgtgatcggcttcagaatcctgctgctgaaagtggccggctttaacctgctgatgaccctgcggctgtggtccagccgcgccaagagaagcggatctggcgtgaagcagaccctgaatttcgacctgctgaagctggctggcgacgtggaatccaacccaggccctactagtatggactggatttggcgcatccttttccttgtcggcgctgctaccggcgcgcattccgggccccagctccagctgcaagagtctggacctggcctggtcaagcctagcgagacactgagcctgacctgtaccgtgtccggcgatagcatcagcagcggcgattactactggggctggatcagacagcctcctggcaaaggactggaatggatcggccacatctactacagcggcgtgacctactacaaccccagcctgaagtccagagtgaccatcagcgtggacaccagccggaaccagttctccctgaagctgtctagcgtgacagccgccgataccgccgtgtactactgcaccagagaggacagcagcaactggcggagtagaggccagggaacactggtcacagttagctctggatccggcggaggcggaagtggaggcggaggatctggcggcggaggctctttcgaagaagtgcaactggtggaatctggcggcggactggtgcagcctggcggatctctgagactgagctgtgccgccagcggcttcagcctgaccaaatacggcgtgcactgggtgcgccaggcccctggaaaaggactggaatgggtgggagtgaagtgggctggcggctccaccgactacaacagcgccctgatgagccggttcaccatcagcaaggacaacgccaagaacagcctgtacctccagatgaactccctgcgggccgaggacaccgccgtgtactactgtgccagagatcaccgggacgctatggactactggggccagggaacactcgtgaccgtgtcctctacgcgtgaggacctgaagaacgtgttcccacctgaggtggccgtgttcgagcctagcgaggccgagatcagccacacccagaaagccaccctcgtgtgcctggctaccggcttctaccccgaccatgtggaactgtcttggtgggtcaacggcaaagaggtgcacagcggcgtgtgtaccgacccccagccactgaaagaacagcccgccctgaacgacagccggtactgcctgagcagcagactgagagtgtccgccaccttctggcagaacccccggaaccacttcagatgccaggtgcagttctacggcctgagcgagaacgacgagtggacccaggacagagccaagcccgtgacccagatcgtgtctgccgaagcctggggcagagccgattgcggctttaccagcgagagctaccagcagggcgtgctgagcgccaccatcctgtacgagatcctgctgggcaaggccaccctgtacgccgtgctggtgtctgccctggtgctgatggctatggtcaagcggaaggacagccgggga

SEQ ID NO: 2581 - DNA, 2694 bp, Artificial Sequence
  Synthetic Polynucloetide
atggccttaccagtgaccgccttgctcctgccgctggccttgctgctccacgccgccaggccggaagtgcagctggttgaatctggcggaggactggttcagcctggcggatctctgagactgtcttgtgccgccagcggcttcagcttcagcgacttttggatgagctgggtccgacaggcccctggcaaaggacttgaatgggtcgccacaatcagccaggccggcagcgagaaggactacgtggactctgtgaagggcagattcaccatcagccgggacaacgccaagaagtccctgtacctccagatgaacagcctgagagccgaggacaccgccgtgtactattgtgcctctggcgtgtacagcttcgactacagaggccagggcaccctggtcacagtctcttctggtaccggcggaggcggatctggcggcggaggtagcggtggcggaggatctgaattcgacatccagatgacccagagccccagcagcctgtctgccagcgtgggcgacagagtgaccatcacatgcaaggccagccaggacgtgggaacagccgtggcctggtatcagcagaagcctggcaaggcccccaagctgctgatctacagcgccagctacagatccaccggcgtgcccagcagattttccggctctggcagcggcaccgacttcaccctgaccatctctagcctccagcccgaggacttcgccacctactactgccagcaccactactccgccccctggacatttggcggaggcaccaaggtggaaatcaagctcgagatccagaaccctgatcctgccgtgtaccagctgcgggatagcaagagcagcgacaagagcgtgtgtctgttcaccgacttcgacagccagaccaacgtgtcccagagcaaggactccgacgtgtacatcaccgataagtgcgtgctggacatgcggagcatggacttcaagagcaactccgccgtggcctggtccaacaagtccgatttcgcctgcgccaacgccttcaacaacagcattatccccgaggacacattcttcccaagccccgagagcagctgcgacgtgaagctggtggaaaagagcttcgagacagacaccaacctgaacttccagaacctgagcgtgatcggcttcagaatcctgctgctgaaagtggccggctttaacctgctgatgaccctgcggctgtggtccagccgcgccaagagaagcggatctggcgtgaagcagaccctgaatttcgacctgctgaagctggctggcgacgtggaatccaacccaggccctactagtatggactggatttggcgcatccttttccttgtcggcgctgctaccggcgcgcattccgggccccagctccagctgcaagagtctggacctggcctggtcaagcctagcgagacactgagcctgacctgtaccgtgtccggcgatagcatcagcagcggcgattactactggggctggatcagacagcctcctggcaaaggactggaatggatcggccacatctactacagcggcgtgacctactacaaccccagcctgaagtccagagtgaccatcagcgtggacaccagccggaaccagttctccctgaagctgtctagcgtgacagccgccgataccgccgtgtactactgcaccagagaggacagcagcaactggcggagtagaggccagggaacactggtcacagttagctctggatccggcggaggcggaagtggaggcggaggatctggcggcggaggctctttcgaagaagtgcaactggtggaatcaggcggcggactggtgcagcctggcggatctctgagactgagctgtgccgccagcggcttcaccttcagcagaaacggcatgagctgggtgcgccaggcccctggaaaaggactggaatgggtggcaaccgtgtccagcggcggcagctacatctactacgccgacagcgtgaagggccggttcaccatctccagagacaacgccaagaacagcctgtacctccagatgaactccctgcgggccgaggacaccgccgtgtactattgtgccagacagggcaccaccgccctggctaccagattcttcgatgtgtggggccagggcaccctcgtgaccgtgtcatctacgcgtgaggacctgaagaacgtgttcccacctgaggtggccgtgttcgagcctagcgaggccgagatcagccacacccagaaagccaccctcgtgtgcctggctaccggcttctaccccgaccatgtggaactgtcttggtgggtcaacggcaaagaggtgcacagcggcgtgtgtaccgacccccagccactgaaagaacagcccgccctgaacgacagccggtactgcctgagcagcagactgagagtgtccgccaccttctggcagaacccccggaaccacttcagatgccaggtgcagttctacggcctgagcgagaacgacgagtggacccaggacagagccaagcccgtgacccagatcgtgtctgccgaagcctggggcagagccgattgcggctttaccagcgagagctaccagcagggcgtgctgagcgccaccatcctgtacgagatcctgctgggcaaggccaccctgtacgccgtgctggtgtctgccctggtgctgatggctatggtcaagcggaaggacagccgggga

SEQ ID NO: 2582 - DNA, 2682 bp, Artificial Sequence
  Synthetic Polynucloetide
atggccttaccagtgaccgccttgctcctgccgctggccttgctgctccacgccgccaggccggaagtgcagctggttgaatctggcggaggactggttcagcctggcggatctctgagactgtcttgtgccgccagcggcttcagcttcagcgacttttggatgagctgggtccgacaggcccctggcaaaggacttgaatgggtcgccacaatcagccaggccggcagcgagaaggactacgtggactctgtgaagggcagattcaccatcagccgggacaacgccaagaagtccctgtacctccagatgaacagcctgagagccgaggacaccgccgtgtactattgtgcctctggcgtgtacagcttcgactacagaggccagggcaccctggtcacagtctcttctggtaccggcggaggcggatctggcggcggaggtagcggtggcggaggatctgaattcgacatccagatgacccagagcccccctagcctgtctgcctctgtgggcggcaaagtgaccatcacatgcaaggccagccaggacatcgaccgctacatggcctggtatcaggacaagcccggcaagggacccaagctgctgatccacgataccagcaccctccagcccggcatccccagcagattttctggcagcggctccggcagagactacagcttcagcatcagcaacctggaacccgaggacattgccacctactactgcctccagtacgacaacctgtggaccttcggcggaggcaccaagctggaaatcaagagactcgagatccagaaccctgatcctgccgtgtaccagctgcgggatagcaagagcagcgacaagagcgtgtgtctgttcaccgacttcgacagccagaccaacgtgtcccagagcaaggactccgacgtgtacatcaccgataagtgcgtgctggacatgcggagcatggacttcaagagcaactccgccgtggcctggtccaacaagtccgatttcgcctgcgccaacgccttcaacaacagcattatccccgaggacacattcttcccaagccccgagagcagctgcgacgtgaagctggtggaaaagagcttcgagacagacaccaacctgaacttccagaacctgagcgtgatcggcttcagaatcctgctgctgaaagtggccggctttaacctgctgatgaccctgcggctgtggtccagccgcgccaagagaagcggatctggcgtgaagcagaccctgaatttcgacctgctgaagctggctggcgacgtggaatccaacccaggccctactagtatggactggatttggcgcatccttttccttgtcggcgctgctaccggcgcgcattccgggccccagctccagctgcaagagtctggacctggcctggtcaagcctagcgagacactgagcctgacctgtaccgtgtccggcgatagcatcagcagcggcgattactactggggctggatcagacagcctcctggcaaaggactggaatggatcggccacatctactacagcggcgtgacctactacaaccccagcctgaagtccagagtgaccatcagcgtggacaccagccggaaccagttctccctgaagctgtctagcgtgacagccgccgataccgccgtgtactactgcaccagagaggacagcagcaactggcggagtagaggccagggaacactggtcacagttagctctggatccggcggaggcggaagtggaggcggaggatctggcggcggaggctctttcgaacaggtgcaactggtgcagagcggagccgagcttgtgaagcctggcgcttccgtgaagatgagctgcaaagccagcggctacatcttcaccaactacaacatccactgggtcaagaagtccccaggccagggcctggaatggatcggagccatctaccccggaaacggcgacgccccttacagccagaagttccaggacagagccaccctgaccgccgacaccagcagcagcaccacctacatggaactgagcagcctgaccagcgaggacagcgccgtgtactattgcgtgcgggccaactgggatgtggccttcgcctattggggccagggcacactggtgtccgtgtcctctacgcgtgaggacctgaagaacgtgttcccacctgaggtggccgtgttcgagcctagcgaggccgagatcagccacacccagaaagccaccctcgtgtgcctggctaccggcttctaccccgaccatgtggaactgtcttggtgggtcaacggcaaagaggtgcacagcggcgtgtgtaccgacccccagccactgaaagaacagcccgccctgaacgacagccggtactgcctgagcagcagactgagagtgtccgccaccttctggcagaacccccggaaccacttcagatgccaggtgcagttctacggcctgagcgagaacgacgagtggacccaggacagagccaagcccgtgacccagatcgtgtctgccgaagcctggggcagagccgattgcggctttaccagcgagagctaccagcagggcgtgctgagcgccaccatcctgtacgagatcctgctgggcaaggccaccctgtacgccgtgctggtgtctgccctggtgctgatggctatggtcaagcggaaggacagccgggga

SEQ ID NO: 2583 - DNA, 2685 bp, Artificial Sequence
  Synthetic Polynucloetide
atggccttaccagtgaccgccttgctcctgccgctggccttgctgctccacgccgccaggccggaagtgcagctggttgaatctggcggaggactggttcagcctggcggatctctgagactgtcttgtgccgccagcggcttcagcttcagcgacttttggatgagctgggtccgacaggcccctggcaaaggacttgaatgggtcgccacaatcagccaggccggcagcgagaaggactacgtggactctgtgaagggcagattcaccatcagccgggacaacgccaagaagtccctgtacctccagatgaacagcctgagagccgaggacaccgccgtgtactattgtgcctctggcgtgtacagcttcgactacagaggccagggcaccctggtcacagtctcttctggtaccggcggaggcggatctggcggcggaggtagcggtggcggaggatctgaattcgacatccagatgacccagagccctgccagcctgtctgcctctgtgggcgagacagtgaccatcacctgtcgggtgtccggcaacatccacaactacctggcctggtatcagcagaagcagggcaagagcccccaactgctggtgtacaacgccaagaccctggccgatggcgtgcccagcagattttctggctctggcagcggcacccagtacagcctgaagatcaacagcctccagcccgaggacttcggcagctactactgccagcacttctggtccaacccctacaccttcggcggaggcaccaagctggaaatcaagctcgagatccagaaccctgatcctgccgtgtaccagctgcgggatagcaagagcagcgacaagagcgtgtgtctgttcaccgacttcgacagccagaccaacgtgtcccagagcaaggactccgacgtgtacatcaccgataagtgcgtgctggacatgcggagcatggacttcaagagcaactccgccgtggcctggtccaacaagtccgatttcgcctgcgccaacgccttcaacaacagcattatccccgaggacacattcttcccaagccccgagagcagctgcgacgtgaagctggtggaaaagagcttcgagacagacaccaacctgaacttccagaacctgagcgtgatcggcttcagaatcctgctgctgaaagtggccggctttaacctgctgatgaccctgcggctgtggtccagccgcgccaagagaagcggatctggcgtgaagcagaccctgaatttcgacctgctgaagctggctggcgacgtggaatccaacccaggccctactagtatggactggatttggcgcatccttttccttgtcggcgctgctaccggcgcgcattccgggccccagctccagctgcaagagtctggacctggcctggtcaagcctagcgagacactgagcctgacctgtaccgtgtccggcgatagcatcagcagcggcgattactactggggctggatcagacagcctcctggcaaaggactggaatggatcggccacatctactacagcggcgtgacctactacaaccccagcctgaagtccagagtgaccatcagcgtggacaccagccggaaccagttctccctgaagctgtctagcgtgacagccgccgataccgccgtgtactactgcaccagagaggacagcagcaactggcggagtagaggccagggaacactggtcacagttagctctggatccggcggaggcggaagtggaggcggaggatctggcggcggaggctctttcgaacaggtgcaactccagcagtctggcgcttccgtgaaggtgtcctgcaaggccagcgaactcgtgcggcctggcacaggctacgccttcaccaattacctgatcgagtgggtcaagcagaggcccggacagggcctggaatggatcggagtgattaacccaggcagcggcggcaccaactacaacgagaagttcaagggcaaggccaccctgaccgccgacaagagcagcagcacagcctacatgcaactgagcagcctgaccagcgacgacagcgccgtgtacttctgcgcccggtacagaagctacgactggtacttcgacgtgtggggagccggcaccaccgtgacagtgtcatctacgcgtgaggacctgaagaacgtgttcccacctgaggtggccgtgttcgagcctagcgaggccgagatcagccacacccagaaagccaccctcgtgtgcctggctaccggcttctaccccgaccatgtggaactgtcttggtgggtcaacggcaaagaggtgcacagcggcgtgtgtaccgacccccagccactgaaagaacagcccgccctgaacgacagccggtactgcctgagcagcagactgagagtgtccgccaccttctggcagaacccccggaaccacttcagatgccaggtgcagttctacggcctgagcgagaacgacgagtggacccaggacagagccaagcccgtgacccagatcgtgtctgccgaagcctggggcagagccgattgcggctttaccagcgagagctaccagcagggcgtgctgagcgccaccatcctgtacgagatcctgctgggcaaggccaccctgtacgccgtgctggtgtctgccctggtgctgatggctatggtcaagcggaaggacagccgggga

SEQ ID NO: 2584 - DNA, 2682 bp, Artificial Sequence
  Synthetic Polynucloetide
atggccttaccagtgaccgccttgctcctgccgctggccttgctgctccacgccgccaggccggaagtgcagctggttgaatctggcggaggactggttcagcctggcggatctctgagactgtcttgtgccgccagcggcttcagcttcagcgacttttggatgagctgggtccgacaggcccctggcaaaggacttgaatgggtcgccacaatcagccaggccggcagcgagaaggactacgtggactctgtgaagggcagattcaccatcagccgggacaacgccaagaagtccctgtacctccagatgaacagcctgagagccgaggacaccgccgtgtactattgtgcctctggcgtgtacagcttcgactacagaggccagggcaccctggtcacagtctcttctggtaccggcggaggcggatctggcggcggaggtagcggtggcggaggatctgaattcgacatccagatgacccagagcttcagcagcctgagcgccagcgtgggcgacagagtgaccatcacctgtagagccagccaggacatcagcaactacctgaactggtatcagcagaagcccggcaaggcccccaagctgctgatctactacaccagcagactgcacagcggcgtgcccagcagattttctggcagcggctccggcaccgactacaccctgacaatcagctccctgcagcccgaggacttcgctacctacttctgtcagcaaggcaacaccctgccctggacctttggcggaggcaccaagctggaaatcaagagactcgagatccagaaccctgatcctgccgtgtaccagctgcgggatagcaagagcagcgacaagagcgtgtgtctgttcaccgacttcgacagccagaccaacgtgtcccagagcaaggactccgacgtgtacatcaccgataagtgcgtgctggacatgcggagcatggacttcaagagcaactccgccgtggcctggtccaacaagtccgatttcgcctgcgccaacgccttcaacaacagcattatccccgaggacacattcttcccaagccccgagagcagctgcgacgtgaagctggtggaaaagagcttcgagacagacaccaacctgaacttccagaacctgagcgtgatcggcttcagaatcctgctgctgaaagtggccggctttaacctgctgatgaccctgcggctgtggtccagccgcgccaagagaagcggatctggcgtgaagcagaccctgaatttcgacctgctgaagctggctggcgacgtggaatccaacccaggccctactagtatggactggatttggcgcatccttttccttgtcggcgctgctaccggcgcgcattccgggccccagctccagctgcaagagtctggacctggcctggtcaagcctagcgagacactgagcctgacctgtaccgtgtccggcgatagcatcagcagcggcgattactactggggctggatcagacagcctcctggcaaaggactggaatggatcggccacatctactacagcggcgtgacctactacaaccccagcctgaagtccagagtgaccatcagcgtggacaccagccggaaccagttctccctgaagctgtctagcgtgacagccgccgataccgccgtgtactactgcaccagagaggacagcagcaactggcggagtagaggccagggaacactggtcacagttagctctggatccggcggaggcggaagtggaggcggaggatctggcggcggaggctctttcgaagaagtgcaactggtgcagtccggcggagggctggtgcagagcggaggatctctgagactgagctgcagagccagcggctacaccttcacccggtactggatgctgtgggtgcgccagaggccaggcaagggactggaatgggtggccgagatcaacccccggaacgaccggaccaactacaacgagaagttcaagacccggttcaccatcagcgtggacagaagcaagaacaccctgtacctgcagatggacagcctgcgggccgaggataccgccgtgtacttttgtgctctgggaggcggctacgctatggactactggggccagggaacccttgtgaccgtgtcctctacgcgtgaggacctgaagaacgtgttcccacctgaggtggccgtgttcgagcctagcgaggccgagatcagccacacccagaaagccaccctcgtgtgcctggctaccggcttctaccccgaccatgtggaactgtcttggtgggtcaacggcaaagaggtgcacagcggcgtgtgtaccgacccccagccactgaaagaacagcccgccctgaacgacagccggtactgcctgagcagcagactgagagtgtccgccaccttctggcagaacccccggaaccacttcagatgccaggtgcagttctacggcctgagcgagaacgacgagtggacccaggacagagccaagcccgtgacccagatcgtgtctgccgaagcctggggcagagccgattgcggctttaccagcgagagctaccagcagggcgtgctgagcgccaccatcctgtacgagatcctgctgggcaaggccaccctgtacgccgtgctggtgtctgccctggtgctgatggctatggtcaagcggaaggacagccgggga

SEQ ID NO: 2585 - DNA, 2685 bp, Artificial Sequence
  Synthetic Polynucloetide
atggccttaccagtgaccgccttgctcctgccgctggccttgctgctccacgccgccaggccggaagtgcagctggttgaatctggcggaggactggttcagcctggcggatctctgagactgtcttgtgccgccagcggcttcagcttcagcgacttttggatgagctgggtccgacaggcccctggcaaaggacttgaatgggtcgccacaatcagccaggccggcagcgagaaggactacgtggactctgtgaagggcagattcaccatcagccgggacaacgccaagaagtccctgtacctccagatgaacagcctgagagccgaggacaccgccgtgtactattgtgcctctggcgtgtacagcttcgactacagaggccagggcaccctggtcacagtctcttctggtaccggcggaggcggatctggcggcggaggtagcggtggcggaggatctgaattcgacatccagatgacacagtctccggcgtcactgtccgcctccgtgggggagactgtgactattatttgtagggcatcagttaacatctactcttatttggcctggtaccagcagaagcaaggcaagagtcctcagctgctggtgtataatgcgaagatcctggcagagggcgtgccgagccggttctccggcagcggctcaggtacccaattttccctcaagatcaattcactgcagccagaggactttggcagttactattgtcaacaccactacggcacattcactttcgggtccggtacaaaattggagattaagcgactcgagatccagaaccctgatcctgccgtgtaccagctgcgggatagcaagagcagcgacaagagcgtgtgtctgttcaccgacttcgacagccagaccaacgtgtcccagagcaaggactccgacgtgtacatcaccgataagtgcgtgctggacatgcggagcatggacttcaagagcaactccgccgtggcctggtccaacaagtccgatttcgcctgcgccaacgccttcaacaacagcattatccccgaggacacattcttcccaagccccgagagcagctgcgacgtgaagctggtggaaaagagcttcgagacagacaccaacctgaacttccagaacctgagcgtgatcggcttcagaatcctgctgctgaaagtggccggctttaacctgctgatgaccctgcggctgtggtccagccgcgccaagagaagcggatctggcgtgaagcagaccctgaatttcgacctgctgaagctggctggcgacgtggaatccaacccaggccctactagtatggactggatttggcgcatccttttccttgtcggcgctgctaccggcgcgcattccgggccccagctccagctgcaagagtctggacctggcctggtcaagcctagcgagacactgagcctgacctgtaccgtgtccggcgatagcatcagcagcggcgattactactggggctggatcagacagcctcctggcaaaggactggaatggatcggccacatctactacagcggcgtgacctactacaaccccagcctgaagtccagagtgaccatcagcgtggacaccagccggaaccagttctccctgaagctgtctagcgtgacagccgccgataccgccgtgtactactgcaccagagaggacagcagcaactggcggagtagaggccagggaacactggtcacagttagctctggatccggcggaggcggaagtggaggcggaggatctggcggcggaggctctttcgaacaggtacagttgaaagaaagcgggcctggactggtagcgccttcccaatctctctccatcacgtgcaccatctctggcttctccctgacttcctatggagttcactgggtgaggcagccccccggcaagggactggaatggctggtcgtcatctggtccgacgggtccacaacctacaactccgctctgaaaagtcggctctctatttctaaagataatagcaagagccaggtgtttctgaaaatgaactctctgcagaccgatgatacggccatttactactgcgcttcacactatggctcaaccttggcattcgcttcctggggccacggaacactggtgaccgtttccgcagccacgcgtgaggacctgaagaacgtgttcccacctgaggtggccgtgttcgagcctagcgaggccgagatcagccacacccagaaagccaccctcgtgtgcctggctaccggcttctaccccgaccatgtggaactgtcttggtgggtcaacggcaaagaggtgcacagcggcgtgtgtaccgacccccagccactgaaagaacagcccgccctgaacgacagccggtactgcctgagcagcagactgagagtgtccgccaccttctggcagaacccccggaaccacttcagatgccaggtgcagttctacggcctgagcgagaacgacgagtggacccaggacagagccaagcccgtgacccagatcgtgtctgccgaagcctggggcagagccgattgcggctttaccagcgagagctaccagcagggcgtgctgagcgccaccatcctgtacgagatcctgctgggcaaggccaccctgtacgccgtgctggtgtctgccctggtgctgatggctatggtcaagcggaaggacagccgggga

SEQ ID NO: 2586 - DNA, 2709 bp, Artificial Sequence
  Synthetic Polynucloetide
atggccttaccagtgaccgccttgctcctgccgctggccttgctgctccacgccgccaggccggaagtgcagctggttgaatctggcggaggactggttcagcctggcggatctctgagactgtcttgtgccgccagcggcttcagcttcagcgacttttggatgagctgggtccgacaggcccctggcaaaggacttgaatgggtcgccacaatcagccaggccggcagcgagaaggactacgtggactctgtgaagggcagattcaccatcagccgggacaacgccaagaagtccctgtacctccagatgaacagcctgagagccgaggacaccgccgtgtactattgtgcctctggcgtgtacagcttcgactacagaggccagggcaccctggtcacagtctcttctggtaccggcggaggcggatctggcggcggaggtagcggtggcggaggatctgaattcgacattgtgatgacccagtctcacaaattcatgtccacatcagtaggagacagggtcagcgtcacctgcaaggccagtcagaatgtgggtaataatgtagcctggtatcaacagaaaccagggcaatctcctaaagtactgatttactcggcatcctaccggtacagtggagtccctgatcgcttcacaggcagtggatctgggacagatttcactctcaccatcagtaatgtgcagtctgaagacttggcagagtatttctgtcagcaatataacacctatccattcacgttcggctcggggacaaagttggaaataaaactcgagatccagaaccctgatcctgccgtgtaccagctgcgggatagcaagagcagcgacaagagcgtgtgtctgttcaccgacttcgacagccagaccaacgtgtcccagagcaaggactccgacgtgtacatcaccgataagtgcgtgctggacatgcggagcatggacttcaagagcaactccgccgtggcctggtccaacaagtccgatttcgcctgcgccaacgccttcaacaacagcattatccccgaggacacattcttcccaagccccgagagcagctgcgacgtgaagctggtggaaaagagcttcgagacagacaccaacctgaacttccagaacctgagcgtgatcggcttcagaatcctgctgctgaaagtggccggctttaacctgctgatgaccctgcggctgtggtccagccgcgccaagagaagcggatctggcgtgaagcagaccctgaatttcgacctgctgaagctggctggcgacgtggaatccaacccaggccctactagtatggactggatttggcgcatccttttccttgtcggcgctgctaccggcgcgcattccgggccccagctccagctgcaagagtctggacctggcctggtcaagcctagcgagacactgagcctgacctgtaccgtgtccggcgatagcatcagcagcggcgattactactggggctggatcagacagcctcctggcaaaggactggaatggatcggccacatctactacagcggcgtgacctactacaaccccagcctgaagtccagagtgaccatcagcgtggacaccagccggaaccagttctccctgaagctgtctagcgtgacagccgccgataccgccgtgtactactgcaccagagaggacagcagcaactggcggagtagaggccagggaacactggtcacagttagctctggatccggcggaggcggaagtggaggcggaggatctggcggcggaggctctttcgaagaggtacagctggaggaaagcggtggaggactggtgcaacctggagggtctatgaagctctcttgcgtagcttctgggttcacgttctccaattactggatgaactgggtgcggcagtcccccgagaaaggcctggaatgggtagcagaaattcggttcaagtcccataactatgctacacactttgccgagtctgtcaaaggccggttcactattagtcgagacgacagcaagtcttcagtctacctgcagatgaataacttgcgggcagaggacacaggtatctactactgcaccaggagaatcggcaactccgactatgactggtggtactttgacgtctggggagcaggcaccagcgtgacggtgagttcagcctcaacgcgtgaggacctgaagaacgtgttcccacctgaggtggccgtgttcgagcctagcgaggccgagatcagccacacccagaaagccaccctcgtgtgcctggctaccggcttctaccccgaccatgtggaactgtcttggtgggtcaacggcaaagaggtgcacagcggcgtgtgtaccgacccccagccactgaaagaacagcccgccctgaacgacagccggtactgcctgagcagcagactgagagtgtccgccaccttctggcagaacccccggaaccacttcagatgccaggtgcagttctacggcctgagcgagaacgacgagtggacccaggacagagccaagcccgtgacccagatcgtgtctgccgaagcctggggcagagccgattgcggctttaccagcgagagctaccagcagggcgtgctgagcgccaccatcctgtacgagatcctgctgggcaaggccaccctgtacgccgtgctggtgtctgccctggtgctgatggctatggtcaagcggaaggacagccgggga

SEQ ID NO: 2587 - DNA, 2688 bp, Artificial Sequence
  Synthetic Polynucloetide
atggccttaccagtgaccgccttgctcctgccgctggccttgctgctccacgccgccaggccggaagtgcagctggttgaatctggcggaggactggttcagcctggcggatctctgagactgtcttgtgccgccagcggcttcagcttcagcgacttttggatgagctgggtccgacaggcccctggcaaaggacttgaatgggtcgccacaatcagccaggccggcagcgagaaggactacgtggactctgtgaagggcagattcaccatcagccgggacaacgccaagaagtccctgtacctccagatgaacagcctgagagccgaggacaccgccgtgtactattgtgcctctggcgtgtacagcttcgactacagaggccagggcaccctggtcacagtctcttctggtaccggcggaggcggatctggcggcggaggtagcggtggcggaggatctgaattcgaccagatcgtgctgacccagtcccccgctattatgtccgcatcaccgggcgaaaaagtgacgatctcctgtagcgcttcatctagcgtctcctacatgtattggtatcaacagaaacctgggtctagcccaaagccgtggatctacagaaccagtaaccttgccagtggggtgccagcccgcttcagcggtagtggcagtggaacttcctatagcctcacaataagcaacatggaggctgaagatgccgctgcctattactgccagcagtaccacagttacccaaccacgttcggcgggggaactaagctcgaagtaaaactcgagatccagaaccctgatcctgccgtgtaccagctgcgggatagcaagagcagcgacaagagcgtgtgtctgttcaccgacttcgacagccagaccaacgtgtcccagagcaaggactccgacgtgtacatcaccgataagtgcgtgctggacatgcggagcatggacttcaagagcaactccgccgtggcctggtccaacaagtccgatttcgcctgcgccaacgccttcaacaacagcattatccccgaggacacattcttcccaagccccgagagcagctgcgacgtgaagctggtggaaaagagcttcgagacagacaccaacctgaacttccagaacctgagcgtgatcggcttcagaatcctgctgctgaaagtggccggctttaacctgctgatgaccctgcggctgtggtccagccgcgccaagagaagcggatctggcgtgaagcagaccctgaatttcgacctgctgaagctggctggcgacgtggaatccaacccaggccctactagtatggactggatttggcgcatccttttccttgtcggcgctgctaccggcgcgcattccgggccccagctccagctgcaagagtctggacctggcctggtcaagcctagcgagacactgagcctgacctgtaccgtgtccggcgatagcatcagcagcggcgattactactggggctggatcagacagcctcctggcaaaggactggaatggatcggccacatctactacagcggcgtgacctactacaaccccagcctgaagtccagagtgaccatcagcgtggacaccagccggaaccagttctccctgaagctgtctagcgtgacagccgccgataccgccgtgtactactgcaccagagaggacagcagcaactggcggagtagaggccagggaacactggtcacagttagctctggatccggcggaggcggaagtggaggcggaggatctggcggcggaggctctttcgaagaggtgcagctggtggaatctgggggcggcctggtccaacctaagggatcactcaagctctcttgtgcggccagcggattctctttcaatacctatgctatgaattgggtgagacaggcgcccggaaagggcctcgaatggatagcccatatccggtcaaaatcaaacaatttcgcaacctactatgcggactccgtgaaggaccgattttccatctcccgagatgcctccgagaatattctgttcctgcagatgaataacctcaagacagaggacaccgccatgtactactgtgtgcgccagggcggtgactttcccatggattactgggggcaggggaccagcgtgaccgtgagctctacgcgtgaggacctgaagaacgtgttcccacctgaggtggccgtgttcgagcctagcgaggccgagatcagccacacccagaaagccaccctcgtgtgcctggctaccggcttctaccccgaccatgtggaactgtcttggtgggtcaacggcaaagaggtgcacagcggcgtgtgtaccgacccccagccactgaaagaacagcccgccctgaacgacagccggtactgcctgagcagcagactgagagtgtccgccaccttctggcagaacccccggaaccacttcagatgccaggtgcagttctacggcctgagcgagaacgacgagtggacccaggacagagccaagcccgtgacccagatcgtgtctgccgaagcctggggcagagccgattgcggctttaccagcgagagctaccagcagggcgtgctgagcgccaccatcctgtacgagatcctgctgggcaaggccaccctgtacgccgtgctggtgtctgccctggtgctgatggctatggtcaagcggaaggacagccgggga

SEQ ID NO: 2588 - DNA, 2685 bp, Artificial Sequence
  Synthetic Polynucloetide
atggccttaccagtgaccgccttgctcctgccgctggccttgctgctccacgccgccaggccggaagtgcagctggttgaatctggcggaggactggttcagcctggcggatctctgagactgtcttgtgccgccagcggcttcagcttcagcgacttttggatgagctgggtccgacaggcccctggcaaaggacttgaatgggtcgccacaatcagccaggccggcagcgagaaggactacgtggactctgtgaagggcagattcaccatcagccgggacaacgccaagaagtccctgtacctccagatgaacagcctgagagccgaggacaccgccgtgtactattgtgcctctggcgtgtacagcttcgactacagaggccagggcaccctggtcacagtctcttctggtaccggcggaggcggatctggcggcggaggtagcggtggcggaggatctgaattcgacgacatccagatgacccagagcagcagcagcttcagcgtgagcctgggcgacagagtgaccatcacctgcatggccagcgaggacatctacatcagactggcctggtaccagcagaagcccggcaacgcccccagactgctgatcagcgccgccaccagcctggagaccggcgtgcccagcagattcagcggcagcggcagcggcaaggactacaccctgagcatcaccagcctgcagaccgaggacgtgggcacctactactgccagcagtactggagcagcccctggaccttcggcggcggcaccaagctggagatcaacctcgagatccagaaccctgatcctgccgtgtaccagctgcgggatagcaagagcagcgacaagagcgtgtgtctgttcaccgacttcgacagccagaccaacgtgtcccagagcaaggactccgacgtgtacatcaccgataagtgcgtgctggacatgcggagcatggacttcaagagcaactccgccgtggcctggtccaacaagtccgatttcgcctgcgccaacgccttcaacaacagcattatccccgaggacacattcttcccaagccccgagagcagctgcgacgtgaagctggtggaaaagagcttcgagacagacaccaacctgaacttccagaacctgagcgtgatcggcttcagaatcctgctgctgaaagtggccggctttaacctgctgatgaccctgcggctgtggtccagccgcgccaagagaagcggatctggcgtgaagcagaccctgaatttcgacctgctgaagctggctggcgacgtggaatccaacccaggccctactagtatggactggatttggcgcatccttttccttgtcggcgctgctaccggcgcgcattccgggccccagctccagctgcaagagtctggacctggcctggtcaagcctagcgagacactgagcctgacctgtaccgtgtccggcgatagcatcagcagcggcgattactactggggctggatcagacagcctcctggcaaaggactggaatggatcggccacatctactacagcggcgtgacctactacaaccccagcctgaagtccagagtgaccatcagcgtggacaccagccggaaccagttctccctgaagctgtctagcgtgacagccgccgataccgccgtgtactactgcaccagagaggacagcagcaactggcggagtagaggccagggaacactggtcacagttagctctggatccggcggaggcggaagtggaggcggaggatctggcggcggaggctctttcgaagacgtgcagctgcaggagagcggccccggcctggtgaagcccagccagagcctgagcctgacctgcaccgtgaccggctacagcatcaccagcgactacacctggaactggatcagacagttccccggcaacaagctggagtggatgggctacatcacctacagcggcagcaccagctacaaccccagcctgaagagcagaaacagcatcaccagagacaccagcaagaaccagttcttcctgcagctgaacagcgtgaccaccgaggacaccgccacctactactgcgccagactgggcagaagatacacaatggactactggggccagggcaccagcgtgaccgtgagcagcacgcgtgaggacctgaagaacgtgttcccacctgaggtggccgtgttcgagcctagcgaggccgagatcagccacacccagaaagccaccctcgtgtgcctggctaccggcttctaccccgaccatgtggaactgtcttggtgggtcaacggcaaagaggtgcacagcggcgtgtgtaccgacccccagccactgaaagaacagcccgccctgaacgacagccggtactgcctgagcagcagactgagagtgtccgccaccttctggcagaacccccggaaccacttcagatgccaggtgcagttctacggcctgagcgagaacgacgagtggacccaggacagagccaagcccgtgacccagatcgtgtctgccgaagcctggggcagagccgattgcggctttaccagcgagagctaccagcagggcgtgctgagcgccaccatcctgtacgagatcctgctgggcaaggccaccctgtacgccgtgctggtgtctgccctggtgctgatggctatggtcaagcggaaggacagccgggga

SEQ ID NO: 2589 - DNA, 2694 bp, Artificial Sequence
  Synthetic Polynucloetide
atggccttaccagtgaccgccttgctcctgccgctggccttgctgctccacgccgccaggccggaagtgcagctggttgaatctggcggaggactggttcagcctggcggatctctgagactgtcttgtgccgccagcggcttcagcttcagcgacttttggatgagctgggtccgacaggcccctggcaaaggacttgaatgggtcgccacaatcagccaggccggcagcgagaaggactacgtggactctgtgaagggcagattcaccatcagccgggacaacgccaagaagtccctgtacctccagatgaacagcctgagagccgaggacaccgccgtgtactattgtgcctctggcgtgtacagcttcgactacagaggccagggcaccctggtcacagtctcttctggtaccggcggaggcggatctggcggcggaggtagcggtggcggaggatctgaattcgacgacatccagatgacccagagccccagcagcctgtctgccagcgtgggcgacagagtgaccatcacctgtagagccagccagagcatcagcagctacctgaactggtatcagcagaagcccggcaaggcccccaaactgctgatctacgacgccagcaacctggaaaccggcgtgcccagcagattttccggcagcggctctggcaccgacttcaccttcaccatcagctccctccagcccgaggacattgccacctactactgccagcagtacgacaacctgcccctgacctttggcggaggcaccaaggtggacatcaagagactcgagatccagaaccctgatcctgccgtgtaccagctgcgggatagcaagagcagcgacaagagcgtgtgtctgttcaccgacttcgacagccagaccaacgtgtcccagagcaaggactccgacgtgtacatcaccgataagtgcgtgctggacatgcggagcatggacttcaagagcaactccgccgtggcctggtccaacaagtccgatttcgcctgcgccaacgccttcaacaacagcattatccccgaggacacattcttcccaagccccgagagcagctgcgacgtgaagctggtggaaaagagcttcgagacagacaccaacctgaacttccagaacctgagcgtgatcggcttcagaatcctgctgctgaaagtggccggctttaacctgctgatgaccctgcggctgtggtccagccgcgccaagagaagcggatctggcgtgaagcagaccctgaatttcgacctgctgaagctggctggcgacgtggaatccaacccaggccctactagtatggactggatttggcgcatccttttccttgtcggcgctgctaccggcgcgcattccgggccccagctccagctgcaagagtctggacctggcctggtcaagcctagcgagacactgagcctgacctgtaccgtgtccggcgatagcatcagcagcggcgattactactggggctggatcagacagcctcctggcaaaggactggaatggatcggccacatctactacagcggcgtgacctactacaaccccagcctgaagtccagagtgaccatcagcgtggacaccagccggaaccagttctccctgaagctgtctagcgtgacagccgccgataccgccgtgtactactgcaccagagaggacagcagcaactggcggagtagaggccagggaacactggtcacagttagctctggatccggcggaggcggaagtggaggcggaggatctggcggcggaggctctttcgaacaggtgcaactggtggaatctggcggcggagtggtgcagcctggcagaagcctgagactgagctgtgccgccagcggcttcacctttagcagctacgccatgcactgggtgcgccaggcccctggaaaaggcctggaatgggtggccgtgatctcctacgacggctccaacaagtattacgccgacagcgtgaagggccggttcaccatctccagagacaacagcaagaacaccctgtacctccagatgaacagcctgcgggccgaggacaccgccgtgtactattgtgccagggctcacaacagcagctcttggagcttcgactactggggccagggcaccctcgtgaccgtgtcatctacgcgtgaggacctgaagaacgtgttcccacctgaggtggccgtgttcgagcctagcgaggccgagatcagccacacccagaaagccaccctcgtgtgcctggctaccggcttctaccccgaccatgtggaactgtcttggtgggtcaacggcaaagaggtgcacagcggcgtgtgtaccgacccccagccactgaaagaacagcccgccctgaacgacagccggtactgcctgagcagcagactgagagtgtccgccaccttctggcagaacccccggaaccacttcagatgccaggtgcagttctacggcctgagcgagaacgacgagtggacccaggacagagccaagcccgtgacccagatcgtgtctgccgaagcctggggcagagccgattgcggctttaccagcgagagctaccagcagggcgtgctgagcgccaccatcctgtacgagatcctgctgggcaaggccaccctgtacgccgtgctggtgtctgccctggtgctgatggctatggtcaagcggaaggacagccgggga

SEQ ID NO: 2590 - DNA, 2721 bp, Artificial Sequence
  Synthetic Polynucloetide
atggccttaccagtgaccgccttgctcctgccgctggccttgctgctccacgccgccaggccggaagtgcagctggttgaatctggcggaggactggttcagcctggcggatctctgagactgtcttgtgccgccagcggcttcagcttcagcgacttttggatgagctgggtccgacaggcccctggcaaaggacttgaatgggtcgccacaatcagccaggccggcagcgagaaggactacgtggactctgtgaagggcagattcaccatcagccgggacaacgccaagaagtccctgtacctccagatgaacagcctgagagccgaggacaccgccgtgtactattgtgcctctggcgtgtacagcttcgactacagaggccagggcaccctggtcacagtctcttctggtaccggcggaggcggatctggcggcggaggtagcggtggcggaggatctgaattcgacgacgtcgtgatgacccagagccctctgagcctgcctgtgtccctgggcgatcaggccagcatctcctgcagatccagccagagactggtgcacagcaacggcaacacctacctgcactggtatctgcagaagcccggccagagccccaagctgctgatctaccgggtgtccaacagattccccggcgtgcccgatagattcagcggctctggcagcggcaccgacttcaccctgaagatcagccgggtggaagccgaggacctgggcatctatttctgcagccagagcacccacgtgccctacacctttggcggaggcaccaagctggaaatcaagcggctcgagatccagaaccctgatcctgccgtgtaccagctgcgggatagcaagagcagcgacaagagcgtgtgtctgttcaccgacttcgacagccagaccaacgtgtcccagagcaaggactccgacgtgtacatcaccgataagtgcgtgctggacatgcggagcatggacttcaagagcaactccgccgtggcctggtccaacaagtccgatttcgcctgcgccaacgccttcaacaacagcattatccccgaggacacattcttcccaagccccgagagcagctgcgacgtgaagctggtggaaaagagcttcgagacagacaccaacctgaacttccagaacctgagcgtgatcggcttcagaatcctgctgctgaaagtggccggctttaacctgctgatgaccctgcggctgtggtccagccgcgccaagagaagcggatctggcgtgaagcagaccctgaatttcgacctgctgaagctggctggcgacgtggaatccaacccaggccctactagtatggactggatttggcgcatccttttccttgtcggcgctgctaccggcgcgcattccgggccccagctccagctgcaagagtctggacctggcctggtcaagcctagcgagacactgagcctgacctgtaccgtgtccggcgatagcatcagcagcggcgattactactggggctggatcagacagcctcctggcaaaggactggaatggatcggccacatctactacagcggcgtgacctactacaaccccagcctgaagtccagagtgaccatcagcgtggacaccagccggaaccagttctccctgaagctgtctagcgtgacagccgccgataccgccgtgtactactgcaccagagaggacagcagcaactggcggagtagaggccagggaacactggtcacagttagctctggatccggcggaggcggaagtggaggcggaggatctggcggcggaggctctttcgaagaagtgcggctgcagcagtctggccccgacctgattaagcctggggccagcgtgaagatgagctgcaaggccagcggctacaccttcaccggctacgtgatgcactgggtcaagcagaggccaggccagggcctggaatggatcggcttcatcaacccctacaacgacgacatccagagcaacgagcggttccggggcaaggccaccctgaccagcgataagagcagcaccaccgcctacatggaactgagcagcctgacctccgaggacagcgccgtgtactactgtgctaggggagccggctacaacttcgacggggcctacagattcttcgacttttggggccagggcaccacactgaccgtgtcctctacgcgtgaggacctgaagaacgtgttcccacctgaggtggccgtgttcgagcctagcgaggccgagatcagccacacccagaaagccaccctcgtgtgcctggctaccggcttctaccccgaccatgtggaactgtcttggtgggtcaacggcaaagaggtgcacagcggcgtgtgtaccgacccccagccactgaaagaacagcccgccctgaacgacagccggtactgcctgagcagcagactgagagtgtccgccaccttctggcagaacccccggaaccacttcagatgccaggtgcagttctacggcctgagcgagaacgacgagtggacccaggacagagccaagcccgtgacccagatcgtgtctgccgaagcctggggcagagccgattgcggctttaccagcgagagctaccagcagggcgtgctgagcgccaccatcctgtacgagatcctgctgggcaaggccaccctgtacgccgtgctggtgtctgccctggtgctgatggctatggtcaagcggaaggacagccgggga

SEQ ID NO: 2591 - DNA, 2694 bp, Artificial Sequence
  Synthetic Polynucloetide
atggccttaccagtgaccgccttgctcctgccgctggccttgctgctccacgccgccaggccggaagtgcagctggttgaatctggcggaggactggttcagcctggcggatctctgagactgtcttgtgccgccagcggcttcagcttcagcgacttttggatgagctgggtccgacaggcccctggcaaaggacttgaatgggtcgccacaatcagccaggccggcagcgagaaggactacgtggactctgtgaagggcagattcaccatcagccgggacaacgccaagaagtccctgtacctccagatgaacagcctgagagccgaggacaccgccgtgtactattgtgcctctggcgtgtacagcttcgactacagaggccagggcaccctggtcacagtctcttctggtaccggcggaggcggatctggcggcggaggtagcggtggcggaggatctgaattcgacagctacgagctgacccagcctcctagcgtgtccgtgtctcctggacagaccgccaccatctcttgcagcggcgatcaactgggcgggaagtacggccactggtatcagaagaagcccggccagagccccgtgctggtgctgtaccaggacagaaaacggcctgccggcatccccgagagattcagcggaagcagcagcggcaacaccatcaccctgaccatcagcggcacccaggccgtggatgaggccgactactactgccaggcttgggacaccaatctgggcggcgtgttcggcggaggcaccaaagtgacagtgctgggacagctcgagatccagaaccctgatcctgccgtgtaccagctgcgggatagcaagagcagcgacaagagcgtgtgtctgttcaccgacttcgacagccagaccaacgtgtcccagagcaaggactccgacgtgtacatcaccgataagtgcgtgctggacatgcggagcatggacttcaagagcaactccgccgtggcctggtccaacaagtccgatttcgcctgcgccaacgccttcaacaacagcattatccccgaggacacattcttcccaagccccgagagcagctgcgacgtgaagctggtggaaaagagcttcgagacagacaccaacctgaacttccagaacctgagcgtgatcggcttcagaatcctgctgctgaaagtggccggctttaacctgctgatgaccctgcggctgtggtccagccgcgccaagagaagcggatctggcgtgaagcagaccctgaatttcgacctgctgaagctggctggcgacgtggaatccaacccaggccctactagtatggactggatttggcgcatccttttccttgtcggcgctgctaccggcgcgcattccgggccccagctccagctgcaagagtctggacctggcctggtcaagcctagcgagacactgagcctgacctgtaccgtgtccggcgatagcatcagcagcggcgattactactggggctggatcagacagcctcctggcaaaggactggaatggatcggccacatctactacagcggcgtgacctactacaaccccagcctgaagtccagagtgaccatcagcgtggacaccagccggaaccagttctccctgaagctgtctagcgtgacagccgccgataccgccgtgtactactgcaccagagaggacagcagcaactggcggagtagaggccagggaacactggtcacagttagctctggatccggcggaggcggaagtggaggcggaggatctggcggcggaggctctttcgaacaggtgcaactggtggaaagcggagccgaagtgaagaaacctggggccagcgtgaaggtgtcctgcaaggccagcggctacacctttaccggctactacatgcactgggtgcgccaggctccaggccagggactggaatggatgggccggatcaaccccaatagcggcggcaccaactacgcccagaaattccagggcagagtgaccatgaccagagacaccagcatcagcaccgcctacatggaactgagccggctgagaagcgacgacaccgccgtgtactactgcgccagccctagaggcagaggcagcgccttcgatatttggggccagggcacactcgtgaccgtgtcctctacgcgtgaggacctgaagaacgtgttcccacctgaggtggccgtgttcgagcctagcgaggccgagatcagccacacccagaaagccaccctcgtgtgcctggctaccggcttctaccccgaccatgtggaactgtcttggtgggtcaacggcaaagaggtgcacagcggcgtgtgtaccgacccccagccactgaaagaacagcccgccctgaacgacagccggtactgcctgagcagcagactgagagtgtccgccaccttctggcagaacccccggaaccacttcagatgccaggtgcagttctacggcctgagcgagaacgacgagtggacccaggacagagccaagcccgtgacccagatcgtgtctgccgaagcctggggcagagccgattgcggctttaccagcgagagctaccagcagggcgtgctgagcgccaccatcctgtacgagatcctgctgggcaaggccaccctgtacgccgtgctggtgtctgccctggtgctgatggctatggtcaagcggaaggacagccgggga

SEQ ID NO: 2592 - DNA, 2703 bp, Artificial Sequence
  Synthetic Polynucloetide
atggccttaccagtgaccgccttgctcctgccgctggccttgctgctccacgccgccaggccggaagtgcagctggttgaatctggcggaggactggttcagcctggcggatctctgagactgtcttgtgccgccagcggcttcagcttcagcgacttttggatgagctgggtccgacaggcccctggcaaaggacttgaatgggtcgccacaatcagccaggccggcagcgagaaggactacgtggactctgtgaagggcagattcaccatcagccgggacaacgccaagaagtccctgtacctccagatgaacagcctgagagccgaggacaccgccgtgtactattgtgcctctggcgtgtacagcttcgactacagaggccagggcaccctggtcacagtctcttctggtaccggcggaggcggatctggcggcggaggtagcggtggcggaggatctgaattcgacaacttcatgctgacccagccccacagcgtgtccgagagccctggcaagaccgtgaccatctcctgcaccagaagcagcggctctatcgccagcaaatacgtgcagtggtatcagcagaggcccggcagcagccctaccaccgtgatctacgaggacaaccagaggcctagcggcgtgcccgatagattcagcggcagcatcgacaccagcagcaacagcgccagcctgaccatcagcggcctgagaacagaggacgaggccgactactactgccacagctacgacagcaacaaccactccgtgttcggcggaggcaccaaagtgacagtgctgggacagctcgagatccagaaccctgatcctgccgtgtaccagctgcgggatagcaagagcagcgacaagagcgtgtgtctgttcaccgacttcgacagccagaccaacgtgtcccagagcaaggactccgacgtgtacatcaccgataagtgcgtgctggacatgcggagcatggacttcaagagcaactccgccgtggcctggtccaacaagtccgatttcgcctgcgccaacgccttcaacaacagcattatccccgaggacacattcttcccaagccccgagagcagctgcgacgtgaagctggtggaaaagagcttcgagacagacaccaacctgaacttccagaacctgagcgtgatcggcttcagaatcctgctgctgaaagtggccggctttaacctgctgatgaccctgcggctgtggtccagccgcgccaagagaagcggatctggcgtgaagcagaccctgaatttcgacctgctgaagctggctggcgacgtggaatccaacccaggccctactagtatggactggatttggcgcatccttttccttgtcggcgctgctaccggcgcgcattccgggccccagctccagctgcaagagtctggacctggcctggtcaagcctagcgagacactgagcctgacctgtaccgtgtccggcgatagcatcagcagcggcgattactactggggctggatcagacagcctcctggcaaaggactggaatggatcggccacatctactacagcggcgtgacctactacaaccccagcctgaagtccagagtgaccatcagcgtggacaccagccggaaccagttctccctgaagctgtctagcgtgacagccgccgataccgccgtgtactactgcaccagagaggacagcagcaactggcggagtagaggccagggaacactggtcacagttagctctggatccggcggaggcggaagtggaggcggaggatctggcggcggaggctctttcgaagaagtgcaactggtggaaagcgggggaggcgtggtgcagccaggcggatctctgagactgagctgtgccgccagcggcttcaccttcagcagctacgccatgagctgggtgcgccaggcccctggaaaaggcctggaatgggtgtccgccatctctggctctggcggcagcacctactacgccgatagcgtgaagggccggttcagcatcagccgggacaacagcaagaacaccctgtacctccagatgaacagcctgcgggccgaggacaccgccgtgtactactgtgccagaaccagaagctccggggccttcgacatctggggccagggaacactcgtgaccgtgtcctctacgcgtgaggacctgaagaacgtgttcccacctgaggtggccgtgttcgagcctagcgaggccgagatcagccacacccagaaagccaccctcgtgtgcctggctaccggcttctaccccgaccatgtggaactgtcttggtgggtcaacggcaaagaggtgcacagcggcgtgtgtaccgacccccagccactgaaagaacagcccgccctgaacgacagccggtactgcctgagcagcagactgagagtgtccgccaccttctggcagaacccccggaaccacttcagatgccaggtgcagttctacggcctgagcgagaacgacgagtggacccaggacagagccaagcccgtgacccagatcgtgtctgccgaagcctggggcagagccgattgcggctttaccagcgagagctaccagcagggcgtgctgagcgccaccatcctgtacgagatcctgctgggcaaggccaccctgtacgccgtgctggtgtctgccctggtgctgatggctatggtcaagcggaaggacagccgggga

SEQ ID NO: 2593 - DNA, 2688 bp, Artificial Sequence
  Synthetic Polynucloetide
atggccttaccagtgaccgccttgctcctgccgctggccttgctgctccacgccgccaggccggaagtgcagctggttgaatctggcggaggactggttcagcctggcggatctctgagactgtcttgtgccgccagcggcttcagcttcagcgacttttggatgagctgggtccgacaggcccctggcaaaggacttgaatgggtcgccacaatcagccaggccggcagcgagaaggactacgtggactctgtgaagggcagattcaccatcagccgggacaacgccaagaagtccctgtacctccagatgaacagcctgagagccgaggacaccgccgtgtactattgtgcctctggcgtgtacagcttcgactacagaggccagggcaccctggtcacagtctcttctggtaccggcggaggcggatctggcggcggaggtagcggtggcggaggatctgaattcgacatccagatgaaccagagccccagcagcctgagcgccagcctgggcgataccatcaccatcacctgtcacgccagccagaacatcaacgtgtggctgagctggtatcagcagaagcccggcaacatccccaagctgctgatctacaaggccagcaacctgcacaccggcgtgcccagcagattttctggcagcggctctggcaccggcttcaccattaccatcagctccctccagcccgaggacattgccacctactactgccagcagggccagagctacccctggacatttggcggaggcaccaagctggaaatcaagagactcgagatccagaaccctgatcctgccgtgtaccagctgcgggatagcaagagcagcgacaagagcgtgtgtctgttcaccgacttcgacagccagaccaacgtgtcccagagcaaggactccgacgtgtacatcaccgataagtgcgtgctggacatgcggagcatggacttcaagagcaactccgccgtggcctggtccaacaagtccgatttcgcctgcgccaacgccttcaacaacagcattatccccgaggacacattcttcccaagccccgagagcagctgcgacgtgaagctggtggaaaagagcttcgagacagacaccaacctgaacttccagaacctgagcgtgatcggcttcagaatcctgctgctgaaagtggccggctttaacctgctgatgaccctgcggctgtggtccagccgcgccaagagaagcggatctggcgtgaagcagaccctgaatttcgacctgctgaagctggctggcgacgtggaatccaacccaggccctactagtatggactggatttggcgcatccttttccttgtcggcgctgctaccggcgcgcattccgggccccagctccagctgcaagagtctggacctggcctggtcaagcctagcgagacactgagcctgacctgtaccgtgtccggcgatagcatcagcagcggcgattactactggggctggatcagacagcctcctggcaaaggactggaatggatcggccacatctactacagcggcgtgacctactacaaccccagcctgaagtccagagtgaccatcagcgtggacaccagccggaaccagttctccctgaagctgtctagcgtgacagccgccgataccgccgtgtactactgcaccagagaggacagcagcaactggcggagtagaggccagggaacactggtcacagttagctctggatccggcggaggcggaagtggaggcggaggatctggcggcggaggctctttcgaagaagtgcaactccagcagagcggcccagagcttgtgaagcctggcgcttccgtgaagattagctgcaaagccagcggctacagcttcaccggctacttcatgaactgggtcaagcagagccacggcaagagcctggagtacatcggcagattcaacccctacaacggcgagacactgtacaaccagaagttcaagggcaaggccaccctgaccgtggacaagagcagcagcaccgtgcacatggaactgctgagcgtgaccagcgaggacagcgccgtgtactactgtggcagaagcggcaacgacgacgctatggactattggggccagggcaccagcgtgaccgtgtctagtgctacgcgtgaggacctgaagaacgtgttcccacctgaggtggccgtgttcgagcctagcgaggccgagatcagccacacccagaaagccaccctcgtgtgcctggctaccggcttctaccccgaccatgtggaactgtcttggtgggtcaacggcaaagaggtgcacagcggcgtgtgtaccgacccccagccactgaaagaacagcccgccctgaacgacagccggtactgcctgagcagcagactgagagtgtccgccaccttctggcagaacccccggaaccacttcagatgccaggtgcagttctacggcctgagcgagaacgacgagtggacccaggacagagccaagcccgtgacccagatcgtgtctgccgaagcctggggcagagccgattgcggctttaccagcgagagctaccagcagggcgtgctgagcgccaccatcctgtacgagatcctgctgggcaaggccaccctgtacgccgtgctggtgtctgccctggtgctgatggctatggtcaagcggaaggacagccgggga

SEQ ID NO: 2594 - DNA, 2691 bp, Artificial Sequence
  Synthetic Polynucloetide
atggccttaccagtgaccgccttgctcctgccgctggccttgctgctccacgccgccaggccggaagtgcagctggttgaatctggcggaggactggttcagcctggcggatctctgagactgtcttgtgccgccagcggcttcagcttcagcgacttttggatgagctgggtccgacaggcccctggcaaaggacttgaatgggtcgccacaatcagccaggccggcagcgagaaggactacgtggactctgtgaagggcagattcaccatcagccgggacaacgccaagaagtccctgtacctccagatgaacagcctgagagccgaggacaccgccgtgtactattgtgcctctggcgtgtacagcttcgactacagaggccagggcaccctggtcacagtctcttctggtaccggcggaggcggatctggcggcggaggtagcggtggcggaggatctgaattcgagatcgtgctgacacagagccctgccaccctgtctctgagccctggcgaaagagccaccctgagctgtagagccagccagagcgtgcggagctacctggcctggtatcagcagaagcctggacaggcccccagactgctgatctacgacgccagcaatcgggccacaggcatccccgccagattttctggctctggcagcggcaccgacttcaccctgacaatcagcagcctggaacccgaggacttcgccgtgtactactgccagcagcggagcaactggccccctacctttggacagggcaccaaggtggaaatcaagctcgagatccagaaccctgatcctgccgtgtaccagctgcgggatagcaagagcagcgacaagagcgtgtgtctgttcaccgacttcgacagccagaccaacgtgtcccagagcaaggactccgacgtgtacatcaccgataagtgcgtgctggacatgcggagcatggacttcaagagcaactccgccgtggcctggtccaacaagtccgatttcgcctgcgccaacgccttcaacaacagcattatccccgaggacacattcttcccaagccccgagagcagctgcgacgtgaagctggtggaaaagagcttcgagacagacaccaacctgaacttccagaacctgagcgtgatcggcttcagaatcctgctgctgaaagtggccggctttaacctgctgatgaccctgcggctgtggtccagccgcgccaagagaagcggatctggcgtgaagcagaccctgaatttcgacctgctgaagctggctggcgacgtggaatccaacccaggccctactagtatggactggatttggcgcatccttttccttgtcggcgctgctaccggcgcgcattccgggccccagctccagctgcaagagtctggacctggcctggtcaagcctagcgagacactgagcctgacctgtaccgtgtccggcgatagcatcagcagcggcgattactactggggctggatcagacagcctcctggcaaaggactggaatggatcggccacatctactacagcggcgtgacctactacaaccccagcctgaagtccagagtgaccatcagcgtggacaccagccggaaccagttctccctgaagctgtctagcgtgacagccgccgataccgccgtgtactactgcaccagagaggacagcagcaactggcggagtagaggccagggaacactggtcacagttagctctggatccggcggaggcggaagtggaggcggaggatctggcggcggaggctctttcgaacaactccaggtgcaggaatctggccccggactcgtgaagcccagcgagacactgagcctgacctgtaccgtgtccggcggcagcatcagcaacagctacttctcctggggctggatcagacagccccctggcaagggcctggaatggatcggcagcttctactacggcgagaaaacctactacaaccccagcctgaagtccagagccaccatcagcatcgacaccagcaagagccagttctccctgaagctgagcagcgtgacagccgccgacaccgccgtgtattattgccccagaggccccaccatgatccggggcgtgatcgactcttggggccagggaacactcgtgaccgtgtcctctacgcgtgaggacctgaagaacgtgttcccacctgaggtggccgtgttcgagcctagcgaggccgagatcagccacacccagaaagccaccctcgtgtgcctggctaccggcttctaccccgaccatgtggaactgtcttggtgggtcaacggcaaagaggtgcacagcggcgtgtgtaccgacccccagccactgaaagaacagcccgccctgaacgacagccggtactgcctgagcagcagactgagagtgtccgccaccttctggcagaacccccggaaccacttcagatgccaggtgcagttctacggcctgagcgagaacgacgagtggacccaggacagagccaagcccgtgacccagatcgtgtctgccgaagcctggggcagagccgattgcggctttaccagcgagagctaccagcagggcgtgctgagcgccaccatcctgtacgagatcctgctgggcaaggccaccctgtacgccgtgctggtgtctgccctggtgctgatggctatggtcaagcggaaggacagccgggga

SEQ ID NO: 2595 - DNA, 2718 bp, Artificial Sequence
  Synthetic Polynucloetide
atggccttaccagtgaccgccttgctcctgccgctggccttgctgctccacgccgccaggccggaagtgcagctggttgaatctggcggaggactggttcagcctggcggatctctgagactgtcttgtgccgccagcggcttcagcttcagcgacttttggatgagctgggtccgacaggcccctggcaaaggacttgaatgggtcgccacaatcagccaggccggcagcgagaaggactacgtggactctgtgaagggcagattcaccatcagccgggacaacgccaagaagtccctgtacctccagatgaacagcctgagagccgaggacaccgccgtgtactattgtgcctctggcgtgtacagcttcgactacagaggccagggcaccctggtcacagtctcttctggtaccggcggaggcggatctggcggcggaggtagcggtggcggaggatctgaattcgacatcgtgatgacccagacccccctgagcctgcctgtgacacctggcgagcctgccagcatctcctgcagaagcagcagaagcctgctggacagcgacgacggcaacacctacctggactggtatctgcagaaacccggccagagcccccaactgctgatctacaccctgagctacagagccagcggcgtgcccgatagattttccggctctggcagcggcaccgacttcaccctgaagatcagccgggtggaagccgaggacgtgggcgtgtactactgtatgcagcgggtggaatttcccatcaccttcggccagggcaccagactggaaatcaagagactcgagatccagaaccctgatcctgccgtgtaccagctgcgggatagcaagagcagcgacaagagcgtgtgtctgttcaccgacttcgacagccagaccaacgtgtcccagagcaaggactccgacgtgtacatcaccgataagtgcgtgctggacatgcggagcatggacttcaagagcaactccgccgtggcctggtccaacaagtccgatttcgcctgcgccaacgccttcaacaacagcattatccccgaggacacattcttcccaagccccgagagcagctgcgacgtgaagctggtggaaaagagcttcgagacagacaccaacctgaacttccagaacctgagcgtgatcggcttcagaatcctgctgctgaaagtggccggctttaacctgctgatgaccctgcggctgtggtccagccgcgccaagagaagcggatctggcgtgaagcagaccctgaatttcgacctgctgaagctggctggcgacgtggaatccaacccaggccctactagtatggactggatttggcgcatccttttccttgtcggcgctgctaccggcgcgcattccgggccccagctccagctgcaagagtctggacctggcctggtcaagcctagcgagacactgagcctgacctgtaccgtgtccggcgatagcatcagcagcggcgattactactggggctggatcagacagcctcctggcaaaggactggaatggatcggccacatctactacagcggcgtgacctactacaaccccagcctgaagtccagagtgaccatcagcgtggacaccagccggaaccagttctccctgaagctgtctagcgtgacagccgccgataccgccgtgtactactgcaccagagaggacagcagcaactggcggagtagaggccagggaacactggtcacagttagctctggatccggcggaggcggaagtggaggcggaggatctggcggcggaggctctttcgaacaggtgcaactggtggaatctggcgggggagtggtgcagcctggcagatccctgagactgagctgtgccgccagcggcttcatcttcagcagatacggaatgcactgggtgcgccaggcccctggcaagggactgaaatgggtggccgtgatttggtacgacggcagcaacaagctgtacgccgacagcgtgaagggccggttcaccatcagcagagacaacagcaagaacaccctgtacctgcagatgaacagcctgcgggccgaggacaccgccgtgtactattgcgccagagactactacgacaacagccggcaccactggggcttcgactattggggccagggaacccttgtgaccgtgtcctctacgcgtgaggacctgaagaacgtgttcccacctgaggtggccgtgttcgagcctagcgaggccgagatcagccacacccagaaagccaccctcgtgtgcctggctaccggcttctaccccgaccatgtggaactgtcttggtgggtcaacggcaaagaggtgcacagcggcgtgtgtaccgacccccagccactgaaagaacagcccgccctgaacgacagccggtactgcctgagcagcagactgagagtgtccgccaccttctggcagaacccccggaaccacttcagatgccaggtgcagttctacggcctgagcgagaacgacgagtggacccaggacagagccaagcccgtgacccagatcgtgtctgccgaagcctggggcagagccgattgcggctttaccagcgagagctaccagcagggcgtgctgagcgccaccatcctgtacgagatcctgctgggcaaggccaccctgtacgccgtgctggtgtctgccctggtgctgatggctatggtcaagcggaaggacagccgggga

SEQ ID NO: 2596 - DNA, 2688 bp, Artificial Sequence
  Synthetic Polynucloetide
atggccttaccagtgaccgccttgctcctgccgctggccttgctgctccacgccgccaggccggaagtgcagctggttgaatctggcggaggactggttcagcctggcggatctctgagactgtcttgtgccgccagcggcttcagcttcagcgacttttggatgagctgggtccgacaggcccctggcaaaggacttgaatgggtcgccacaatcagccaggccggcagcgagaaggactacgtggactctgtgaagggcagattcaccatcagccgggacaacgccaagaagtccctgtacctccagatgaacagcctgagagccgaggacaccgccgtgtactattgtgcctctggcgtgtacagcttcgactacagaggccagggcaccctggtcacagtctcttctggtaccggcggaggcggatctggcggcggaggtagcggtggcggaggatctgaattcgagatccagatgacccagagccccagcagcatgtctgccagcctgggcgacaccatcaccatcacatgccaggccacccaggacatcttcaagaacctgaactggtatcagcagaagcccggcaagccccccagcctgctgatctactatgccaccgaactggccgagggcgtgcccagcagattttctggcagcggcagcggctccgactacagcctgaccatcagcaacctggaaagcgaggacttcgccgcctactactgcctccagttcttcgagttcccattcaccttcggctccggcaccaagctggaaatgaagctcgagatccagaaccctgatcctgccgtgtaccagctgcgggatagcaagagcagcgacaagagcgtgtgtctgttcaccgacttcgacagccagaccaacgtgtcccagagcaaggactccgacgtgtacatcaccgataagtgcgtgctggacatgcggagcatggacttcaagagcaactccgccgtggcctggtccaacaagtccgatttcgcctgcgccaacgccttcaacaacagcattatccccgaggacacattcttcccaagccccgagagcagctgcgacgtgaagctggtggaaaagagcttcgagacagacaccaacctgaacttccagaacctgagcgtgatcggcttcagaatcctgctgctgaaagtggccggctttaacctgctgatgaccctgcggctgtggtccagccgcgccaagagaagcggatctggcgtgaagcagaccctgaatttcgacctgctgaagctggctggcgacgtggaatccaacccaggccctactagtatggactggatttggcgcatccttttccttgtcggcgctgctaccggcgcgcattccgggccccagctccagctgcaagagtctggacctggcctggtcaagcctagcgagacactgagcctgacctgtaccgtgtccggcgatagcatcagcagcggcgattactactggggctggatcagacagcctcctggcaaaggactggaatggatcggccacatctactacagcggcgtgacctactacaaccccagcctgaagtccagagtgaccatcagcgtggacaccagccggaaccagttctccctgaagctgtctagcgtgacagccgccgataccgccgtgtactactgcaccagagaggacagcagcaactggcggagtagaggccagggaacactggtcacagttagctctggatccggcggaggcggaagtggaggcggaggatctggcggcggaggctctttcgaacaggtgcaactccagcagtctggcgctgagcttgtgcggcctggcacctctgtgaaggtgtcctgtaaagccagcggctacgtgttcaccaactactggatcgagtggatcaagcagcggccaggccagggcctggaatggatcggcgtgatgaatccaggcagcggcgagacaacctacaacgagaagttcaagggcaaggccaccctgaccgccgacaagagcagcagcacagcctacatgcaactgtcctccctgaccagcgtggacagcgccgtgtacttctgcgccagggaccacgaccgggactactacgctatggactactggggccagggcaccagcgtgaccgtgtcatctacgcgtgaggacctgaagaacgtgttcccacctgaggtggccgtgttcgagcctagcgaggccgagatcagccacacccagaaagccaccctcgtgtgcctggctaccggcttctaccccgaccatgtggaactgtcttggtgggtcaacggcaaagaggtgcacagcggcgtgtgtaccgacccccagccactgaaagaacagcccgccctgaacgacagccggtactgcctgagcagcagactgagagtgtccgccaccttctggcagaacccccggaaccacttcagatgccaggtgcagttctacggcctgagcgagaacgacgagtggacccaggacagagccaagcccgtgacccagatcgtgtctgccgaagcctggggcagagccgattgcggctttaccagcgagagctaccagcagggcgtgctgagcgccaccatcctgtacgagatcctgctgggcaaggccaccctgtacgccgtgctggtgtctgccctggtgctgatggctatggtcaagcggaaggacagccgggga

SEQ ID NO: 2597 - DNA, 2679 bp, Artificial Sequence
  Synthetic Polynucloetide
atggccttaccagtgaccgccttgctcctgccgctggccttgctgctccacgccgccaggccggaagtgcagctggttgaatctggcggaggactggttcagcctggcggatctctgagactgtcttgtgccgccagcggcttcagcttcagcgacttttggatgagctgggtccgacaggcccctggcaaaggacttgaatgggtcgccacaatcagccaggccggcagcgagaaggactacgtggactctgtgaagggcagattcaccatcagccgggacaacgccaagaagtccctgtacctccagatgaacagcctgagagccgaggacaccgccgtgtactattgtgcctctggcgtgtacagcttcgactacagaggccagggcaccctggtcacagtctcttctggtaccggcggaggcggatctggcggcggaggtagcggtggcggaggatctgaattcgacatcctgctgacacagagccccgccatcctgtccgtgtctccaggcgagagagtgtcctttagctgccgggccagccagaacatcggcaccagcatccactggtatcagcagcggaccaacggcagccccagactgctgattaagtacgccagcgagtccgtgtccggcatccccagcagattttctggcagcggctccggcaccgacttcaccctgagcatcaacagcgtggaaagcgaggacattgccgactactactgccagcacaccaatagctggcccaccacctttggcggaggcaccaagctggaaatcaagagactcgagatccagaaccctgatcctgccgtgtaccagctgcgggatagcaagagcagcgacaagagcgtgtgtctgttcaccgacttcgacagccagaccaacgtgtcccagagcaaggactccgacgtgtacatcaccgataagtgcgtgctggacatgcggagcatggacttcaagagcaactccgccgtggcctggtccaacaagtccgatttcgcctgcgccaacgccttcaacaacagcattatccccgaggacacattcttcccaagccccgagagcagctgcgacgtgaagctggtggaaaagagcttcgagacagacaccaacctgaacttccagaacctgagcgtgatcggcttcagaatcctgctgctgaaagtggccggctttaacctgctgatgaccctgcggctgtggtccagccgcgccaagagaagcggatctggcgtgaagcagaccctgaatttcgacctgctgaagctggctggcgacgtggaatccaacccaggccctactagtatggactggatttggcgcatccttttccttgtcggcgctgctaccggcgcgcattccgggccccagctccagctgcaagagtctggacctggcctggtcaagcctagcgagacactgagcctgacctgtaccgtgtccggcgatagcatcagcagcggcgattactactggggctggatcagacagcctcctggcaaaggactggaatggatcggccacatctactacagcggcgtgacctactacaaccccagcctgaagtccagagtgaccatcagcgtggacaccagccggaaccagttctccctgaagctgtctagcgtgacagccgccgataccgccgtgtactactgcaccagagaggacagcagcaactggcggagtagaggccagggaacactggtcacagttagctctggatccggcggaggcggaagtggaggcggaggatctggcggcggaggctctttcgaacaggtgcaactccagcagtccgacgccgagcttgtgaagcctggcgcttccgtgaagattagctgcaaggccagcggctacaccttcaccgaccacgccattcactgggtcaagcagaagcccgagcagggcctggaatggatcggctacttcagccccggcaacggcgacatcaagtacaacgagaagttcaagggcaaggccaccctgaccgccgacaagagcagcagcacagcctacatgcaactgaacagcctgaccagcgaggactccgccgtgtacttctgcaagcggagctacggcaactacgactactggggccagggcaccacactgaccgtgtctagtacgcgtgaggacctgaagaacgtgttcccacctgaggtggccgtgttcgagcctagcgaggccgagatcagccacacccagaaagccaccctcgtgtgcctggctaccggcttctaccccgaccatgtggaactgtcttggtgggtcaacggcaaagaggtgcacagcggcgtgtgtaccgacccccagccactgaaagaacagcccgccctgaacgacagccggtactgcctgagcagcagactgagagtgtccgccaccttctggcagaacccccggaaccacttcagatgccaggtgcagttctacggcctgagcgagaacgacgagtggacccaggacagagccaagcccgtgacccagatcgtgtctgccgaagcctggggcagagccgattgcggctttaccagcgagagctaccagcagggcgtgctgagcgccaccatcctgtacgagatcctgctgggcaaggccaccctgtacgccgtgctggtgtctgccctggtgctgatggctatggtcaagcggaaggacagccgggga

SEQ ID NO: 2598 - DNA, 2694 bp, Artificial Sequence
  Synthetic Polynucloetide
atggccttaccagtgaccgccttgctcctgccgctggccttgctgctccacgccgccaggccggaagtgcagctggttgaatctggcggaggactggttcagcctggcggatctctgagactgtcttgtgccgccagcggcttcagcttcagcgacttttggatgagctgggtccgacaggcccctggcaaaggacttgaatgggtcgccacaatcagccaggccggcagcgagaaggactacgtggactctgtgaagggcagattcaccatcagccgggacaacgccaagaagtccctgtacctccagatgaacagcctgagagccgaggacaccgccgtgtactattgtgcctctggcgtgtacagcttcgactacagaggccagggcaccctggtcacagtctcttctggtaccggcggaggcggatctggcggcggaggtagcggtggcggaggatctgaattcgacatcgtgatgacccagagccccgatagcctggccgtgtctctgggagagagagccaccatcaactgcaagagcagccagagcctgctgaacagcggcgaccagaagaactacctgacctggtatcagcagaagcccggccagccccccaagctgctgatctactgggccagcaccagagaaagcggcgtgcccgatagattcagcggcagcggaagtggcaccgacttcaccctgaccatcagttctcttcaggccgaggacgtggccgtgtactactgccagaacgactacagctaccccctgaccttcggccagggcaccaaggtggaaatcaagctcgagatccagaaccctgatcctgccgtgtaccagctgcgggatagcaagagcagcgacaagagcgtgtgtctgttcaccgacttcgacagccagaccaacgtgtcccagagcaaggactccgacgtgtacatcaccgataagtgcgtgctggacatgcggagcatggacttcaagagcaactccgccgtggcctggtccaacaagtccgatttcgcctgcgccaacgccttcaacaacagcattatccccgaggacacattcttcccaagccccgagagcagctgcgacgtgaagctggtggaaaagagcttcgagacagacaccaacctgaacttccagaacctgagcgtgatcggcttcagaatcctgctgctgaaagtggccggctttaacctgctgatgaccctgcggctgtggtccagccgcgccaagagaagcggatctggcgtgaagcagaccctgaatttcgacctgctgaagctggctggcgacgtggaatccaacccaggccctactagtatggactggatttggcgcatccttttccttgtcggcgctgctaccggcgcgcattccgggccccagctccagctgcaagagtctggacctggcctggtcaagcctagcgagacactgagcctgacctgtaccgtgtccggcgatagcatcagcagcggcgattactactggggctggatcagacagcctcctggcaaaggactggaatggatcggccacatctactacagcggcgtgacctactacaaccccagcctgaagtccagagtgaccatcagcgtggacaccagccggaaccagttctccctgaagctgtctagcgtgacagccgccgataccgccgtgtactactgcaccagagaggacagcagcaactggcggagtagaggccagggaacactggtcacagttagctctggatccggcggaggcggaagtggaggcggaggatctggcggcggaggctctttcgaacaggtgcagctggtgcagtctggggccgaagtgaagaaaaccggcagcagcgtgaaggtgtcctgcaaggccagcggctacacctttaccgaccacgccattcacgtgtggcggcaggctccaggacaggccctggaatggatgggccacttcagccccggcaacaccgacatcaagtacaacgacaagttcaagggcagagtgaccctgaccgtggaccgcagcatgagcaccgcctacatggaactgagcagcctgcggagcgaggacaccgccatgtactattgcaagaccagcaccttctttttcgactactggggccagggaacaatggtcaccgtgtccagcacgcgtgaggacctgaagaacgtgttcccacctgaggtggccgtgttcgagcctagcgaggccgagatcagccacacccagaaagccaccctcgtgtgcctggctaccggcttctaccccgaccatgtggaactgtcttggtgggtcaacggcaaagaggtgcacagcggcgtgtgtaccgacccccagccactgaaagaacagcccgccctgaacgacagccggtactgcctgagcagcagactgagagtgtccgccaccttctggcagaacccccggaaccacttcagatgccaggtgcagttctacggcctgagcgagaacgacgagtggacccaggacagagccaagcccgtgacccagatcgtgtctgccgaagcctggggcagagccgattgcggctttaccagcgagagctaccagcagggcgtgctgagcgccaccatcctgtacgagatcctgctgggcaaggccaccctgtacgccgtgctggtgtctgccctggtgctgatggctatggtcaagcggaaggacagccgggga

SEQ ID NO: 2599 - DNA, 2691 bp, Artificial Sequence
  Synthetic Polynucloetide
atggccttaccagtgaccgccttgctcctgccgctggccttgctgctccacgccgccaggccggaagtgcagctggttgaatctggcggaggactggttcagcctggcggatctctgagactgtcttgtgccgccagcggcttcagcttcagcgacttttggatgagctgggtccgacaggcccctggcaaaggacttgaatgggtcgccacaatcagccaggccggcagcgagaaggactacgtggactctgtgaagggcagattcaccatcagccgggacaacgccaagaagtccctgtacctccagatgaacagcctgagagccgaggacaccgccgtgtactattgtgcctctggcgtgtacagcttcgactacagaggccagggcaccctggtcacagtctcttctggtaccggcggaggcggatctggcggcggaggtagcggtggcggaggatctgaattcgacatccagatgacccagagccccagcagcctgtctgccagcgtgggcgacagagtgaccatcacatgcaaggccagccaggacgtgtccattgccgtggcctggtatcagcagaagcccggcaaggcccccaaggtgctgatctacagcgccagctacagatacaccggcgtgcccgacagattcagcggctctggcagcggcaccgacttcaccttcaccatcagctccctccagcccgaggatattgccgtgtactactgccagcagcactacatcacccccctgacctttggcggaggcaccaaggtggaaatcaagctcgagatccagaaccctgatcctgccgtgtaccagctgcgggatagcaagagcagcgacaagagcgtgtgtctgttcaccgacttcgacagccagaccaacgtgtcccagagcaaggactccgacgtgtacatcaccgataagtgcgtgctggacatgcggagcatggacttcaagagcaactccgccgtggcctggtccaacaagtccgatttcgcctgcgccaacgccttcaacaacagcattatccccgaggacacattcttcccaagccccgagagcagctgcgacgtgaagctggtggaaaagagcttcgagacagacaccaacctgaacttccagaacctgagcgtgatcggcttcagaatcctgctgctgaaagtggccggctttaacctgctgatgaccctgcggctgtggtccagccgcgccaagagaagcggatctggcgtgaagcagaccctgaatttcgacctgctgaagctggctggcgacgtggaatccaacccaggccctactagtatggactggatttggcgcatccttttccttgtcggcgctgctaccggcgcgcattccgggccccagctccagctgcaagagtctggacctggcctggtcaagcctagcgagacactgagcctgacctgtaccgtgtccggcgatagcatcagcagcggcgattactactggggctggatcagacagcctcctggcaaaggactggaatggatcggccacatctactacagcggcgtgacctactacaaccccagcctgaagtccagagtgaccatcagcgtggacaccagccggaaccagttctccctgaagctgtctagcgtgacagccgccgataccgccgtgtactactgcaccagagaggacagcagcaactggcggagtagaggccagggaacactggtcacagttagctctggatccggcggaggcggaagtggaggcggaggatctggcggcggaggctctttcgaacagatccaactggtgcagagcggccacgaagtgaagaaacctggggccagcgtgaaggtgtcctgcaaagccagcggctacacctttaccaactacggcatgaactgggtgcgccaggcccctggacagggcctggaatggatgggctggatcaacaccaagaccggcgagcccacctacgccgaagagttcaagggcagattcgtgttcagcctggaaaccagcgcctccaccgcctacctccagatcagctctctgaaggccgaggacaccgccatgtacttttgcggcagaggcggctacggcagcagctactggtacttcgatgtgtggggccagggcaccaccgtgaccgtgtcatctacgcgtgaggacctgaagaacgtgttcccacctgaggtggccgtgttcgagcctagcgaggccgagatcagccacacccagaaagccaccctcgtgtgcctggctaccggcttctaccccgaccatgtggaactgtcttggtgggtcaacggcaaagaggtgcacagcggcgtgtgtaccgacccccagccactgaaagaacagcccgccctgaacgacagccggtactgcctgagcagcagactgagagtgtccgccaccttctggcagaacccccggaaccacttcagatgccaggtgcagttctacggcctgagcgagaacgacgagtggacccaggacagagccaagcccgtgacccagatcgtgtctgccgaagcctggggcagagccgattgcggctttaccagcgagagctaccagcagggcgtgctgagcgccaccatcctgtacgagatcctgctgggcaaggccaccctgtacgccgtgctggtgtctgccctggtgctgatggctatggtcaagcggaaggacagccgggga

SEQ ID NO: 2600 - DNA, 2697 bp, Artificial Sequence
  Synthetic Polynucloetide
atggccttaccagtgaccgccttgctcctgccgctggccttgctgctccacgccgccaggccggaagtgcagctggttgaatctggcggaggactggttcagcctggcggatctctgagactgtcttgtgccgccagcggcttcagcttcagcgacttttggatgagctgggtccgacaggcccctggcaaaggacttgaatgggtcgccacaatcagccaggccggcagcgagaaggactacgtggactctgtgaagggcagattcaccatcagccgggacaacgccaagaagtccctgtacctccagatgaacagcctgagagccgaggacaccgccgtgtactattgtgcctctggcgtgtacagcttcgactacagaggccagggcaccctggtcacagtctcttctggtaccggcggaggcggatctggcggcggaggtagcggtggcggaggatctgaattcgacatcgtgatgacccagagccccgatagcctggccgtgtctctgggagagagagccaccatcaactgccgggccagcaagagcgtgtccaccagcggctacagctacatgcactggtatcagcagaagcccggccagccccccaagctgctgatctacctggcctccaacctggaaagcggcgtgcccgatagattcagcggcagcggctctggcaccgacttcaccctgaccatcagttctcttcaggccgaggacgtggccgtgtactactgccagcacagcagagagctgccctacaccttcggccagggcaccaagctggaaatcaagctcgagatccagaaccctgatcctgccgtgtaccagctgcgggatagcaagagcagcgacaagagcgtgtgtctgttcaccgacttcgacagccagaccaacgtgtcccagagcaaggactccgacgtgtacatcaccgataagtgcgtgctggacatgcggagcatggacttcaagagcaactccgccgtggcctggtccaacaagtccgatttcgcctgcgccaacgccttcaacaacagcattatccccgaggacacattcttcccaagccccgagagcagctgcgacgtgaagctggtggaaaagagcttcgagacagacaccaacctgaacttccagaacctgagcgtgatcggcttcagaatcctgctgctgaaagtggccggctttaacctgctgatgaccctgcggctgtggtccagccgcgccaagagaagcggatctggcgtgaagcagaccctgaatttcgacctgctgaagctggctggcgacgtggaatccaacccaggccctactagtatggactggatttggcgcatccttttccttgtcggcgctgctaccggcgcgcattccgggccccagctccagctgcaagagtctggacctggcctggtcaagcctagcgagacactgagcctgacctgtaccgtgtccggcgatagcatcagcagcggcgattactactggggctggatcagacagcctcctggcaaaggactggaatggatcggccacatctactacagcggcgtgacctactacaaccccagcctgaagtccagagtgaccatcagcgtggacaccagccggaaccagttctccctgaagctgtctagcgtgacagccgccgataccgccgtgtactactgcaccagagaggacagcagcaactggcggagtagaggccagggaacactggtcacagttagctctggatccggcggaggcggaagtggaggcggaggatctggcggcggaggctctttcgaacaggtgcaactccaggaatctggccctggccttgtgaagcccagcgagacactgagcctgacctgtaccgtgtccggcggcagcatcagctcttacggcgtgcactggattcggcagcctccaggcaagggcctggaatggatcggcgtgatctggacctccggcgtgaccgactacaacagcgccctgatgggcagagtgaccatctccgtggacaccagcaagaaccagttcagcctgaagctgagcagcgtgacagccgccgataccgccgtgtattattgcgccagagatggcgactacgaccgctacacaatggactactggggccagggaacccttgtgaccgtgtcctctacgcgtgaggacctgaagaacgtgttcccacctgaggtggccgtgttcgagcctagcgaggccgagatcagccacacccagaaagccaccctcgtgtgcctggctaccggcttctaccccgaccatgtggaactgtcttggtgggtcaacggcaaagaggtgcacagcggcgtgtgtaccgacccccagccactgaaagaacagcccgccctgaacgacagccggtactgcctgagcagcagactgagagtgtccgccaccttctggcagaacccccggaaccacttcagatgccaggtgcagttctacggcctgagcgagaacgacgagtggacccaggacagagccaagcccgtgacccagatcgtgtctgccgaagcctggggcagagccgattgcggctttaccagcgagagctaccagcagggcgtgctgagcgccaccatcctgtacgagatcctgctgggcaaggccaccctgtacgccgtgctggtgtctgccctggtgctgatggctatggtcaagcggaaggacagccgggga

SEQ ID NO: 2601 - DNA, 2697 bp, Artificial Sequence
  Synthetic Polynucloetide
atggccttaccagtgaccgccttgctcctgccgctggccttgctgctccacgccgccaggccggaagtgcagctggttgaatctggcggaggactggttcagcctggcggatctctgagactgtcttgtgccgccagcggcttcagcttcagcgacttttggatgagctgggtccgacaggcccctggcaaaggacttgaatgggtcgccacaatcagccaggccggcagcgagaaggactacgtggactctgtgaagggcagattcaccatcagccgggacaacgccaagaagtccctgtacctccagatgaacagcctgagagccgaggacaccgccgtgtactattgtgcctctggcgtgtacagcttcgactacagaggccagggcaccctggtcacagtctcttctggtaccggcggaggcggatctggcggcggaggtagcggtggcggaggatctgaattcgacatccagatgacccagagccccagcagcctgtctgccagcgtgggcgacagagtgaccatcacctgtagagccagccagagcatcggcaccagcctgcactggtatcagcagaagcctggcaaggcccccaagctgctgattaagttcgccagcagactgcagagcggcgtgcccagcagattttctggcagcggctccggcaccgacttcaccctgacaatcagctccctgcagcccgaggacttcgccacctactactgccagcagagccccggcttccctccaacctttggacagggcaccaagctggaaatcaagcggctcgagatccagaaccctgatcctgccgtgtaccagctgcgggatagcaagagcagcgacaagagcgtgtgtctgttcaccgacttcgacagccagaccaacgtgtcccagagcaaggactccgacgtgtacatcaccgataagtgcgtgctggacatgcggagcatggacttcaagagcaactccgccgtggcctggtccaacaagtccgatttcgcctgcgccaacgccttcaacaacagcattatccccgaggacacattcttcccaagccccgagagcagctgcgacgtgaagctggtggaaaagagcttcgagacagacaccaacctgaacttccagaacctgagcgtgatcggcttcagaatcctgctgctgaaagtggccggctttaacctgctgatgaccctgcggctgtggtccagccgcgccaagagaagcggatctggcgtgaagcagaccctgaatttcgacctgctgaagctggctggcgacgtggaatccaacccaggccctactagtatggactggatttggcgcatccttttccttgtcggcgctgctaccggcgcgcattccgggccccagctccagctgcaagagtctggacctggcctggtcaagcctagcgagacactgagcctgacctgtaccgtgtccggcgatagcatcagcagcggcgattactactggggctggatcagacagcctcctggcaaaggactggaatggatcggccacatctactacagcggcgtgacctactacaaccccagcctgaagtccagagtgaccatcagcgtggacaccagccggaaccagttctccctgaagctgtctagcgtgacagccgccgataccgccgtgtactactgcaccagagaggacagcagcaactggcggagtagaggccagggaacactggtcacagttagctctggatccggcggaggcggaagtggaggcggaggatctggcggcggaggctctttcgaacaggtgcaactggtggaatctggcggcggacttgtgaagccaggcggcagcctgagactgagctgtgccgccagcggcttcagcatcaccaccagcggctactactggacctggatcagacagttccccggcaagggcctggaatggatgggctacatcggctacaacagcaagacctactacaaccccgccctgaagtcccggatcaccatcagcagagacaacgccaagaacagcctgtacctgcagatgaactccctgagagccgaggataccgccgtgtactactgcgccagatccctgtacggcggctacaaggacgccttcgatagctggggccagggaacccttgtgaccgtgtctagcacgcgtgaggacctgaagaacgtgttcccacctgaggtggccgtgttcgagcctagcgaggccgagatcagccacacccagaaagccaccctcgtgtgcctggctaccggcttctaccccgaccatgtggaactgtcttggtgggtcaacggcaaagaggtgcacagcggcgtgtgtaccgacccccagccactgaaagaacagcccgccctgaacgacagccggtactgcctgagcagcagactgagagtgtccgccaccttctggcagaacccccggaaccacttcagatgccaggtgcagttctacggcctgagcgagaacgacgagtggacccaggacagagccaagcccgtgacccagatcgtgtctgccgaagcctggggcagagccgattgcggctttaccagcgagagctaccagcagggcgtgctgagcgccaccatcctgtacgagatcctgctgggcaaggccaccctgtacgccgtgctggtgtctgccctggtgctgatggctatggtcaagcggaaggacagccgggga

SEQ ID NO: 2602 - DNA, 2712 bp, Artificial Sequence
  Synthetic Polynucloetide
atggccttaccagtgaccgccttgctcctgccgctggccttgctgctccacgccgccaggccggaagtgcagctggttgaatctggcggaggactggttcagcctggcggatctctgagactgtcttgtgccgccagcggcttcagcttcagcgacttttggatgagctgggtccgacaggcccctggcaaaggacttgaatgggtcgccacaatcagccaggccggcagcgagaaggactacgtggactctgtgaagggcagattcaccatcagccgggacaacgccaagaagtccctgtacctccagatgaacagcctgagagccgaggacaccgccgtgtactattgtgcctctggcgtgtacagcttcgactacagaggccagggcaccctggtcacagtctcttctggtaccggcggaggcggatctggcggcggaggtagcggtggcggaggatctgaattcgacgagatcgtgctgacccagagccctctgagcctgcctgtgacacctggcgagcctgccagcatctcctgtagaagcagccagagcctgctgcacagcatcggctacaactacctggactggtatctccagaagcccggccagagcccccaactgctgatctacctgggcagcaacagagccagcggcgtgcccgatagattttccggcagcggctccggcaccgacttcaccctgaagatcagccgggtggaagccgaggacgtgggcgtgtactactgtatgcaggccctccagacccccctgacctttggcggaggcaccaaggtggaaatcaagcggctcgagatccagaaccctgatcctgccgtgtaccagctgcgggatagcaagagcagcgacaagagcgtgtgtctgttcaccgacttcgacagccagaccaacgtgtcccagagcaaggactccgacgtgtacatcaccgataagtgcgtgctggacatgcggagcatggacttcaagagcaactccgccgtggcctggtccaacaagtccgatttcgcctgcgccaacgccttcaacaacagcattatccccgaggacacattcttcccaagccccgagagcagctgcgacgtgaagctggtggaaaagagcttcgagacagacaccaacctgaacttccagaacctgagcgtgatcggcttcagaatcctgctgctgaaagtggccggctttaacctgctgatgaccctgcggctgtggtccagccgcgccaagagaagcggatctggcgtgaagcagaccctgaatttcgacctgctgaagctggctggcgacgtggaatccaacccaggccctactagtatggactggatttggcgcatccttttccttgtcggcgctgctaccggcgcgcattccgggccccagctccagctgcaagagtctggacctggcctggtcaagcctagcgagacactgagcctgacctgtaccgtgtccggcgatagcatcagcagcggcgattactactggggctggatcagacagcctcctggcaaaggactggaatggatcggccacatctactacagcggcgtgacctactacaaccccagcctgaagtccagagtgaccatcagcgtggacaccagccggaaccagttctccctgaagctgtctagcgtgacagccgccgataccgccgtgtactactgcaccagagaggacagcagcaactggcggagtagaggccagggaacactggtcacagttagctctggatccggcggaggcggaagtggaggcggaggatctggcggcggaggctctttcgaagaagtgcaactggtggaaagcggaggcggcgtggtgcagcctggaagaagcctgagactgagctgtgccgccagcggcttcaccttccggtcctacggaatgcactgggtgcgccaggcccctggcaaaggactggaatgggtggccgtgatctcctacgacggctccaacaagtactacaccgacagcgtgaacggcagattcaccatcagcagagacaacagcaagaacaccctgtacctccagatgaacagcctgcgggccgaggacaccgccgtgtactattgtgctagaggcggaggctactacgagacaagcggccctgattactggggccagggcacactcgtgaccgtgtctagtacgcgtgaggacctgaagaacgtgttcccacctgaggtggccgtgttcgagcctagcgaggccgagatcagccacacccagaaagccaccctcgtgtgcctggctaccggcttctaccccgaccatgtggaactgtcttggtgggtcaacggcaaagaggtgcacagcggcgtgtgtaccgacccccagccactgaaagaacagcccgccctgaacgacagccggtactgcctgagcagcagactgagagtgtccgccaccttctggcagaacccccggaaccacttcagatgccaggtgcagttctacggcctgagcgagaacgacgagtggacccaggacagagccaagcccgtgacccagatcgtgtctgccgaagcctggggcagagccgattgcggctttaccagcgagagctaccagcagggcgtgctgagcgccaccatcctgtacgagatcctgctgggcaaggccaccctgtacgccgtgctggtgtctgccctggtgctgatggctatggtcaagcggaaggacagccgggga

SEQ ID NO: 2603 - DNA, 2706 bp, Artificial Sequence
  Synthetic Polynucloetide
atggccttaccagtgaccgccttgctcctgccgctggccttgctgctccacgccgccaggccggaagtgcagctggttgaatctggcggaggactggttcagcctggcggatctctgagactgtcttgtgccgccagcggcttcagcttcagcgacttttggatgagctgggtccgacaggcccctggcaaaggacttgaatgggtcgccacaatcagccaggccggcagcgagaaggactacgtggactctgtgaagggcagattcaccatcagccgggacaacgccaagaagtccctgtacctccagatgaacagcctgagagccgaggacaccgccgtgtactattgtgcctctggcgtgtacagcttcgactacagaggccagggcaccctggtcacagtctcttctggtaccggcggaggcggatctggcggcggaggtagcggtggcggaggatctgaattcgacgacgtcgtgatgacccagagccctctgagcctgcctgtgacacctggcgagcctgccagcatctcctgtagaagcagccagagcctgctgcacagcatcggctacaactacctgcactggtttctccagaagcccggccagagcccccaactgctgatctacctgggcagcaacagagccagcggcgtgcccgatagattttccggcagcggctccggcaccgacttcaccctgaagatcagccgggtggaagccgaggacgtgggcgtgtactactgtatgcaggccctccagacccctcccacctttggacagggcaccagactggaaatcaagcggctcgagatccagaaccctgatcctgccgtgtaccagctgcgggatagcaagagcagcgacaagagcgtgtgtctgttcaccgacttcgacagccagaccaacgtgtcccagagcaaggactccgacgtgtacatcaccgataagtgcgtgctggacatgcggagcatggacttcaagagcaactccgccgtggcctggtccaacaagtccgatttcgcctgcgccaacgccttcaacaacagcattatccccgaggacacattcttcccaagccccgagagcagctgcgacgtgaagctggtggaaaagagcttcgagacagacaccaacctgaacttccagaacctgagcgtgatcggcttcagaatcctgctgctgaaagtggccggctttaacctgctgatgaccctgcggctgtggtccagccgcgccaagagaagcggatctggcgtgaagcagaccctgaatttcgacctgctgaagctggctggcgacgtggaatccaacccaggccctactagtatggactggatttggcgcatccttttccttgtcggcgctgctaccggcgcgcattccgggccccagctccagctgcaagagtctggacctggcctggtcaagcctagcgagacactgagcctgacctgtaccgtgtccggcgatagcatcagcagcggcgattactactggggctggatcagacagcctcctggcaaaggactggaatggatcggccacatctactacagcggcgtgacctactacaaccccagcctgaagtccagagtgaccatcagcgtggacaccagccggaaccagttctccctgaagctgtctagcgtgacagccgccgataccgccgtgtactactgcaccagagaggacagcagcaactggcggagtagaggccagggaacactggtcacagttagctctggatccggcggaggcggaagtggaggcggaggatctggcggcggaggctctttcgaacaactccaactccaggaaagcggccctggcctcgtgaagcctagcggcacactgagcctgacatgtgccgtgtctggcggcagcatcagcagcagcaactggtggtcttgggtgcgccagcctcctggcaagggcctggaatggatcggcgaaatctaccacagcggcagcaccaactacaaccccagcctgaagtccagagtgaccatcagcgtggacaagagcaagaaccagttctccctgaagctgagcagcgtgacagccgccgataccgccgtgtactattgcgtgggcagcccctacggcgactacgtgctggattattggggccagggcaccctcgtgaccgtgtctagtacgcgtgaggacctgaagaacgtgttcccacctgaggtggccgtgttcgagcctagcgaggccgagatcagccacacccagaaagccaccctcgtgtgcctggctaccggcttctaccccgaccatgtggaactgtcttggtgggtcaacggcaaagaggtgcacagcggcgtgtgtaccgacccccagccactgaaagaacagcccgccctgaacgacagccggtactgcctgagcagcagactgagagtgtccgccaccttctggcagaacccccggaaccacttcagatgccaggtgcagttctacggcctgagcgagaacgacgagtggacccaggacagagccaagcccgtgacccagatcgtgtctgccgaagcctggggcagagccgattgcggctttaccagcgagagctaccagcagggcgtgctgagcgccaccatcctgtacgagatcctgctgggcaaggccaccctgtacgccgtgctggtgtctgccctggtgctgatggctatggtcaagcggaaggacagccgggga

SEQ ID NO: 2604 - DNA, 2700 bp, Artificial Sequence
  Synthetic Polynucloetide
atggccttaccagtgaccgccttgctcctgccgctggccttgctgctccacgccgccaggccggaagtgcagctggttgaatctggcggaggactggttcagcctggcggatctctgagactgtcttgtgccgccagcggcttcagcttcagcgacttttggatgagctgggtccgacaggcccctggcaaaggacttgaatgggtcgccacaatcagccaggccggcagcgagaaggactacgtggactctgtgaagggcagattcaccatcagccgggacaacgccaagaagtccctgtacctccagatgaacagcctgagagccgaggacaccgccgtgtactattgtgcctctggcgtgtacagcttcgactacagaggccagggcaccctggtcacagtctcttctggtaccggcggaggcggatctggcggcggaggtagcggtggcggaggatctgaattcgacgagatcgtgctgacacagagccctggcaccctgagcctgtctctgggagagagagccacactgagctgtcgggccagccagtctatcagcagcagcttcctggcctggtatcagcagaagcccggccaggcccctaagctgctgatctacgccgccagcacaagagccaccggcatccccgatagattcagcggctctggcagcggcaccgacttcaccctgaccatcagcagactggaacccgaggacttcgccgtgtactactgccagcagtacggcagaagcctgagcttcggcggaggcaccaaggtggaagtgaagctcgagatccagaaccctgatcctgccgtgtaccagctgcgggatagcaagagcagcgacaagagcgtgtgtctgttcaccgacttcgacagccagaccaacgtgtcccagagcaaggactccgacgtgtacatcaccgataagtgcgtgctggacatgcggagcatggacttcaagagcaactccgccgtggcctggtccaacaagtccgatttcgcctgcgccaacgccttcaacaacagcattatccccgaggacacattcttcccaagccccgagagcagctgcgacgtgaagctggtggaaaagagcttcgagacagacaccaacctgaacttccagaacctgagcgtgatcggcttcagaatcctgctgctgaaagtggccggctttaacctgctgatgaccctgcggctgtggtccagccgcgccaagagaagcggatctggcgtgaagcagaccctgaatttcgacctgctgaagctggctggcgacgtggaatccaacccaggccctactagtatggactggatttggcgcatccttttccttgtcggcgctgctaccggcgcgcattccgggccccagctccagctgcaagagtctggacctggcctggtcaagcctagcgagacactgagcctgacctgtaccgtgtccggcgatagcatcagcagcggcgattactactggggctggatcagacagcctcctggcaaaggactggaatggatcggccacatctactacagcggcgtgacctactacaaccccagcctgaagtccagagtgaccatcagcgtggacaccagccggaaccagttctccctgaagctgtctagcgtgacagccgccgataccgccgtgtactactgcaccagagaggacagcagcaactggcggagtagaggccagggaacactggtcacagttagctctggatccggcggaggcggaagtggaggcggaggatctggcggcggaggctctttcgaacaggtgcaactccagcagtctggccccggactcgtgaagcctagccagacactgagcctgacctgcgccatcagcggcgatagcgtgtccggcaatagcgccacctggaactggatcagacagagcccatctcggggcctggaatggctgggccggacctactaccgcagcaagtggaaccacgactacgccgagagcgtgaagtcccggatcaccatcaaccccgacaccagcaagaaccagttctccttgcaactgaacagcgtgacccccgaggacacagccgtgtattattgcgccagaggcgacagcagctcttggtacgccttcgactattggggccagggcaccctcgtgaccgtgtctagtacgcgtgaggacctgaagaacgtgttcccacctgaggtggccgtgttcgagcctagcgaggccgagatcagccacacccagaaagccaccctcgtgtgcctggctaccggcttctaccccgaccatgtggaactgtcttggtgggtcaacggcaaagaggtgcacagcggcgtgtgtaccgacccccagccactgaaagaacagcccgccctgaacgacagccggtactgcctgagcagcagactgagagtgtccgccaccttctggcagaacccccggaaccacttcagatgccaggtgcagttctacggcctgagcgagaacgacgagtggacccaggacagagccaagcccgtgacccagatcgtgtctgccgaagcctggggcagagccgattgcggctttaccagcgagagctaccagcagggcgtgctgagcgccaccatcctgtacgagatcctgctgggcaaggccaccctgtacgccgtgctggtgtctgccctggtgctgatggctatggtcaagcggaaggacagccgggga

SEQ ID NO: 2605 - DNA, 2697 bp, Artificial Sequence
  Synthetic Polynucloetide
atggccttaccagtgaccgccttgctcctgccgctggccttgctgctccacgccgccaggccggaagtgcagctggttgaatctggcggaggactggttcagcctggcggatctctgagactgtcttgtgccgccagcggcttcagcttcagcgacttttggatgagctgggtccgacaggcccctggcaaaggacttgaatgggtcgccacaatcagccaggccggcagcgagaaggactacgtggactctgtgaagggcagattcaccatcagccgggacaacgccaagaagtccctgtacctccagatgaacagcctgagagccgaggacaccgccgtgtactattgtgcctctggcgtgtacagcttcgactacagaggccagggcaccctggtcacagtctcttctggtaccggcggaggcggatctggcggcggaggtagcggtggcggaggatctgaattcgaccagagcgtcgtgacacagcctcctagcgtgtcagtggcccctggcaagaccgccagaatcacctgtggccggaacaacatcggcagcaagagcgtgcactggtatcagcagaagcccggccaggctcctgtgctggtggtgtacgacgacagcgacagacccagcggcatccccgagagattcagcggcagcaactccggcaataccgccaccctgaccatcagcagagtggaagccggcgacgaggccgactactactgccaagtgtgggacagcagcagcgatcacgtggtgtttggcggaggcaccaagctgacagtgctgggtctcgagatccagaaccctgatcctgccgtgtaccagctgcgggatagcaagagcagcgacaagagcgtgtgtctgttcaccgacttcgacagccagaccaacgtgtcccagagcaaggactccgacgtgtacatcaccgataagtgcgtgctggacatgcggagcatggacttcaagagcaactccgccgtggcctggtccaacaagtccgatttcgcctgcgccaacgccttcaacaacagcattatccccgaggacacattcttcccaagccccgagagcagctgcgacgtgaagctggtggaaaagagcttcgagacagacaccaacctgaacttccagaacctgagcgtgatcggcttcagaatcctgctgctgaaagtggccggctttaacctgctgatgaccctgcggctgtggtccagccgcgccaagagaagcggatctggcgtgaagcagaccctgaatttcgacctgctgaagctggctggcgacgtggaatccaacccaggccctactagtatggactggatttggcgcatccttttccttgtcggcgctgctaccggcgcgcattccgggccccagctccagctgcaagagtctggacctggcctggtcaagcctagcgagacactgagcctgacctgtaccgtgtccggcgatagcatcagcagcggcgattactactggggctggatcagacagcctcctggcaaaggactggaatggatcggccacatctactacagcggcgtgacctactacaaccccagcctgaagtccagagtgaccatcagcgtggacaccagccggaaccagttctccctgaagctgtctagcgtgacagccgccgataccgccgtgtactactgcaccagagaggacagcagcaactggcggagtagaggccagggaacactggtcacagttagctctggatccggcggaggcggaagtggaggcggaggatctggcggcggaggctctttcgaagtgcaactggtgcagtctggcggaggggtcatgcggcctggcggatctctgagactgtcttgtgccgccagcggcttcaccttcgacgactacggcatgagctgggtgcgccaggcccctggaaaaggcctggaatgggtgtccggcatcaactggaatggcggcagcaccggctacgccgattctgtgcggggcagattcaccatcagccgggacaacgccaagaacagcctgtacctgcagatgaactccctgcgggccgaggacaccgccctgtactattgcgccagagagcggggctacggctaccacgaccctcacgattattggggccagggcacccttgttaccgtgtcctctacgcgtgaggacctgaagaacgtgttcccacctgaggtggccgtgttcgagcctagcgaggccgagatcagccacacccagaaagccaccctcgtgtgcctggctaccggcttctaccccgaccatgtggaactgtcttggtgggtcaacggcaaagaggtgcacagcggcgtgtgtaccgacccccagccactgaaagaacagcccgccctgaacgacagccggtactgcctgagcagcagactgagagtgtccgccaccttctggcagaacccccggaaccacttcagatgccaggtgcagttctacggcctgagcgagaacgacgagtggacccaggacagagccaagcccgtgacccagatcgtgtctgccgaagcctggggcagagccgattgcggctttaccagcgagagctaccagcagggcgtgctgagcgccaccatcctgtacgagatcctgctgggcaaggccaccctgtacgccgtgctggtgtctgccctggtgctgatggctatggtcaagcggaaggacagccgggga

SEQ ID NO: 2606 - DNA, 2736 bp, Artificial Sequence
  Synthetic Polynucloetide
atggccttaccagtgaccgccttgctcctgccgctggccttgctgctccacgccgccaggccggaagtgcagctggttgaatctggcggaggactggttcagcctggcggatctctgagactgtcttgtgccgccagcggcttcagcttcagcgacttttggatgagctgggtccgacaggcccctggcaaaggacttgaatgggtcgccacaatcagccaggccggcagcgagaaggactacgtggactctgtgaagggcagattcaccatcagccgggacaacgccaagaagtccctgtacctccagatgaacagcctgagagccgaggacaccgccgtgtactattgtgcctctggcgtgtacagcttcgactacagaggccagggcaccctggtcacagtctcttctggtaccggcggaggcggatctggcggcggaggtagcggtggcggaggatctgaattcgaacagaaactcatcagtgaagaagacctggaattccaggctgtcgtgacacagcctcctagcgcctctggcacaccaggccagagagtgaccatctcctgtagcggcagcagcagcaacatcggcagcaacaccgtgaactggtatcagcaggtgcccggcaccgctcccaagctgctgatctacagcaacaaccagcggcccagcggcgtgcccgatagattttctggcagcaagagcggcaccagcgccagcctggctatctctggactccagtccgaggacgaggccgactactattgcgccgcctgggacgatagcctgaacggctgggtgttcggcggaggcaccaagctgacagtgctgctcgagatccagaaccctgatcctgccgtgtaccagctgcgggatagcaagagcagcgacaagagcgtgtgtctgttcaccgacttcgacagccagaccaacgtgtcccagagcaaggactccgacgtgtacatcaccgataagtgcgtgctggacatgcggagcatggacttcaagagcaactccgccgtggcctggtccaacaagtccgatttcgcctgcgccaacgccttcaacaacagcattatccccgaggacacattcttcccaagccccgagagcagctgcgacgtgaagctggtggaaaagagcttcgagacagacaccaacctgaacttccagaacctgagcgtgatcggcttcagaatcctgctgctgaaagtggccggctttaacctgctgatgaccctgcggctgtggtccagccgcgccaagagaagcggatctggcgtgaagcagaccctgaatttcgacctgctgaagctggctggcgacgtggaatccaacccaggccctactagtatggactggatttggcgcatccttttccttgtcggcgctgctaccggcgcgcattccgggccccagctccagctgcaagagtctggacctggcctggtcaagcctagcgagacactgagcctgacctgtaccgtgtccggcgatagcatcagcagcggcgattactactggggctggatcagacagcctcctggcaaaggactggaatggatcggccacatctactacagcggcgtgacctactacaaccccagcctgaagtccagagtgaccatcagcgtggacaccagccggaaccagttctccctgaagctgtctagcgtgacagccgccgataccgccgtgtactactgcaccagagaggacagcagcaactggcggagtagaggccagggaacactggtcacagttagctctggatccggcggaggcggaagtggaggcggaggatctggcggcggaggctctttcgaacagatgcaactggtgcagagcggagccgaagtgaaagagcctggcgagagcctgcggatctcctgcaagggcagcggctacagcttcaccaatttctggatctcttgggtgcgccagatgcccggcaagggcctggaatggatgggcagagtggaccccggctactcctacagcacctacagccctagcttccagggccacgtgaccatcagcgccgacaagagcaccagcaccgcctacctccagtggaacagcctgaaggccagcgacaccgccatgtactactgcgccagagtgcagtacagcggctattacgattggttcgacccctggggccagggcacactcgtgacagtgtcaagcacgcgtgaggacctgaagaacgtgttcccacctgaggtggccgtgttcgagcctagcgaggccgagatcagccacacccagaaagccaccctcgtgtgcctggctaccggcttctaccccgaccatgtggaactgtcttggtgggtcaacggcaaagaggtgcacagcggcgtgtgtaccgacccccagccactgaaagaacagcccgccctgaacgacagccggtactgcctgagcagcagactgagagtgtccgccaccttctggcagaacccccggaaccacttcagatgccaggtgcagttctacggcctgagcgagaacgacgagtggacccaggacagagccaagcccgtgacccagatcgtgtctgccgaagcctggggcagagccgattgcggctttaccagcgagagctaccagcagggcgtgctgagcgccaccatcctgtacgagatcctgctgggcaaggccaccctgtacgccgtgctggtgtctgccctggtgctgatggctatggtcaagcggaaggacagccgggga

SEQ ID NO: 2607 - DNA, 2718 bp, Artificial Sequence
  Synthetic Polynucloetide
atggccttaccagtgaccgccttgctcctgccgctggccttgctgctccacgccgccaggccggaagtgcagctggttgaatctggcggaggactggttcagcctggcggatctctgagactgtcttgtgccgccagcggcttcagcttcagcgacttttggatgagctgggtccgacaggcccctggcaaaggacttgaatgggtcgccacaatcagccaggccggcagcgagaaggactacgtggactctgtgaagggcagattcaccatcagccgggacaacgccaagaagtccctgtacctccagatgaacagcctgagagccgaggacaccgccgtgtactattgtgcctctggcgtgtacagcttcgactacagaggccagggcaccctggtcacagtctcttctggtaccggcggaggcggatctggcggcggaggtagcggtggcggaggatctgaattcgaacagaaactcatcagtgaagaagacctggaattcgacatccagatgacccagagccccagcacactgagcgccagcgtgggcgacagagtgaccatcacctgtcgggccagccagaacatcaacaagtggctggcctggtatcagcagaggcccggaaaagccccccagctgctgatctacaaggccagcagcctggaaagcggcgtgcccagcagattttctggcagcggctctggcaccgagtacaccctgaccatcagctccctccagcccgacgacttcgccacctactactgccagcagtacaacagctacgccaccttcggccagggcaccaaggtggaaatcaagagactcgagatccagaaccctgatcctgccgtgtaccagctgcgggatagcaagagcagcgacaagagcgtgtgtctgttcaccgacttcgacagccagaccaacgtgtcccagagcaaggactccgacgtgtacatcaccgataagtgcgtgctggacatgcggagcatggacttcaagagcaactccgccgtggcctggtccaacaagtccgatttcgcctgcgccaacgccttcaacaacagcattatccccgaggacacattcttcccaagccccgagagcagctgcgacgtgaagctggtggaaaagagcttcgagacagacaccaacctgaacttccagaacctgagcgtgatcggcttcagaatcctgctgctgaaagtggccggctttaacctgctgatgaccctgcggctgtggtccagccgcgccaagagaagcggatctggcgtgaagcagaccctgaatttcgacctgctgaagctggctggcgacgtggaatccaacccaggccctactagtatggactggatttggcgcatccttttccttgtcggcgctgctaccggcgcgcattccgggccccagctccagctgcaagagtctggacctggcctggtcaagcctagcgagacactgagcctgacctgtaccgtgtccggcgatagcatcagcagcggcgattactactggggctggatcagacagcctcctggcaaaggactggaatggatcggccacatctactacagcggcgtgacctactacaaccccagcctgaagtccagagtgaccatcagcgtggacaccagccggaaccagttctccctgaagctgtctagcgtgacagccgccgataccgccgtgtactactgcaccagagaggacagcagcaactggcggagtagaggccagggaacactggtcacagttagctctggatccggcggaggcggaagtggaggcggaggatctggcggcggaggctctttcgaacaggtgcagctggtgcagtctggggccgaagtgaagaagcctggcgagagcctgaagatcagctgcaagggctccggctacaacttctctaacaagtggatcggctgggtgcgccagctgcctggcagaggactggaatggatcgccatcatctaccccggctacagcgacatcacctacagccccagcttccagggccgcgtgacaatcagcgccgacaccagcatcaacaccgcctacctgcactggcacagcctgaaggccagcgacaccgccatgtactactgcgtgcggcatacagccctggctggcttcgattattggggcctgggcaccctcgtgaccgtgtctagtacgcgtgaggacctgaagaacgtgttcccacctgaggtggccgtgttcgagcctagcgaggccgagatcagccacacccagaaagccaccctcgtgtgcctggctaccggcttctaccccgaccatgtggaactgtcttggtgggtcaacggcaaagaggtgcacagcggcgtgtgtaccgacccccagccactgaaagaacagcccgccctgaacgacagccggtactgcctgagcagcagactgagagtgtccgccaccttctggcagaacccccggaaccacttcagatgccaggtgcagttctacggcctgagcgagaacgacgagtggacccaggacagagccaagcccgtgacccagatcgtgtctgccgaagcctggggcagagccgattgcggctttaccagcgagagctaccagcagggcgtgctgagcgccaccatcctgtacgagatcctgctgggcaaggccaccctgtacgccgtgctggtgtctgccctggtgctgatggctatggtcaagcggaaggacagccgggga

SEQ ID NO: 2608 - DNA, 2694 bp, Artificial Sequence
  Synthetic Polynucloetide
atggccttaccagtgaccgccttgctcctgccgctggccttgctgctccacgccgccaggccggaagtgcagctggttgaatctggcggaggactggttcagcctggcggatctctgagactgtcttgtgccgccagcggcttcagcttcagcgacttttggatgagctgggtccgacaggcccctggcaaaggacttgaatgggtcgccacaatcagccaggccggcagcgagaaggactacgtggactctgtgaagggcagattcaccatcagccgggacaacgccaagaagtccctgtacctccagatgaacagcctgagagccgaggacaccgccgtgtactattgtgcctctggcgtgtacagcttcgactacagaggccagggcaccctggtcacagtctcttctggtaccggcggaggcggatctggcggcggaggtagcggtggcggaggatctgaattcgacatcgtgctgacacagagccctgcttctctggccgtgtctctgggacagagagccaccatcagctgtagagccagcgagagcgtggacaactacggcaacaccttcatgcactggtatcagcagaagcccggccagcctcctaagctgctgatctacagagccagcaacctggaaagcggcatccccgccagattttctggcagcggcagcagaaccgacttcaccctgaccatcaatcccgtggaagccgacgacgtggcaacctactactgccagcagagcaacgaggaccctcctacatttggagccggcaccaagctggaactgaaactcgagatccagaaccctgatcctgccgtgtaccagctgcgggatagcaagagcagcgacaagagcgtgtgtctgttcaccgacttcgacagccagaccaacgtgtcccagagcaaggactccgacgtgtacatcaccgataagtgcgtgctggacatgcggagcatggacttcaagagcaactccgccgtggcctggtccaacaagtccgatttcgcctgcgccaacgccttcaacaacagcattatccccgaggacacattcttcccaagccccgagagcagctgcgacgtgaagctggtggaaaagagcttcgagacagacaccaacctgaacttccagaacctgagcgtgatcggcttcagaatcctgctgctgaaagtggccggctttaacctgctgatgaccctgcggctgtggtccagccgcgccaagagaagcggatctggcgtgaagcagaccctgaatttcgacctgctgaagctggctggcgacgtggaatccaacccaggccctactagtatggactggatttggcgcatccttttccttgtcggcgctgctaccggcgcgcattccgggccccagctccagctgcaagagtctggacctggcctggtcaagcctagcgagacactgagcctgacctgtaccgtgtccggcgatagcatcagcagcggcgattactactggggctggatcagacagcctcctggcaaaggactggaatggatcggccacatctactacagcggcgtgacctactacaaccccagcctgaagtccagagtgaccatcagcgtggacaccagccggaaccagttctccctgaagctgtctagcgtgacagccgccgataccgccgtgtactactgcaccagagaggacagcagcaactggcggagtagaggccagggaacactggtcacagttagctctggatccggcggaggcggaagtggaggcggaggatctggcggcggaggctctttcgaacagattcagctggtgcagtctggccccgagctgaagaaacctggcgagacagtgaagatcagctgcaaggccagcggctacatcttcaccaattacggcatgaactgggtcaagcaggcccctggcaagagcttcaagtggatgggctggatcaacacctacaccggcgagagcacatacagcgccgacttcaagggcagattcgccttcagcctggaaaccagcgccagcacagcctacctgcacatcaacgacctgaagaacgaggacaccgccacctacttttgcgccagaagcggcggctacgaccctatggattattggggccagggcaccagcgtgaccgtttcttctacgcgtgaggacctgaagaacgtgttcccacctgaggtggccgtgttcgagcctagcgaggccgagatcagccacacccagaaagccaccctcgtgtgcctggctaccggcttctaccccgaccatgtggaactgtcttggtgggtcaacggcaaagaggtgcacagcggcgtgtgtaccgacccccagccactgaaagaacagcccgccctgaacgacagccggtactgcctgagcagcagactgagagtgtccgccaccttctggcagaacccccggaaccacttcagatgccaggtgcagttctacggcctgagcgagaacgacgagtggacccaggacagagccaagcccgtgacccagatcgtgtctgccgaagcctggggcagagccgattgcggctttaccagcgagagctaccagcagggcgtgctgagcgccaccatcctgtacgagatcctgctgggcaaggccaccctgtacgccgtgctggtgtctgccctggtgctgatggctatggtcaagcggaaggacagccgggga

SEQ ID NO: 2609 - DNA, 2691 bp, Artificial Sequence
  Synthetic Polynucloetide
atggccttaccagtgaccgccttgctcctgccgctggccttgctgctccacgccgccaggccggaagtgcagctggttgaatctggcggaggactggttcagcctggcggatctctgagactgtcttgtgccgccagcggcttcagcttcagcgacttttggatgagctgggtccgacaggcccctggcaaaggacttgaatgggtcgccacaatcagccaggccggcagcgagaaggactacgtggactctgtgaagggcagattcaccatcagccgggacaacgccaagaagtccctgtacctccagatgaacagcctgagagccgaggacaccgccgtgtactattgtgcctctggcgtgtacagcttcgactacagaggccagggcaccctggtcacagtctcttctggtaccggcggaggcggatctggcggcggaggtagcggtggcggaggatctgaattcgacgagatcgtgctgacacagagccctggcaccctgagcctgtctccaggcgaaagagccacactgagctgtcgggccagccagagcgtgtccaatacctacctggcctggtatcaccagaggcccggacaggctccccggctgctgatctatggcgcttctagcagagccaccggcatccccgatagattcagcggctctggcagcggcaccgacttcgccctgacaatcagctccctggaacccgaggacttcgccgtgtactactgccagcagtacagcaactcctggaccttcggccagggcaccaaggtggaaatcaagagactcgagatccagaaccctgatcctgccgtgtaccagctgcgggatagcaagagcagcgacaagagcgtgtgtctgttcaccgacttcgacagccagaccaacgtgtcccagagcaaggactccgacgtgtacatcaccgataagtgcgtgctggacatgcggagcatggacttcaagagcaactccgccgtggcctggtccaacaagtccgatttcgcctgcgccaacgccttcaacaacagcattatccccgaggacacattcttcccaagccccgagagcagctgcgacgtgaagctggtggaaaagagcttcgagacagacaccaacctgaacttccagaacctgagcgtgatcggcttcagaatcctgctgctgaaagtggccggctttaacctgctgatgaccctgcggctgtggtccagccgcgccaagagaagcggatctggcgtgaagcagaccctgaatttcgacctgctgaagctggctggcgacgtggaatccaacccaggccctactagtatggactggatttggcgcatccttttccttgtcggcgctgctaccggcgcgcattccgggccccagctccagctgcaagagtctggacctggcctggtcaagcctagcgagacactgagcctgacctgtaccgtgtccggcgatagcatcagcagcggcgattactactggggctggatcagacagcctcctggcaaaggactggaatggatcggccacatctactacagcggcgtgacctactacaaccccagcctgaagtccagagtgaccatcagcgtggacaccagccggaaccagttctccctgaagctgtctagcgtgacagccgccgataccgccgtgtactactgcaccagagaggacagcagcaactggcggagtagaggccagggaacactggtcacagttagctctggatccggcggaggcggaagtggaggcggaggatctggcggcggaggctctttcgaacaggtgcaactggtggaatctggcgggggagtggtgcagcctggcagaagcctgagactgtcttgtgccgccagcggcttcaccttcagcagctacgacatgcactgggtgcgccaggcccctggcaaaggactggaatgggtggccgtgatctcctacgacggcaccaacgagtattacgccgacagcgtgaagggccggttcaccatctccagagacaccagcaagaacaccctgtacctccagatgaacagcctgcgggccgaggacacagccgtgtattattgcgccagagagcggtacttcgactggtccttcgactactggggccagggaaccctggtgtccgtgtctagtacgcgtgaggacctgaagaacgtgttcccacctgaggtggccgtgttcgagcctagcgaggccgagatcagccacacccagaaagccaccctcgtgtgcctggctaccggcttctaccccgaccatgtggaactgtcttggtgggtcaacggcaaagaggtgcacagcggcgtgtgtaccgacccccagccactgaaagaacagcccgccctgaacgacagccggtactgcctgagcagcagactgagagtgtccgccaccttctggcagaacccccggaaccacttcagatgccaggtgcagttctacggcctgagcgagaacgacgagtggacccaggacagagccaagcccgtgacccagatcgtgtctgccgaagcctggggcagagccgattgcggctttaccagcgagagctaccagcagggcgtgctgagcgccaccatcctgtacgagatcctgctgggcaaggccaccctgtacgccgtgctggtgtctgccctggtgctgatggctatggtcaagcggaaggacagccgggga

SEQ ID NO: 2610 - DNA, 2688 bp, Artificial Sequence
  Synthetic Polynucloetide
atggccttaccagtgaccgccttgctcctgccgctggccttgctgctccacgccgccaggccggaagtgcagctggttgaatctggcggaggactggttcagcctggcggatctctgagactgtcttgtgccgccagcggcttcagcttcagcgacttttggatgagctgggtccgacaggcccctggcaaaggacttgaatgggtcgccacaatcagccaggccggcagcgagaaggactacgtggactctgtgaagggcagattcaccatcagccgggacaacgccaagaagtccctgtacctccagatgaacagcctgagagccgaggacaccgccgtgtactattgtgcctctggcgtgtacagcttcgactacagaggccagggcaccctggtcacagtctcttctggtaccggcggaggcggatctggcggcggaggtagcggtggcggaggatctgaattcgacgagctgacacaggaccctgctgtgtctgttgccctgggccagacagtgcggattacctgtcaaggcgacagcctgagaagcaactacgccaactggtatcagcagaagcccggacaggctcccgtgctggttatctacggccagaacaacagacccagcggcatccccgatagattcagcggctctagctctggcaataccgccagcctgacaatcactggcgctcaggctgccgatgaggccgactactactgcgatagcagagtgtccaccggcaatcacgtggtgtttggcggcggaacaaagctgacagtgctcggacaactcgagatccagaaccctgatcctgccgtgtaccagctgcgggatagcaagagcagcgacaagagcgtgtgtctgttcaccgacttcgacagccagaccaacgtgtcccagagcaaggactccgacgtgtacatcaccgataagtgcgtgctggacatgcggagcatggacttcaagagcaactccgccgtggcctggtccaacaagtccgatttcgcctgcgccaacgccttcaacaacagcattatccccgaggacacattcttcccaagccccgagagcagctgcgacgtgaagctggtggaaaagagcttcgagacagacaccaacctgaacttccagaacctgagcgtgatcggcttcagaatcctgctgctgaaagtggccggctttaacctgctgatgaccctgcggctgtggtccagccgcgccaagagaagcggatctggcgtgaagcagaccctgaatttcgacctgctgaagctggctggcgacgtggaatccaacccaggccctactagtatggactggatttggcgcatccttttccttgtcggcgctgctaccggcgcgcattccgggccccagctccagctgcaagagtctggacctggcctggtcaagcctagcgagacactgagcctgacctgtaccgtgtccggcgatagcatcagcagcggcgattactactggggctggatcagacagcctcctggcaaaggactggaatggatcggccacatctactacagcggcgtgacctactacaaccccagcctgaagtccagagtgaccatcagcgtggacaccagccggaaccagttctccctgaagctgtctagcgtgacagccgccgataccgccgtgtactactgcaccagagaggacagcagcaactggcggagtagaggccagggaacactggtcacagttagctctggatccggcggaggcggaagtggaggcggaggatctggcggcggaggctctttcgaagaagttcagctggtgcagagcggagccgaagtgaagaaacctggggcctctgtgaaggtgtcctgcaaggcttccggctacacctttaccagctacgccatgcactgggtccgacaggcacctggacaacggcttgaatggatgggctggatcaacgccggcaacggcaacaccaagtacagccagaaattccagggccgcgtgaccatcaccagagatacaagcgccagcaccgcctacatggaactgtctagcctgagatccgaggacaccgccgtgtactactgtgccagagacatcagctacggcagcttcgactattggggccagggcacactggtcaccgttagctctacgcgtgaggacctgaagaacgtgttcccacctgaggtggccgtgttcgagcctagcgaggccgagatcagccacacccagaaagccaccctcgtgtgcctggctaccggcttctaccccgaccatgtggaactgtcttggtgggtcaacggcaaagaggtgcacagcggcgtgtgtaccgacccccagccactgaaagaacagcccgccctgaacgacagccggtactgcctgagcagcagactgagagtgtccgccaccttctggcagaacccccggaaccacttcagatgccaggtgcagttctacggcctgagcgagaacgacgagtggacccaggacagagccaagcccgtgacccagatcgtgtctgccgaagcctggggcagagccgattgcggctttaccagcgagagctaccagcagggcgtgctgagcgccaccatcctgtacgagatcctgctgggcaaggccaccctgtacgccgtgctggtgtctgccctggtgctgatggctatggtcaagcggaaggacagccgggga

SEQ ID NO: 2611 - DNA, 2694 bp, Artificial Sequence
  Synthetic Polynucloetide
atggccttaccagtgaccgccttgctcctgccgctggccttgctgctccacgccgccaggccggaagtgcagctggttgaatctggcggaggactggttcagcctggcggatctctgagactgtcttgtgccgccagcggcttcagcttcagcgacttttggatgagctgggtccgacaggcccctggcaaaggacttgaatgggtcgccacaatcagccaggccggcagcgagaaggactacgtggactctgtgaagggcagattcaccatcagccgggacaacgccaagaagtccctgtacctccagatgaacagcctgagagccgaggacaccgccgtgtactattgtgcctctggcgtgtacagcttcgactacagaggccagggcaccctggtcacagtctcttctggtaccggcggaggcggatctggcggcggaggtagcggtggcggaggatctgaattcgacgacatcgtgctgacacagacaccagccacactgagcgtgacacctggcgattctgtgtccctgagctgtagagccagccagagcatcagcaacaacctgcactggtatcagcagaagtcccacgagagccccagactgctgattaagaacgccagccagtctatcagcggcatccccagcaagtttagcggctctggcagcggcaccgacttcaccctgagaatcaacagcgtggaaaccgaggacttcgggatgtacttctgccagcagagcaatagctggccctacacatttggctccggcaccaagctggaaatcaaactcgagatccagaaccctgatcctgccgtgtaccagctgcgggatagcaagagcagcgacaagagcgtgtgtctgttcaccgacttcgacagccagaccaacgtgtcccagagcaaggactccgacgtgtacatcaccgataagtgcgtgctggacatgcggagcatggacttcaagagcaactccgccgtggcctggtccaacaagtccgatttcgcctgcgccaacgccttcaacaacagcattatccccgaggacacattcttcccaagccccgagagcagctgcgacgtgaagctggtggaaaagagcttcgagacagacaccaacctgaacttccagaacctgagcgtgatcggcttcagaatcctgctgctgaaagtggccggctttaacctgctgatgaccctgcggctgtggtccagccgcgccaagagaagcggatctggcgtgaagcagaccctgaatttcgacctgctgaagctggctggcgacgtggaatccaacccaggccctactagtatggactggatttggcgcatccttttccttgtcggcgctgctaccggcgcgcattccgggccccagctccagctgcaagagtctggacctggcctggtcaagcctagcgagacactgagcctgacctgtaccgtgtccggcgatagcatcagcagcggcgattactactggggctggatcagacagcctcctggcaaaggactggaatggatcggccacatctactacagcggcgtgacctactacaaccccagcctgaagtccagagtgaccatcagcgtggacaccagccggaaccagttctccctgaagctgtctagcgtgacagccgccgataccgccgtgtactactgcaccagagaggacagcagcaactggcggagtagaggccagggaacactggtcacagttagctctggatccggcggaggcggaagtggaggcggaggatctggcggcggaggctctttcgaacaagtgaagctgcaacagagcggacccgagctggttaagccaggcgcttccgtgaagattagctgcaaggccagcggctacagcttcaccggctactacatgcactgggtcaagcagagccacggcaacatcctggactggatcggctacatctacccctacaacggcgtgtccagctacaaccagaagttcaagggcaaagccactctgaccgtggacaagagcagcagcaccgcctacatggaactgagaagcctgaccagcgaggacagcgccgtgtactattgtgccagagagcggggcctgtaccagctcagagcaatggattattggggccagggcaccagcgtgaccgtttcttctacgcgtgaggacctgaagaacgtgttcccacctgaggtggccgtgttcgagcctagcgaggccgagatcagccacacccagaaagccaccctcgtgtgcctggctaccggcttctaccccgaccatgtggaactgtcttggtgggtcaacggcaaagaggtgcacagcggcgtgtgtaccgacccccagccactgaaagaacagcccgccctgaacgacagccggtactgcctgagcagcagactgagagtgtccgccaccttctggcagaacccccggaaccacttcagatgccaggtgcagttctacggcctgagcgagaacgacgagtggacccaggacagagccaagcccgtgacccagatcgtgtctgccgaagcctggggcagagccgattgcggctttaccagcgagagctaccagcagggcgtgctgagcgccaccatcctgtacgagatcctgctgggcaaggccaccctgtacgccgtgctggtgtctgccctggtgctgatggctatggtcaagcggaaggacagccgggga

SEQ ID NO: 2612 - DNA, 2667 bp, Artificial Sequence
  Synthetic Polynucloetide
atggccttaccagtgaccgccttgctcctgccgctggccttgctgctccacgccgccaggccggaagtgcagctggttgaatctggcggaggactggttcagcctggcggatctctgagactgtcttgtgccgccagcggcttcagcttcagcgacttttggatgagctgggtccgacaggcccctggcaaaggacttgaatgggtcgccacaatcagccaggccggcagcgagaaggactacgtggactctgtgaagggcagattcaccatcagccgggacaacgccaagaagtccctgtacctccagatgaacagcctgagagccgaggacaccgccgtgtactattgtgcctctggcgtgtacagcttcgactacagaggccagggcaccctggtcacagtctcttctggtaccggcggaggcggatctggcggcggaggtagcggtggcggaggatctgaattcgacgacatcgtgatgacacagacccctgccatcatgagcgcctctccaggccagaaagtgaccatcacatgtagcgccagcagcagcgtgaactacatgcactggtatcagcagaagctgggcagcagccccaagctgtggatctacgataccagcaaactggcccctggcgtgccagccagattttctggttctggcagcggcaccagctacagcctgacaatcagcagcatggaagccgaggatgccgccagctacttctgccatcagtggtctagctacccctacacctttggctccggcaccaagctggaaatcaaactcgagatccagaaccctgatcctgccgtgtaccagctgcgggatagcaagagcagcgacaagagcgtgtgtctgttcaccgacttcgacagccagaccaacgtgtcccagagcaaggactccgacgtgtacatcaccgataagtgcgtgctggacatgcggagcatggacttcaagagcaactccgccgtggcctggtccaacaagtccgatttcgcctgcgccaacgccttcaacaacagcattatccccgaggacacattcttcccaagccccgagagcagctgcgacgtgaagctggtggaaaagagcttcgagacagacaccaacctgaacttccagaacctgagcgtgatcggcttcagaatcctgctgctgaaagtggccggctttaacctgctgatgaccctgcggctgtggtccagccgcgccaagagaagcggatctggcgtgaagcagaccctgaatttcgacctgctgaagctggctggcgacgtggaatccaacccaggccctactagtatggactggatttggcgcatccttttccttgtcggcgctgctaccggcgcgcattccgggccccagctccagctgcaagagtctggacctggcctggtcaagcctagcgagacactgagcctgacctgtaccgtgtccggcgatagcatcagcagcggcgattactactggggctggatcagacagcctcctggcaaaggactggaatggatcggccacatctactacagcggcgtgacctactacaaccccagcctgaagtccagagtgaccatcagcgtggacaccagccggaaccagttctccctgaagctgtctagcgtgacagccgccgataccgccgtgtactactgcaccagagaggacagcagcaactggcggagtagaggccagggaacactggtcacagttagctctggatccggcggaggcggaagtggaggcggaggatctggcggcggaggctctttcgaagaagttcagctccaagagtctggccccgacctggtcaagcctagccaaagcctgagcctgacctgtaccgtgaccggctacagcatcacaagcggctatggatggcactggatcagacagttccccggcaacaaactggaatggatgggctacatccactacagcggcagcaccacctacaatcccagcctgaagtcccggatcagcatcagcagagacaccagcaagaaccagttcttcctgcaactgaacagcgtgaccaccgaggacaccgccacctactattgtgctcggagcctgagatattggggccagggcacaaccctgaccgtgtcatctacgcgtgaggacctgaagaacgtgttcccacctgaggtggccgtgttcgagcctagcgaggccgagatcagccacacccagaaagccaccctcgtgtgcctggctaccggcttctaccccgaccatgtggaactgtcttggtgggtcaacggcaaagaggtgcacagcggcgtgtgtaccgacccccagccactgaaagaacagcccgccctgaacgacagccggtactgcctgagcagcagactgagagtgtccgccaccttctggcagaacccccggaaccacttcagatgccaggtgcagttctacggcctgagcgagaacgacgagtggacccaggacagagccaagcccgtgacccagatcgtgtctgccgaagcctggggcagagccgattgcggctttaccagcgagagctaccagcagggcgtgctgagcgccaccatcctgtacgagatcctgctgggcaaggccaccctgtacgccgtgctggtgtctgccctggtgctgatggctatggtcaagcggaaggacagccgggga

SEQ ID NO: 2613 - DNA, 2676 bp, Artificial Sequence
  Synthetic Polynucloetide
atggccttaccagtgaccgccttgctcctgccgctggccttgctgctccacgccgccaggccggaagtgcagctggttgaatctggcggaggactggttcagcctggcggatctctgagactgtcttgtgccgccagcggcttcagcttcagcgacttttggatgagctgggtccgacaggcccctggcaaaggacttgaatgggtcgccacaatcagccaggccggcagcgagaaggactacgtggactctgtgaagggcagattcaccatcagccgggacaacgccaagaagtccctgtacctccagatgaacagcctgagagccgaggacaccgccgtgtactattgtgcctctggcgtgtacagcttcgactacagaggccagggcaccctggtcacagtctcttctggtaccggcggaggcggatctggcggcggaggtagcggtggcggaggatctgaattcgacgacatccagatgacacagagccctagcagcctgtctgccagcgtgggagacagagtgaccatcacctgtagcgccaccagcagcatcagctacatgcactggtatcagcagaagcccggcaaggcccctaaaggctggatctacgataccagcaaactggcccacggcgtgcccagcagattttctggttctggcagcggcaccgacttcaccctgacaatatctagcctccagcctgaggacttcgccacctactactgccaccagagaagaagctaccccttcaccttcggccagggcaccaaggtggaaatcaaactcgagatccagaaccctgatcctgccgtgtaccagctgcgggatagcaagagcagcgacaagagcgtgtgtctgttcaccgacttcgacagccagaccaacgtgtcccagagcaaggactccgacgtgtacatcaccgataagtgcgtgctggacatgcggagcatggacttcaagagcaactccgccgtggcctggtccaacaagtccgatttcgcctgcgccaacgccttcaacaacagcattatccccgaggacacattcttcccaagccccgagagcagctgcgacgtgaagctggtggaaaagagcttcgagacagacaccaacctgaacttccagaacctgagcgtgatcggcttcagaatcctgctgctgaaagtggccggctttaacctgctgatgaccctgcggctgtggtccagccgcgccaagagaagcggatctggcgtgaagcagaccctgaatttcgacctgctgaagctggctggcgacgtggaatccaacccaggccctactagtatggactggatttggcgcatccttttccttgtcggcgctgctaccggcgcgcattccgggccccagctccagctgcaagagtctggacctggcctggtcaagcctagcgagacactgagcctgacctgtaccgtgtccggcgatagcatcagcagcggcgattactactggggctggatcagacagcctcctggcaaaggactggaatggatcggccacatctactacagcggcgtgacctactacaaccccagcctgaagtccagagtgaccatcagcgtggacaccagccggaaccagttctccctgaagctgtctagcgtgacagccgccgataccgccgtgtactactgcaccagagaggacagcagcaactggcggagtagaggccagggaacactggtcacagttagctctggatccggcggaggcggaagtggaggcggaggatctggcggcggaggctctttcgaagaagtgcaactggttcagagcggagccgaagtgaagaaacctggggcctctgtgaaggtgtcctgcaaggcttccggctacacctttaccaatttctggattcactgggtccgacaggctccaggccaaggactggaatggatcggagagatcgaccccagcgacagctacaccaactacaaccagaaattcaaaggccgggtcaccatcaccagagacaccagcacaagcaccgcctacctggaactgagcagcctgagaagcgaggacaccgccgtgtactactgcgccagggaaatcaccaccgtggattattggggccagggaaccctggtcaccgtgtcatctacgcgtgaggacctgaagaacgtgttcccacctgaggtggccgtgttcgagcctagcgaggccgagatcagccacacccagaaagccaccctcgtgtgcctggctaccggcttctaccccgaccatgtggaactgtcttggtgggtcaacggcaaagaggtgcacagcggcgtgtgtaccgacccccagccactgaaagaacagcccgccctgaacgacagccggtactgcctgagcagcagactgagagtgtccgccaccttctggcagaacccccggaaccacttcagatgccaggtgcagttctacggcctgagcgagaacgacgagtggacccaggacagagccaagcccgtgacccagatcgtgtctgccgaagcctggggcagagccgattgcggctttaccagcgagagctaccagcagggcgtgctgagcgccaccatcctgtacgagatcctgctgggcaaggccaccctgtacgccgtgctggtgtctgccctggtgctgatggctatggtcaagcggaaggacagccgggga

SEQ ID NO: 2614 - DNA, 2697 bp, Artificial Sequence
  Synthetic Polynucloetide
atggccttaccagtgaccgccttgctcctgccgctggccttgctgctccacgccgccaggccggaagtgcagctggttgaatctggcggaggactggttcagcctggcggatctctgagactgtcttgtgccgccagcggcttcagcttcagcgacttttggatgagctgggtccgacaggcccctggcaaaggacttgaatgggtcgccacaatcagccaggccggcagcgagaaggactacgtggactctgtgaagggcagattcaccatcagccgggacaacgccaagaagtccctgtacctccagatgaacagcctgagagccgaggacaccgccgtgtactattgtgcctctggcgtgtacagcttcgactacagaggccagggcaccctggtcacagtctcttctggtaccggcggaggcggatctggcggcggaggtagcggtggcggaggatctgaattcgacgacatccagatgacacagagccctagcagcctgtctgccagcgtgggagacagagtgaccatcacatgcaaggccagccagggcttcaacaaatacgtggcctggtatcagcagaagcccggcaaggctcctaagctgctgatctactacaccagcacactccagcctggcgtgcccagcagattttctggctctggcagcggcagagactacaccctgacaatatccagcctccagccagaggacttcgccacctactactgtctccagtacggcaacctgctgtacgcctttggacagggcaccaaggtggaaatcaagagactcgagatccagaaccctgatcctgccgtgtaccagctgcgggatagcaagagcagcgacaagagcgtgtgtctgttcaccgacttcgacagccagaccaacgtgtcccagagcaaggactccgacgtgtacatcaccgataagtgcgtgctggacatgcggagcatggacttcaagagcaactccgccgtggcctggtccaacaagtccgatttcgcctgcgccaacgccttcaacaacagcattatccccgaggacacattcttcccaagccccgagagcagctgcgacgtgaagctggtggaaaagagcttcgagacagacaccaacctgaacttccagaacctgagcgtgatcggcttcagaatcctgctgctgaaagtggccggctttaacctgctgatgaccctgcggctgtggtccagccgcgccaagagaagcggatctggcgtgaagcagaccctgaatttcgacctgctgaagctggctggcgacgtggaatccaacccaggccctactagtatggactggatttggcgcatccttttccttgtcggcgctgctaccggcgcgcattccgggccccagctccagctgcaagagtctggacctggcctggtcaagcctagcgagacactgagcctgacctgtaccgtgtccggcgatagcatcagcagcggcgattactactggggctggatcagacagcctcctggcaaaggactggaatggatcggccacatctactacagcggcgtgacctactacaaccccagcctgaagtccagagtgaccatcagcgtggacaccagccggaaccagttctccctgaagctgtctagcgtgacagccgccgataccgccgtgtactactgcaccagagaggacagcagcaactggcggagtagaggccagggaacactggtcacagttagctctggatccggcggaggcggaagtggaggcggaggatctggcggcggaggctctttcgaagaagttcagcttgtgcagagcggagccgaagtgaagaaacctggggcctctgtgaaggtgtcctgcaaagccagcggctacacctttaccagctactggatcggctgggtccgacaggctcctggacaaggactggaatggatcggcgacatctatcccggcggaggctacaccaactacaacgagaagttcaagggccgcgtgacaatcaccagagacacctctacaagcaccgcctacctggaactgagcagcctgagaagcgaggacaccgccgtgtactactgcgccagactggatggcagcagctacagaggcgctatggattcttggggccagggcacactggtcaccgtttcttctacgcgtgaggacctgaagaacgtgttcccacctgaggtggccgtgttcgagcctagcgaggccgagatcagccacacccagaaagccaccctcgtgtgcctggctaccggcttctaccccgaccatgtggaactgtcttggtgggtcaacggcaaagaggtgcacagcggcgtgtgtaccgacccccagccactgaaagaacagcccgccctgaacgacagccggtactgcctgagcagcagactgagagtgtccgccaccttctggcagaacccccggaaccacttcagatgccaggtgcagttctacggcctgagcgagaacgacgagtggacccaggacagagccaagcccgtgacccagatcgtgtctgccgaagcctggggcagagccgattgcggctttaccagcgagagctaccagcagggcgtgctgagcgccaccatcctgtacgagatcctgctgggcaaggccaccctgtacgccgtgctggtgtctgccctggtgctgatggctatggtcaagcggaaggacagccgggga

SEQ ID NO: 2615 - DNA, 2685 bp, Artificial Sequence
  Synthetic Polynucloetide
atggccttaccagtgaccgccttgctcctgccgctggccttgctgctccacgccgccaggccggaagtgcagctggttgaatctggcggaggactggttcagcctggcggatctctgagactgtcttgtgccgccagcggcttcagcttcagcgacttttggatgagctgggtccgacaggcccctggcaaaggacttgaatgggtcgccacaatcagccaggccggcagcgagaaggactacgtggactctgtgaagggcagattcaccatcagccgggacaacgccaagaagtccctgtacctccagatgaacagcctgagagccgaggacaccgccgtgtactattgtgcctctggcgtgtacagcttcgactacagaggccagggcaccctggtcacagtctcttctggtaccggcggaggcggatctggcggcggaggtagcggtggcggaggatctgaattcgacgacatccagatgacacagagccctagcagcctgtctgccagcgtgggagacagagtgaccatcacctgtagagccagccaggacatccggtactacctgaactggtatcagcagaagcccggcaaggcccctaagctgctgatctatgtggcctccagcctccagagcggagtgccttctagattttctggcagcggctccggcaccgagtttaccctgacagtgtctagcttgcagcccgaggacttcgccacctactactgcctgcaagtgtacagcacccctcggacctttggacagggcaccaaggtggaaatcaaactcgagatccagaaccctgatcctgccgtgtaccagctgcgggatagcaagagcagcgacaagagcgtgtgtctgttcaccgacttcgacagccagaccaacgtgtcccagagcaaggactccgacgtgtacatcaccgataagtgcgtgctggacatgcggagcatggacttcaagagcaactccgccgtggcctggtccaacaagtccgatttcgcctgcgccaacgccttcaacaacagcattatccccgaggacacattcttcccaagccccgagagcagctgcgacgtgaagctggtggaaaagagcttcgagacagacaccaacctgaacttccagaacctgagcgtgatcggcttcagaatcctgctgctgaaagtggccggctttaacctgctgatgaccctgcggctgtggtccagccgcgccaagagaagcggatctggcgtgaagcagaccctgaatttcgacctgctgaagctggctggcgacgtggaatccaacccaggccctactagtatggactggatttggcgcatccttttccttgtcggcgctgctaccggcgcgcattccgggccccagctccagctgcaagagtctggacctggcctggtcaagcctagcgagacactgagcctgacctgtaccgtgtccggcgatagcatcagcagcggcgattactactggggctggatcagacagcctcctggcaaaggactggaatggatcggccacatctactacagcggcgtgacctactacaaccccagcctgaagtccagagtgaccatcagcgtggacaccagccggaaccagttctccctgaagctgtctagcgtgacagccgccgataccgccgtgtactactgcaccagagaggacagcagcaactggcggagtagaggccagggaacactggtcacagttagctctggatccggcggaggcggaagtggaggcggaggatctggcggcggaggctctttcgaagaagtgcagcttgttgaatctggcggcggactggctaagcctggcggatctctgagactgtcttgtgccgccagcggcttccggttcaccttcaacaactactacatggactgggtccgacaggcccctggacaaggacttgaatgggtgtccagaatcagcagcagcggcgaccctacttggtacgccgattctgtgaagggcagattcaccatcagcagagagaacgccaagaacaccctgttcctccagatgaactccctgagagccgaggacaccgccgtgtactattgtgcctctctgaccaccggcagcgattcttggggacagggcgtgctggttaccgtgtcatctacgcgtgaggacctgaagaacgtgttcccacctgaggtggccgtgttcgagcctagcgaggccgagatcagccacacccagaaagccaccctcgtgtgcctggctaccggcttctaccccgaccatgtggaactgtcttggtgggtcaacggcaaagaggtgcacagcggcgtgtgtaccgacccccagccactgaaagaacagcccgccctgaacgacagccggtactgcctgagcagcagactgagagtgtccgccaccttctggcagaacccccggaaccacttcagatgccaggtgcagttctacggcctgagcgagaacgacgagtggacccaggacagagccaagcccgtgacccagatcgtgtctgccgaagcctggggcagagccgattgcggctttaccagcgagagctaccagcagggcgtgctgagcgccaccatcctgtacgagatcctgctgggcaaggccaccctgtacgccgtgctggtgtctgccctggtgctgatggctatggtcaagcggaaggacagccgggga

SEQ ID NO: 2616 - DNA, 2685 bp, Artificial Sequence
  Synthetic Polynucloetide
atggccttaccagtgaccgccttgctcctgccgctggccttgctgctccacgccgccaggccggaagtgcagctggttgaatctggcggaggactggttcagcctggcggatctctgagactgtcttgtgccgccagcggcttcagcttcagcgacttttggatgagctgggtccgacaggcccctggcaaaggacttgaatgggtcgccacaatcagccaggccggcagcgagaaggactacgtggactctgtgaagggcagattcaccatcagccgggacaacgccaagaagtccctgtacctccagatgaacagcctgagagccgaggacaccgccgtgtactattgtgcctctggcgtgtacagcttcgactacagaggccagggcaccctggtcacagtctcttctggtaccggcggaggcggatctggcggcggaggtagcggtggcggaggatctgaattcgagatcgtgatgacacagagccccgccacactgagtgtgtctccaggcgaaagagccacactgtcctgtagagccagccagagcgtgtccagaaacctggcctggtatcagcagaagcctggacaggctccccggctgttgatctacggcgcttctacaagagccaccggcattcccgccagattttctggctctggcagcggcaccgagttcaccctgacaatcggaagcctccagagcgaggacttcgccgtgtactactgccagcagtacaagacctggcctcggacctttggacagggcaccaacgtggaaatcaaactcgagatccagaaccctgatcctgccgtgtaccagctgcgggatagcaagagcagcgacaagagcgtgtgtctgttcaccgacttcgacagccagaccaacgtgtcccagagcaaggactccgacgtgtacatcaccgataagtgcgtgctggacatgcggagcatggacttcaagagcaactccgccgtggcctggtccaacaagtccgatttcgcctgcgccaacgccttcaacaacagcattatccccgaggacacattcttcccaagccccgagagcagctgcgacgtgaagctggtggaaaagagcttcgagacagacaccaacctgaacttccagaacctgagcgtgatcggcttcagaatcctgctgctgaaagtggccggctttaacctgctgatgaccctgcggctgtggtccagccgcgccaagagaagcggatctggcgtgaagcagaccctgaatttcgacctgctgaagctggctggcgacgtggaatccaacccaggccctactagtatggactggatttggcgcatccttttccttgtcggcgctgctaccggcgcgcattccgggccccagctccagctgcaagagtctggacctggcctggtcaagcctagcgagacactgagcctgacctgtaccgtgtccggcgatagcatcagcagcggcgattactactggggctggatcagacagcctcctggcaaaggactggaatggatcggccacatctactacagcggcgtgacctactacaaccccagcctgaagtccagagtgaccatcagcgtggacaccagccggaaccagttctccctgaagctgtctagcgtgacagccgccgataccgccgtgtactactgcaccagagaggacagcagcaactggcggagtagaggccagggaacactggtcacagttagctctggatccggcggaggcggaagtggaggcggaggatctggcggcggaggctctttcgaacaagttcagctgcaacaatggggagccggcctgctgaagcctagcgaaacactgtctctgacctgcgccgtgttcggcggctctttcagcggctactactggtcctggatcagacagcctcctggcaaaggactggaatggatcggcgagatcaaccaccggggcaacaccaacgacaaccccagcctgaaaagcagagtgaccatcagcgtggacaccagcaagaaccagttcgccctgaagctgagcagcgtgacagccgctgataccgccgtgtattattgcgccagagagcggggctacacctacggcaatttcgatcactggggccagggcaccctggtcacagtttcttctacgcgtgaggacctgaagaacgtgttcccacctgaggtggccgtgttcgagcctagcgaggccgagatcagccacacccagaaagccaccctcgtgtgcctggctaccggcttctaccccgaccatgtggaactgtcttggtgggtcaacggcaaagaggtgcacagcggcgtgtgtaccgacccccagccactgaaagaacagcccgccctgaacgacagccggtactgcctgagcagcagactgagagtgtccgccaccttctggcagaacccccggaaccacttcagatgccaggtgcagttctacggcctgagcgagaacgacgagtggacccaggacagagccaagcccgtgacccagatcgtgtctgccgaagcctggggcagagccgattgcggctttaccagcgagagctaccagcagggcgtgctgagcgccaccatcctgtacgagatcctgctgggcaaggccaccctgtacgccgtgctggtgtctgccctggtgctgatggctatggtcaagcggaaggacagccgggga

SEQ ID NO: 2617 - DNA, 2688 bp, Artificial Sequence
  Synthetic Polynucloetide
atggccttaccagtgaccgccttgctcctgccgctggccttgctgctccacgccgccaggccggaagtgcagctggttgaatctggcggaggactggttcagcctggcggatctctgagactgtcttgtgccgccagcggcttcagcttcagcgacttttggatgagctgggtccgacaggcccctggcaaaggacttgaatgggtcgccacaatcagccaggccggcagcgagaaggactacgtggactctgtgaagggcagattcaccatcagccgggacaacgccaagaagtccctgtacctccagatgaacagcctgagagccgaggacaccgccgtgtactattgtgcctctggcgtgtacagcttcgactacagaggccagggcaccctggtcacagtctcttctggtaccggcggaggcggatctggcggcggaggtagcggtggcggaggatctgaattcgagatcgtgatgacccctagcagcgccacactgagtgtgtctccaggcgaaagagccacactgtcctgtagagccagccagagcgtgtccagaaacctggcctggtatcagcagaagcctggacaggctccccggctgttgatctacggcgcttctacaagagccaccggcattcccgccagattttctggctctggcagcggcaccgagttcaccctgacaatctctagcctccagagcgaggacttcgccgtgtactactgccaccagtacagcaactggatgtgcagcttcggccagggcaccaagctggaaatcaaactcgagatccagaaccctgatcctgccgtgtaccagctgcgggatagcaagagcagcgacaagagcgtgtgtctgttcaccgacttcgacagccagaccaacgtgtcccagagcaaggactccgacgtgtacatcaccgataagtgcgtgctggacatgcggagcatggacttcaagagcaactccgccgtggcctggtccaacaagtccgatttcgcctgcgccaacgccttcaacaacagcattatccccgaggacacattcttcccaagccccgagagcagctgcgacgtgaagctggtggaaaagagcttcgagacagacaccaacctgaacttccagaacctgagcgtgatcggcttcagaatcctgctgctgaaagtggccggctttaacctgctgatgaccctgcggctgtggtccagccgcgccaagagaagcggatctggcgtgaagcagaccctgaatttcgacctgctgaagctggctggcgacgtggaatccaacccaggccctactagtatggactggatttggcgcatccttttccttgtcggcgctgctaccggcgcgcattccgggccccagctccagctgcaagagtctggacctggcctggtcaagcctagcgagacactgagcctgacctgtaccgtgtccggcgatagcatcagcagcggcgattactactggggctggatcagacagcctcctggcaaaggactggaatggatcggccacatctactacagcggcgtgacctactacaaccccagcctgaagtccagagtgaccatcagcgtggacaccagccggaaccagttctccctgaagctgtctagcgtgacagccgccgataccgccgtgtactactgcaccagagaggacagcagcaactggcggagtagaggccagggaacactggtcacagttagctctggatccggcggaggcggaagtggaggcggaggatctggcggcggaggctctttcgaagaagttcagctccttgagtcaggtggcggcctggttcaacctggcggatctctgagactgagctgtgccgccagcggcttcacctttagcagatacgccatgaactgggtccgacaggcccctggcaaaggactggaatgggtgtccggcatctctggaagcggcggcagaacctactacgccgattctgtgaagggcagattcaccatcagccgggacaacagcaagaacaccctgtacctccagatgaacagcctgagagccgaggacacagccgtgtattattgcgccaaggaccgggacttttggagcggcccttttgactattggggccagggaaccctggtcaccgttagctctacgcgtgaggacctgaagaacgtgttcccacctgaggtggccgtgttcgagcctagcgaggccgagatcagccacacccagaaagccaccctcgtgtgcctggctaccggcttctaccccgaccatgtggaactgtcttggtgggtcaacggcaaagaggtgcacagcggcgtgtgtaccgacccccagccactgaaagaacagcccgccctgaacgacagccggtactgcctgagcagcagactgagagtgtccgccaccttctggcagaacccccggaaccacttcagatgccaggtgcagttctacggcctgagcgagaacgacgagtggacccaggacagagccaagcccgtgacccagatcgtgtctgccgaagcctggggcagagccgattgcggctttaccagcgagagctaccagcagggcgtgctgagcgccaccatcctgtacgagatcctgctgggcaaggccaccctgtacgccgtgctggtgtctgccctggtgctgatggctatggtcaagcggaaggacagccgggga

SEQ ID NO: 2618 - DNA, 2703 bp, Artificial Sequence
  Synthetic Polynucloetide
atggccttaccagtgaccgccttgctcctgccgctggccttgctgctccacgccgccaggccggaagtgcagctggttgaatctggcggaggactggttcagcctggcggatctctgagactgtcttgtgccgccagcggcttcagcttcagcgacttttggatgagctgggtccgacaggcccctggcaaaggacttgaatgggtcgccacaatcagccaggccggcagcgagaaggactacgtggactctgtgaagggcagattcaccatcagccgggacaacgccaagaagtccctgtacctccagatgaacagcctgagagccgaggacaccgccgtgtactattgtgcctctggcgtgtacagcttcgactacagaggccagggcaccctggtcacagtctcttctggtaccggcggaggcggatctggcggcggaggtagcggtggcggaggatctgaattcgacatccagatgacccagagccccagcagcctgtctgccagcgtgggcgacagagtgaccatcacatgcaaggccagcaagaacatcagaagctacctggcctggtatcagcagaagcccggcaaggcccccaagctgctgatctacagcggcagcacactgcacagcggcgtgcccagcagattttccggctctggcagcggcaccgacttcaccctgaccatctctagcctccagcccgaggacttcgccacctactactgccagcagcaccacgagtaccccctgacattcggccagggcaccaaggtggaaatcaagagactcgagatccagaaccctgatcctgccgtgtaccagctgcgggatagcaagagcagcgacaagagcgtgtgtctgttcaccgacttcgacagccagaccaacgtgtcccagagcaaggactccgacgtgtacatcaccgataagtgcgtgctggacatgcggagcatggacttcaagagcaactccgccgtggcctggtccaacaagtccgatttcgcctgcgccaacgccttcaacaacagcattatccccgaggacacattcttcccaagccccgagagcagctgcgacgtgaagctggtggaaaagagcttcgagacagacaccaacctgaacttccagaacctgagcgtgatcggcttcagaatcctgctgctgaaagtggccggctttaacctgctgatgaccctgcggctgtggtccagccgcgccaagagaagcggatctggcgtgaagcagaccctgaatttcgacctgctgaagctggctggcgacgtggaatccaacccaggccctactagtatggactggatttggcgcatccttttccttgtcggcgctgctaccggcgcgcattccgggccccagctccagctgcaagagtctggacctggcctggtcaagcctagcgagacactgagcctgacctgtaccgtgtccggcgatagcatcagcagcggcgattactactggggctggatcagacagcctcctggcaaaggactggaatggatcggccacatctactacagcggcgtgacctactacaaccccagcctgaagtccagagtgaccatcagcgtggacaccagccggaaccagttctccctgaagctgtctagcgtgacagccgccgataccgccgtgtactactgcaccagagaggacagcagcaactggcggagtagaggccagggaacactggtcacagttagctctggatccggcggaggcggaagtggaggcggaggatctggcggcggaggctctttcgaacaggtgcaactccaggaatctggccccggactcgtgaagcccagcgagacactgagcctgacctgtaccgtgtccggctacaccatcaccagcggctacgactggtcctggatcagacagcctcctggcaagggcctggaatggatcggctacatcaactacggcggctccaccaactacaagcccagcctgggaagccgcgtgacaatcagcgtggacacctccaagaaccagttcagcctgaagctgagcagcgtgacagccgccgataccgccgtgtactactgcgcccggtacaacgagtacaagagctacatctacgattggtacttcgacttctggggccagggaaccctcgtgaccgtgtctagtacgcgtgaggacctgaagaacgtgttcccacctgaggtggccgtgttcgagcctagcgaggccgagatcagccacacccagaaagccaccctcgtgtgcctggctaccggcttctaccccgaccatgtggaactgtcttggtgggtcaacggcaaagaggtgcacagcggcgtgtgtaccgacccccagccactgaaagaacagcccgccctgaacgacagccggtactgcctgagcagcagactgagagtgtccgccaccttctggcagaacccccggaaccacttcagatgccaggtgcagttctacggcctgagcgagaacgacgagtggacccaggacagagccaagcccgtgacccagatcgtgtctgccgaagcctggggcagagccgattgcggctttaccagcgagagctaccagcagggcgtgctgagcgccaccatcctgtacgagatcctgctgggcaaggccaccctgtacgccgtgctggtgtctgccctggtgctgatggctatggtcaagcggaaggacagccgggga

SEQ ID NO: 2619 - DNA, 2709 bp, Artificial Sequence
  Synthetic Polynucloetide
atggccttaccagtgaccgccttgctcctgccgctggccttgctgctccacgccgccaggccggaagtgcagctggttgaatctggcggaggactggttcagcctggcggatctctgagactgtcttgtgccgccagcggcttcagcttcagcgacttttggatgagctgggtccgacaggcccctggcaaaggacttgaatgggtcgccacaatcagccaggccggcagcgagaaggactacgtggactctgtgaagggcagattcaccatcagccgggacaacgccaagaagtccctgtacctccagatgaacagcctgagagccgaggacaccgccgtgtactattgtgcctctggcgtgtacagcttcgactacagaggccagggcaccctggtcacagtctcttctggtaccggcggaggcggatctggcggcggaggtagcggtggcggaggatctgaattccagtctgtggtcacacagcctccatccgtgtctgctgcccctggacagaaagtgaccatctcctgtagcggcagcagcagcaacatcggcaacaactacgtgtcctggtatcagcagctccccggcacagctcccaaactgctgatctacgacaacaacaagcggcccagcggcatccccgatagattttctggcagcaagagcggcaccagcgccacactgggaattaccggacttcagacaggcgacgaggccgactactactgtggcacatgggatggcagcctgtacaccatgcttttcggcggaggcaccaagctgacagtgcttctcgagatccagaaccctgatcctgccgtgtaccagctgcgggatagcaagagcagcgacaagagcgtgtgtctgttcaccgacttcgacagccagaccaacgtgtcccagagcaaggactccgacgtgtacatcaccgataagtgcgtgctggacatgcggagcatggacttcaagagcaactccgccgtggcctggtccaacaagtccgatttcgcctgcgccaacgccttcaacaacagcattatccccgaggacacattcttcccaagccccgagagcagctgcgacgtgaagctggtggaaaagagcttcgagacagacaccaacctgaacttccagaacctgagcgtgatcggcttcagaatcctgctgctgaaagtggccggctttaacctgctgatgaccctgcggctgtggtccagccgcgccaagagaagcggatctggcgtgaagcagaccctgaatttcgacctgctgaagctggctggcgacgtggaatccaacccaggccctactagtatggactggatttggcgcatccttttccttgtcggcgctgctaccggcgcgcattccgggccccagctccagctgcaagagtctggacctggcctggtcaagcctagcgagacactgagcctgacctgtaccgtgtccggcgatagcatcagcagcggcgattactactggggctggatcagacagcctcctggcaaaggactggaatggatcggccacatctactacagcggcgtgacctactacaaccccagcctgaagtccagagtgaccatcagcgtggacaccagccggaaccagttctccctgaagctgtctagcgtgacagccgccgataccgccgtgtactactgcaccagagaggacagcagcaactggcggagtagaggccagggaacactggtcacagttagctctggatccggcggaggcggaagtggaggcggaggatctggcggcggaggctctttcgaagaagtgcaactggtggaatctggcggcggactggttaagcctggcggatctctgagactgtcttgtgccgccagcggcttcaccttcagcaatgcctggatgagctgggttcgacaggcccctggaaaaggactggaatgggtcggattcatccggtccaaagcctacggcggcaccacagaatatgccgcctctgtgaagggcagattcaccatcagccgggacgacagcaagtctatcgcctacctccagatgaacaacctgaaaaccgaggacaccgccgtgtactactgcgccagagatggcctgtacagcagctcttggtacgacagcgattactggggccagggcacactggtcacagtgtcatctacgcgtgaggacctgaagaacgtgttcccacctgaggtggccgtgttcgagcctagcgaggccgagatcagccacacccagaaagccaccctcgtgtgcctggctaccggcttctaccccgaccatgtggaactgtcttggtgggtcaacggcaaagaggtgcacagcggcgtgtgtaccgacccccagccactgaaagaacagcccgccctgaacgacagccggtactgcctgagcagcagactgagagtgtccgccaccttctggcagaacccccggaaccacttcagatgccaggtgcagttctacggcctgagcgagaacgacgagtggacccaggacagagccaagcccgtgacccagatcgtgtctgccgaagcctggggcagagccgattgcggctttaccagcgagagctaccagcagggcgtgctgagcgccaccatcctgtacgagatcctgctgggcaaggccaccctgtacgccgtgctggtgtctgccctggtgctgatggctatggtcaagcggaaggacagccgggga

SEQ ID NO: 2620 - DNA, 2724 bp, Artificial Sequence
  Synthetic Polynucloetide
atggccttaccagtgaccgccttgctcctgccgctggccttgctgctccacgccgccaggccggaagtgcagctggttgaatctggcggaggactggttcagcctggcggatctctgagactgtcttgtgccgccagcggcttcagcttcagcgacttttggatgagctgggtccgacaggcccctggcaaaggacttgaatgggtcgccacaatcagccaggccggcagcgagaaggactacgtggactctgtgaagggcagattcaccatcagccgggacaacgccaagaagtccctgtacctccagatgaacagcctgagagccgaggacaccgccgtgtactattgtgcctctggcgtgtacagcttcgactacagaggccagggcaccctggtcacagtctcttctggtaccggcggaggcggatctggcggcggaggtagcggtggcggaggatctgaattccagtctgtgctgacacagcctcctagtgtgtctggcgctcctggacagagagtgaccatctcttgtaccggcagcagcagcaatatcggagccggctatgacgtgcactggtatcagcagctccctggcacagcccctaaactgctgatcttcggcaacagcaacagacccagcggcgtgcccgatagattcagcggctttaagagcggcacaagcgccagcctggctatcactggactgcaagccgaggacgaggccgactacttctgccagagctacgatagcagcctgagcggcagcggagtgtttggcacaggcaccaaagtgacagtgcttggcctcgagatccagaaccctgatcctgccgtgtaccagctgcgggatagcaagagcagcgacaagagcgtgtgtctgttcaccgacttcgacagccagaccaacgtgtcccagagcaaggactccgacgtgtacatcaccgataagtgcgtgctggacatgcggagcatggacttcaagagcaactccgccgtggcctggtccaacaagtccgatttcgcctgcgccaacgccttcaacaacagcattatccccgaggacacattcttcccaagccccgagagcagctgcgacgtgaagctggtggaaaagagcttcgagacagacaccaacctgaacttccagaacctgagcgtgatcggcttcagaatcctgctgctgaaagtggccggctttaacctgctgatgaccctgcggctgtggtccagccgcgccaagagaagcggatctggcgtgaagcagaccctgaatttcgacctgctgaagctggctggcgacgtggaatccaacccaggccctactagtatggactggatttggcgcatccttttccttgtcggcgctgctaccggcgcgcattccgggccccagctccagctgcaagagtctggacctggcctggtcaagcctagcgagacactgagcctgacctgtaccgtgtccggcgatagcatcagcagcggcgattactactggggctggatcagacagcctcctggcaaaggactggaatggatcggccacatctactacagcggcgtgacctactacaaccccagcctgaagtccagagtgaccatcagcgtggacaccagccggaaccagttctccctgaagctgtctagcgtgacagccgccgataccgccgtgtactactgcaccagagaggacagcagcaactggcggagtagaggccagggaacactggtcacagttagctctggatccggcggaggcggaagtggaggcggaggatctggcggcggaggctctttcgaacaaatgcaactggttcaaagcggcggtggcctggtgcaacctggaagaagtctgagactgagctgtgccgccagcggcttcaccttcgatgattacgccatgcactgggtccgacaggcccctggaaaaggactggaatgggtgtccggcatctcctggaatagcggctctatcggctacgccgacagcgtgaagggcagattcaccatcagccgggacaacgccaagaacagcctgtacctccagatgaactccctgagagccgaggatacagccctgtactactgcgccaaggacatccacagcggcagctactacggcctgctgtactacgctatggacgtgtggggccagggcacaaccgtgacagtttcttctacgcgtgaggacctgaagaacgtgttcccacctgaggtggccgtgttcgagcctagcgaggccgagatcagccacacccagaaagccaccctcgtgtgcctggctaccggcttctaccccgaccatgtggaactgtcttggtgggtcaacggcaaagaggtgcacagcggcgtgtgtaccgacccccagccactgaaagaacagcccgccctgaacgacagccggtactgcctgagcagcagactgagagtgtccgccaccttctggcagaacccccggaaccacttcagatgccaggtgcagttctacggcctgagcgagaacgacgagtggacccaggacagagccaagcccgtgacccagatcgtgtctgccgaagcctggggcagagccgattgcggctttaccagcgagagctaccagcagggcgtgctgagcgccaccatcctgtacgagatcctgctgggcaaggccaccctgtacgccgtgctggtgtctgccctggtgctgatggctatggtcaagcggaaggacagccgggga

SEQ ID NO: 2621 - DNA, 2724 bp, Artificial Sequence
  Synthetic Polynucloetide
atggccttaccagtgaccgccttgctcctgccgctggccttgctgctccacgccgccaggccggaagtgcagctggttgaatctggcggaggactggttcagcctggcggatctctgagactgtcttgtgccgccagcggcttcagcttcagcgacttttggatgagctgggtccgacaggcccctggcaaaggacttgaatgggtcgccacaatcagccaggccggcagcgagaaggactacgtggactctgtgaagggcagattcaccatcagccgggacaacgccaagaagtccctgtacctccagatgaacagcctgagagccgaggacaccgccgtgtactattgtgcctctggcgtgtacagcttcgactacagaggccagggcaccctggtcacagtctcttctggtaccggcggaggcggatctggcggcggaggtagcggtggcggaggatctgaattcctgcctgttctgacacagcctccatctgcctctggcacacctggacagagagtgaccatcagctgtagcggcagaagcagcaacatcggcagcaacagcgtgaactggtacagacagcttcctggcgctgcccctaagctgctgatctacagcaacaaccagcggcctcctggcgtgccagtcagattttctggcagcaagagcggcacaagcgccagcctggctatttctggactccagtctgaggacgaggccacctactactgtgccacctgggacgacaacctgaacgtgcactacgtgttcggcaccggcaccaaagtgacagtgcttggaagtagactcgagatccagaaccctgatcctgccgtgtaccagctgcgggatagcaagagcagcgacaagagcgtgtgtctgttcaccgacttcgacagccagaccaacgtgtcccagagcaaggactccgacgtgtacatcaccgataagtgcgtgctggacatgcggagcatggacttcaagagcaactccgccgtggcctggtccaacaagtccgatttcgcctgcgccaacgccttcaacaacagcattatccccgaggacacattcttcccaagccccgagagcagctgcgacgtgaagctggtggaaaagagcttcgagacagacaccaacctgaacttccagaacctgagcgtgatcggcttcagaatcctgctgctgaaagtggccggctttaacctgctgatgaccctgcggctgtggtccagccgcgccaagagaagcggatctggcgtgaagcagaccctgaatttcgacctgctgaagctggctggcgacgtggaatccaacccaggccctactagtatggactggatttggcgcatccttttccttgtcggcgctgctaccggcgcgcattccgggccccagctccagctgcaagagtctggacctggcctggtcaagcctagcgagacactgagcctgacctgtaccgtgtccggcgatagcatcagcagcggcgattactactggggctggatcagacagcctcctggcaaaggactggaatggatcggccacatctactacagcggcgtgacctactacaaccccagcctgaagtccagagtgaccatcagcgtggacaccagccggaaccagttctccctgaagctgtctagcgtgacagccgccgataccgccgtgtactactgcaccagagaggacagcagcaactggcggagtagaggccagggaacactggtcacagttagctctggatccggcggaggcggaagtggaggcggaggatctggcggcggaggctctttcgaacttgaaatggctcaggtgcagctggtgcagagcggagccgaagtgaagaaacctggcagcagcgtgaaggtgtcctgcaaagcttctggcggcaccttcagcagctacgccatctcttgggttcgacaggcccctggacaaggactggaatggatgggcagaatcatccccatcctgggaatcgccaactacgcccagaaattccagggcagagtgacaatcaccgccgacaagagcaccagcaccgcctacatggaactgagcagcctgagaagcgaggacaccgccgtgtactattgtgcaagaggcggctactacagccacgacatgtggagcgaagattggggccagggcacactggtcacagtgtcatctacgcgtgaggacctgaagaacgtgttcccacctgaggtggccgtgttcgagcctagcgaggccgagatcagccacacccagaaagccaccctcgtgtgcctggctaccggcttctaccccgaccatgtggaactgtcttggtgggtcaacggcaaagaggtgcacagcggcgtgtgtaccgacccccagccactgaaagaacagcccgccctgaacgacagccggtactgcctgagcagcagactgagagtgtccgccaccttctggcagaacccccggaaccacttcagatgccaggtgcagttctacggcctgagcgagaacgacgagtggacccaggacagagccaagcccgtgacccagatcgtgtctgccgaagcctggggcagagccgattgcggctttaccagcgagagctaccagcagggcgtgctgagcgccaccatcctgtacgagatcctgctgggcaaggccaccctgtacgccgtgctggtgtctgccctggtgctgatggctatggtcaagcggaaggacagccgggga

SEQ ID NO: 2622 - DNA, 2706 bp, Artificial Sequence
  Synthetic Polynucloetide
atggccttaccagtgaccgccttgctcctgccgctggccttgctgctccacgccgccaggccggaagtgcagctggttgaatctggcggaggactggttcagcctggcggatctctgagactgtcttgtgccgccagcggcttcagcttcagcgacttttggatgagctgggtccgacaggcccctggcaaaggacttgaatgggtcgccacaatcagccaggccggcagcgagaaggactacgtggactctgtgaagggcagattcaccatcagccgggacaacgccaagaagtccctgtacctccagatgaacagcctgagagccgaggacaccgccgtgtactattgtgcctctggcgtgtacagcttcgactacagaggccagggcaccctggtcacagtctcttctggtaccggcggaggcggatctggcggcggaggtagcggtggcggaggatctgaattcgacttcgtgatgacacagagccctgatagcctggccgtgtctctcggcgagcgagtgaccatgagctgcaagtctagccagagcctgctgaacagcggcaaccagaagaactacctgacctggtatcagcagaagcccggccagcctcctaagctgctgatctactgggccagcaccagagaaagcggcgtgcccgatagattttctggctctggcagcggcaccgacttcaccctgacaatttctagcctgcaagccgaggacgtggccgtgtactactgccagaacgactacagctacccctacaccttcggccagggcaccaagctggaaatcaaactcgagatccagaaccctgatcctgccgtgtaccagctgcgggatagcaagagcagcgacaagagcgtgtgtctgttcaccgacttcgacagccagaccaacgtgtcccagagcaaggactccgacgtgtacatcaccgataagtgcgtgctggacatgcggagcatggacttcaagagcaactccgccgtggcctggtccaacaagtccgatttcgcctgcgccaacgccttcaacaacagcattatccccgaggacacattcttcccaagccccgagagcagctgcgacgtgaagctggtggaaaagagcttcgagacagacaccaacctgaacttccagaacctgagcgtgatcggcttcagaatcctgctgctgaaagtggccggctttaacctgctgatgaccctgcggctgtggtccagccgcgccaagagaagcggatctggcgtgaagcagaccctgaatttcgacctgctgaagctggctggcgacgtggaatccaacccaggccctactagtatggactggatttggcgcatccttttccttgtcggcgctgctaccggcgcgcattccgggccccagctccagctgcaagagtctggacctggcctggtcaagcctagcgagacactgagcctgacctgtaccgtgtccggcgatagcatcagcagcggcgattactactggggctggatcagacagcctcctggcaaaggactggaatggatcggccacatctactacagcggcgtgacctactacaaccccagcctgaagtccagagtgaccatcagcgtggacaccagccggaaccagttctccctgaagctgtctagcgtgacagccgccgataccgccgtgtactactgcaccagagaggacagcagcaactggcggagtagaggccagggaacactggtcacagttagctctggatccggcggaggcggaagtggaggcggaggatctggcggcggaggctctttcgaagaagtgcaactggttcagagcggagccgagctgaagaaacctggggccagcgtgaaggtgtcctgtaaagccagcggctacacctttaccgactactacatgaaatgggtccgacaggccccaggccagggactcgaatggatcggcgatattatccccagcaacggggccaccttctacaaccagaaattcaagggccgcgtgaccatcaccgtggacaagagcacaagcaccgcctacatggaactgagcagcctgagaagcgaggacaccgccgtgtattattgcgccagaagccatctgctgcgggccagttggttcgcctattggggacagggaaccctggtcaccgttagctctacgcgtgaggacctgaagaacgtgttcccacctgaggtggccgtgttcgagcctagcgaggccgagatcagccacacccagaaagccaccctcgtgtgcctggctaccggcttctaccccgaccatgtggaactgtcttggtgggtcaacggcaaagaggtgcacagcggcgtgtgtaccgacccccagccactgaaagaacagcccgccctgaacgacagccggtactgcctgagcagcagactgagagtgtccgccaccttctggcagaacccccggaaccacttcagatgccaggtgcagttctacggcctgagcgagaacgacgagtggacccaggacagagccaagcccgtgacccagatcgtgtctgccgaagcctggggcagagccgattgcggctttaccagcgagagctaccagcagggcgtgctgagcgccaccatcctgtacgagatcctgctgggcaaggccaccctgtacgccgtgctggtgtctgccctggtgctgatggctatggtcaagcggaaggacagccgggga

SEQ ID NO: 2623 - DNA, 2706 bp, Artificial Sequence
  Synthetic Polynucloetide
atggccttaccagtgaccgccttgctcctgccgctggccttgctgctccacgccgccaggccggaagtgcagctggttgaatctggcggaggactggttcagcctggcggatctctgagactgtcttgtgccgccagcggcttcagcttcagcgacttttggatgagctgggtccgacaggcccctggcaaaggacttgaatgggtcgccacaatcagccaggccggcagcgagaaggactacgtggactctgtgaagggcagattcaccatcagccgggacaacgccaagaagtccctgtacctccagatgaacagcctgagagccgaggacaccgccgtgtactattgtgcctctggcgtgtacagcttcgactacagaggccagggcaccctggtcacagtctcttctggtaccggcggaggcggatctggcggcggaggtagcggtggcggaggatctgaattcgacttcgtgatgacacagagccctgatagcctggccgtgtctctcggcgagcgagtgaccatgagctgcaagtctagccagagcctgctgaacagcggcaaccagaagaactacctgacctggtatcagcagaagcccggccagcctcctaagctgctgatctactgggccagcaccagagaaagcggcgtgcccgatagattttctggctctggcagcggcaccgacttcaccctgacaatttctagcctgcaagccgaggacgtggccgtgtactactgccagaacgactacagctacccctacaccttcggccagggcaccaagctggaaatcaaactcgagatccagaaccctgatcctgccgtgtaccagctgcgggatagcaagagcagcgacaagagcgtgtgtctgttcaccgacttcgacagccagaccaacgtgtcccagagcaaggactccgacgtgtacatcaccgataagtgcgtgctggacatgcggagcatggacttcaagagcaactccgccgtggcctggtccaacaagtccgatttcgcctgcgccaacgccttcaacaacagcattatccccgaggacacattcttcccaagccccgagagcagctgcgacgtgaagctggtggaaaagagcttcgagacagacaccaacctgaacttccagaacctgagcgtgatcggcttcagaatcctgctgctgaaagtggccggctttaacctgctgatgaccctgcggctgtggtccagccgcgccaagagaagcggatctggcgtgaagcagaccctgaatttcgacctgctgaagctggctggcgacgtggaatccaacccaggccctactagtatggactggatttggcgcatccttttccttgtcggcgctgctaccggcgcgcattccgggccccagctccagctgcaagagtctggacctggcctggtcaagcctagcgagacactgagcctgacctgtaccgtgtccggcgatagcatcagcagcggcgattactactggggctggatcagacagcctcctggcaaaggactggaatggatcggccacatctactacagcggcgtgacctactacaaccccagcctgaagtccagagtgaccatcagcgtggacaccagccggaaccagttctccctgaagctgtctagcgtgacagccgccgataccgccgtgtactactgcaccagagaggacagcagcaactggcggagtagaggccagggaacactggtcacagttagctctggatccggcggaggcggaagtggaggcggaggatctggcggcggaggctctttcgaacaagtgcaactggttcagagcggagccgagctgaagaaacctggggccagcgtgaaggtgtcctgtaaagccagcggctacacctttaccgactactacatgaaatgggtccgacaggccccaggccagggactcgaatggatcggcgatattatccccagcaacggggccaccttctacaaccagaaattcaagggccgcgtgaccatcaccgtggacaagagcacaagcaccgcctacatggaactgagcagcctgagaagcgaggacaccgccgtgtattattgcgccagaagccatctgctgcgggccagttggttcgcctattggggacagggaaccctggtcaccgttagctctacgcgtgaggacctgaagaacgtgttcccacctgaggtggccgtgttcgagcctagcgaggccgagatcagccacacccagaaagccaccctcgtgtgcctggctaccggcttctaccccgaccatgtggaactgtcttggtgggtcaacggcaaagaggtgcacagcggcgtgtgtaccgacccccagccactgaaagaacagcccgccctgaacgacagccggtactgcctgagcagcagactgagagtgtccgccaccttctggcagaacccccggaaccacttcagatgccaggtgcagttctacggcctgagcgagaacgacgagtggacccaggacagagccaagcccgtgacccagatcgtgtctgccgaagcctggggcagagccgattgcggctttaccagcgagagctaccagcagggcgtgctgagcgccaccatcctgtacgagatcctgctgggcaaggccaccctgtacgccgtgctggtgtctgccctggtgctgatggctatggtcaagcggaaggacagccgggga

SEQ ID NO: 2624 - DNA, 2676 bp, Artificial Sequence
  Synthetic Polynucloetide
atggccttaccagtgaccgccttgctcctgccgctggccttgctgctccacgccgccaggccggaagtgcagctggttgaatctggcggaggactggttcagcctggcggatctctgagactgtcttgtgccgccagcggcttcagcttcagcgacttttggatgagctgggtccgacaggcccctggcaaaggacttgaatgggtcgccacaatcagccaggccggcagcgagaaggactacgtggactctgtgaagggcagattcaccatcagccgggacaacgccaagaagtccctgtacctccagatgaacagcctgagagccgaggacaccgccgtgtactattgtgcctctggcgtgtacagcttcgactacagaggccagggcaccctggtcacagtctcttctggtaccggcggaggcggatctggcggcggaggtagcggtggcggaggatctgaattcgacgtgcagatcacacagagccctagctacctggctgcctctcctggcgagacaatcaccatcaactgtcgggccagcaagagcatcagcaaggacctggcctggtatcaagagaagcccggcaagaccaacaagctgctgatctacagcggcagcacactccagtctggcatccccagcagattttccggctctggcagcggcaccgatttcaccctgaccataagcagcctggaacctgaggacttcgccatgtactactgccagcagcacaacaagtacccctacacctttggcggaggcaccaagctggaaatcaagagactcgagatccagaaccctgatcctgccgtgtaccagctgcgggatagcaagagcagcgacaagagcgtgtgtctgttcaccgacttcgacagccagaccaacgtgtcccagagcaaggactccgacgtgtacatcaccgataagtgcgtgctggacatgcggagcatggacttcaagagcaactccgccgtggcctggtccaacaagtccgatttcgcctgcgccaacgccttcaacaacagcattatccccgaggacacattcttcccaagccccgagagcagctgcgacgtgaagctggtggaaaagagcttcgagacagacaccaacctgaacttccagaacctgagcgtgatcggcttcagaatcctgctgctgaaagtggccggctttaacctgctgatgaccctgcggctgtggtccagccgcgccaagagaagcggatctggcgtgaagcagaccctgaatttcgacctgctgaagctggctggcgacgtggaatccaacccaggccctactagtatggactggatttggcgcatccttttccttgtcggcgctgctaccggcgcgcattccgggccccagctccagctgcaagagtctggacctggcctggtcaagcctagcgagacactgagcctgacctgtaccgtgtccggcgatagcatcagcagcggcgattactactggggctggatcagacagcctcctggcaaaggactggaatggatcggccacatctactacagcggcgtgacctactacaaccccagcctgaagtccagagtgaccatcagcgtggacaccagccggaaccagttctccctgaagctgtctagcgtgacagccgccgataccgccgtgtactactgcaccagagaggacagcagcaactggcggagtagaggccagggaacactggtcacagttagctctggatccggcggaggcggaagtggaggcggaggatctggcggcggaggctctttcgaacaagttcaactgcaacagcctggggccgagcttgttagacctggcgcttctgtgaagctgagctgcaaggccagcggctacaccttcaccagctactggatgaactgggtcaagcagcggcctgaccagggcctcgaatggatcggcagaatcgacccctacgacagcgagacacactacaaccagaagttcaaggacaaggccatcctgaccgtggacaagagcagctccaccgcctacatgcaactgagcagcctgacctctgaggatagcgccgtgtactattgcgccagaggcaactgggacgactattggggccagggcacaaccctgacagtgtctagtacgcgtgaggacctgaagaacgtgttcccacctgaggtggccgtgttcgagcctagcgaggccgagatcagccacacccagaaagccaccctcgtgtgcctggctaccggcttctaccccgaccatgtggaactgtcttggtgggtcaacggcaaagaggtgcacagcggcgtgtgtaccgacccccagccactgaaagaacagcccgccctgaacgacagccggtactgcctgagcagcagactgagagtgtccgccaccttctggcagaacccccggaaccacttcagatgccaggtgcagttctacggcctgagcgagaacgacgagtggacccaggacagagccaagcccgtgacccagatcgtgtctgccgaagcctggggcagagccgattgcggctttaccagcgagagctaccagcagggcgtgctgagcgccaccatcctgtacgagatcctgctgggcaaggccaccctgtacgccgtgctggtgtctgccctggtgctgatggctatggtcaagcggaaggacagccgggga

SEQ ID NO: 2625 - DNA, 2682 bp, Artificial Sequence
  Synthetic Polynucloetide
atggccttaccagtgaccgccttgctcctgccgctggccttgctgctccacgccgccaggccggaagtgcagctggttgaatctggcggaggactggttcagcctggcggatctctgagactgtcttgtgccgccagcggcttcagcttcagcgacttttggatgagctgggtccgacaggcccctggcaaaggacttgaatgggtcgccacaatcagccaggccggcagcgagaaggactacgtggactctgtgaagggcagattcaccatcagccgggacaacgccaagaagtccctgtacctccagatgaacagcctgagagccgaggacaccgccgtgtactattgtgcctctggcgtgtacagcttcgactacagaggccagggcaccctggtcacagtctcttctggtaccggcggaggcggatctggcggcggaggtagcggtggcggaggatctgaattcgagatcgtgctgacacagagccctaccagcatgacagcctctccaggcgagcaagtgaccatcacctgtagagccagcagcagcatcaactacatgcactggtatcagcagaagcctggcgcaagccccagaccttggatctacgagacaagcaagctggcctccggcgtgcccgatagattttctggatctgccagcggcaccagctacagcctgaccatcaacaacatggaagccgaggacgccgccacctactactgccagcagtggaattacccctcctggacctttggcggaggcaccaagctggaacttaaactcgagatccagaaccctgatcctgccgtgtaccagctgcgggatagcaagagcagcgacaagagcgtgtgtctgttcaccgacttcgacagccagaccaacgtgtcccagagcaaggactccgacgtgtacatcaccgataagtgcgtgctggacatgcggagcatggacttcaagagcaactccgccgtggcctggtccaacaagtccgatttcgcctgcgccaacgccttcaacaacagcattatccccgaggacacattcttcccaagccccgagagcagctgcgacgtgaagctggtggaaaagagcttcgagacagacaccaacctgaacttccagaacctgagcgtgatcggcttcagaatcctgctgctgaaagtggccggctttaacctgctgatgaccctgcggctgtggtccagccgcgccaagagaagcggatctggcgtgaagcagaccctgaatttcgacctgctgaagctggctggcgacgtggaatccaacccaggccctactagtatggactggatttggcgcatccttttccttgtcggcgctgctaccggcgcgcattccgggccccagctccagctgcaagagtctggacctggcctggtcaagcctagcgagacactgagcctgacctgtaccgtgtccggcgatagcatcagcagcggcgattactactggggctggatcagacagcctcctggcaaaggactggaatggatcggccacatctactacagcggcgtgacctactacaaccccagcctgaagtccagagtgaccatcagcgtggacaccagccggaaccagttctccctgaagctgtctagcgtgacagccgccgataccgccgtgtactactgcaccagagaggacagcagcaactggcggagtagaggccagggaacactggtcacagttagctctggatccggcggaggcggaagtggaggcggaggatctggcggcggaggctctttcgaagaagtgcagctcgttgagtctggtggcggactggttcagcctggaagaagcctgaagctgagctgtgccgccagcggcttcaccttcagcgactacaatatggcctgggtccgacaggcccctaagaaaggactggaatgggtcgccaccatcctgtacgatggcggcagaacctactaccggggcagcgtgaagggcagattcaccatcagcagagacaacgccaagagcaccctgtacctgcggatggactctctgagaagcgaggataccgccacatattactgtgccacacacagccggggcaccgactactttgattattggggccagggcgtgatggttaccgtgtctagtacgcgtgaggacctgaagaacgtgttcccacctgaggtggccgtgttcgagcctagcgaggccgagatcagccacacccagaaagccaccctcgtgtgcctggctaccggcttctaccccgaccatgtggaactgtcttggtgggtcaacggcaaagaggtgcacagcggcgtgtgtaccgacccccagccactgaaagaacagcccgccctgaacgacagccggtactgcctgagcagcagactgagagtgtccgccaccttctggcagaacccccggaaccacttcagatgccaggtgcagttctacggcctgagcgagaacgacgagtggacccaggacagagccaagcccgtgacccagatcgtgtctgccgaagcctggggcagagccgattgcggctttaccagcgagagctaccagcagggcgtgctgagcgccaccatcctgtacgagatcctgctgggcaaggccaccctgtacgccgtgctggtgtctgccctggtgctgatggctatggtcaagcggaaggacagccgggga

SEQ ID NO: 2626 - DNA, 2709 bp, Artificial Sequence
  Synthetic Polynucloetide
atggccttaccagtgaccgccttgctcctgccgctggccttgctgctccacgccgccaggccggaagtgcagctggttgaatctggcggaggactggttcagcctggcggatctctgagactgtcttgtgccgccagcggcttcagcttcagcgacttttggatgagctgggtccgacaggcccctggcaaaggacttgaatgggtcgccacaatcagccaggccggcagcgagaaggactacgtggactctgtgaagggcagattcaccatcagccgggacaacgccaagaagtccctgtacctccagatgaacagcctgagagccgaggacaccgccgtgtactattgtgcctctggcgtgtacagcttcgactacagaggccagggcaccctggtcacagtctcttctggtaccggcggaggcggatctggcggcggaggtagcggtggcggaggatctgaattcgacatcgtgatgacacagagcccttctagcctggccgtgtctgagggcgagacagtgaccatcaactgcaagagcagccagagcttcctgtctagcggcgacggcaagaattacgtggcctggtatcagtacaagcccggacagagccccaagctgctgatctactgggccagcacaagacagagcggcgtgcccgatagattcatcggctctggcagcggcaccgacttcaccctgacaatctctacagtgcaggccgaggacctggctatctactactgccagcagtattacgacacccctctgacctttggctccggcaccaagctggaaatcaaactcgagatccagaaccctgatcctgccgtgtaccagctgcgggatagcaagagcagcgacaagagcgtgtgtctgttcaccgacttcgacagccagaccaacgtgtcccagagcaaggactccgacgtgtacatcaccgataagtgcgtgctggacatgcggagcatggacttcaagagcaactccgccgtggcctggtccaacaagtccgatttcgcctgcgccaacgccttcaacaacagcattatccccgaggacacattcttcccaagccccgagagcagctgcgacgtgaagctggtggaaaagagcttcgagacagacaccaacctgaacttccagaacctgagcgtgatcggcttcagaatcctgctgctgaaagtggccggctttaacctgctgatgaccctgcggctgtggtccagccgcgccaagagaagcggatctggcgtgaagcagaccctgaatttcgacctgctgaagctggctggcgacgtggaatccaacccaggccctactagtatggactggatttggcgcatccttttccttgtcggcgctgctaccggcgcgcattccgggccccagctccagctgcaagagtctggacctggcctggtcaagcctagcgagacactgagcctgacctgtaccgtgtccggcgatagcatcagcagcggcgattactactggggctggatcagacagcctcctggcaaaggactggaatggatcggccacatctactacagcggcgtgacctactacaaccccagcctgaagtccagagtgaccatcagcgtggacaccagccggaaccagttctccctgaagctgtctagcgtgacagccgccgataccgccgtgtactactgcaccagagaggacagcagcaactggcggagtagaggccagggaacactggtcacagttagctctggatccggcggaggcggaagtggaggcggaggatctggcggcggaggctctttcgaagaagtgaagctgcaagagtctggccccagcctggtgcagagtagccaaacactgagcctgacctgtaccgtgtccggctttagcctgaccagctaccacatccactgggtccgacagacccctggcaaaggactggaatggatgggcgtgatgtggagcgacggcgacaccagctataacagcgccctgaagtcccggctgagcatcagcagagatacaagccagagccaggtgttcctgaagatgaacagcctccagaccgaggacaccgccacctactattgtgccagaggctactacagcagctacctgtacctttggttcgcctattggggccagggcaccctggttacagtcagctctacgcgtgaggacctgaagaacgtgttcccacctgaggtggccgtgttcgagcctagcgaggccgagatcagccacacccagaaagccaccctcgtgtgcctggctaccggcttctaccccgaccatgtggaactgtcttggtgggtcaacggcaaagaggtgcacagcggcgtgtgtaccgacccccagccactgaaagaacagcccgccctgaacgacagccggtactgcctgagcagcagactgagagtgtccgccaccttctggcagaacccccggaaccacttcagatgccaggtgcagttctacggcctgagcgagaacgacgagtggacccaggacagagccaagcccgtgacccagatcgtgtctgccgaagcctggggcagagccgattgcggctttaccagcgagagctaccagcagggcgtgctgagcgccaccatcctgtacgagatcctgctgggcaaggccaccctgtacgccgtgctggtgtctgccctggtgctgatggctatggtcaagcggaaggacagccgggga

SEQ ID NO: 2627 - DNA, 2721 bp, Artificial Sequence
  Synthetic Polynucloetide
atggccttaccagtgaccgccttgctcctgccgctggccttgctgctccacgccgccaggccggaagtgcagctggttgaatctggcggaggactggttcagcctggcggatctctgagactgtcttgtgccgccagcggcttcagcttcagcgacttttggatgagctgggtccgacaggcccctggcaaaggacttgaatgggtcgccacaatcagccaggccggcagcgagaaggactacgtggactctgtgaagggcagattcaccatcagccgggacaacgccaagaagtccctgtacctccagatgaacagcctgagagccgaggacaccgccgtgtactattgtgcctctggcgtgtacagcttcgactacagaggccagggcaccctggtcacagtctcttctggtaccggcggaggcggatctggcggcggaggtagcggtggcggaggatctgaattcgacgtgctgatgacccagacacctgtgtctctgccagtgtctctcggaggccaggtgtccatctcctgtagaagcagccagagcctggtgcactccgacggcgatacctacctgcactggtatctccagaagcctggacagagccctcagctcctgatctaccgggtgtccaacagattcagcggcgtgcccgatagattttccggcagcggctctggcaccgacttcaccctgaagatcagcagagtggaacccgaggacctgggcctgtactactgtctccagaccacacacttcccaccttggacctttggcggaggcaccaagctggaaatgaaactcgagatccagaaccctgatcctgccgtgtaccagctgcgggatagcaagagcagcgacaagagcgtgtgtctgttcaccgacttcgacagccagaccaacgtgtcccagagcaaggactccgacgtgtacatcaccgataagtgcgtgctggacatgcggagcatggacttcaagagcaactccgccgtggcctggtccaacaagtccgatttcgcctgcgccaacgccttcaacaacagcattatccccgaggacacattcttcccaagccccgagagcagctgcgacgtgaagctggtggaaaagagcttcgagacagacaccaacctgaacttccagaacctgagcgtgatcggcttcagaatcctgctgctgaaagtggccggctttaacctgctgatgaccctgcggctgtggtccagccgcgccaagagaagcggatctggcgtgaagcagaccctgaatttcgacctgctgaagctggctggcgacgtggaatccaacccaggccctactagtatggactggatttggcgcatccttttccttgtcggcgctgctaccggcgcgcattccgggccccagctccagctgcaagagtctggacctggcctggtcaagcctagcgagacactgagcctgacctgtaccgtgtccggcgatagcatcagcagcggcgattactactggggctggatcagacagcctcctggcaaaggactggaatggatcggccacatctactacagcggcgtgacctactacaaccccagcctgaagtccagagtgaccatcagcgtggacaccagccggaaccagttctccctgaagctgtctagcgtgacagccgccgataccgccgtgtactactgcaccagagaggacagcagcaactggcggagtagaggccagggaacactggtcacagttagctctggatccggcggaggcggaagtggaggcggaggatctggcggcggaggctctttcgaacaggttcagctccagcagtctggacccgagcttagaaggccaggatctagcgtcagactgagctgcaaggccagcggctaccggatcaaggacttcctgatccactggattaagaacagacccgagcacggcctggaatggatcggatggattgaccctgaggacggcgagactaagtacgcccagaagttccagaccaaggccacactgaccgccgacacctctagcaacaccgcctacatgcaactgagcagcctgaccagcgaggacaccgccacctacttttgtgctagatggggcgacgtgtactacggcctgatgagaggccatgtgatggatgcctggggccagggaacaagcgtgacagtctcttctacgcgtgaggacctgaagaacgtgttcccacctgaggtggccgtgttcgagcctagcgaggccgagatcagccacacccagaaagccaccctcgtgtgcctggctaccggcttctaccccgaccatgtggaactgtcttggtgggtcaacggcaaagaggtgcacagcggcgtgtgtaccgacccccagccactgaaagaacagcccgccctgaacgacagccggtactgcctgagcagcagactgagagtgtccgccaccttctggcagaacccccggaaccacttcagatgccaggtgcagttctacggcctgagcgagaacgacgagtggacccaggacagagccaagcccgtgacccagatcgtgtctgccgaagcctggggcagagccgattgcggctttaccagcgagagctaccagcagggcgtgctgagcgccaccatcctgtacgagatcctgctgggcaaggccaccctgtacgccgtgctggtgtctgccctggtgctgatggctatggtcaagcggaaggacagccgggga

SEQ ID NO: 2628 - DNA, 2706 bp, Artificial Sequence
  Synthetic Polynucloetide
atggccttaccagtgaccgccttgctcctgccgctggccttgctgctccacgccgccaggccggaagtgcagctggttgaatctggcggaggactggttcagcctggcggatctctgagactgtcttgtgccgccagcggcttcagcttcagcgacttttggatgagctgggtccgacaggcccctggcaaaggacttgaatgggtcgccacaatcagccaggccggcagcgagaaggactacgtggactctgtgaagggcagattcaccatcagccgggacaacgccaagaagtccctgtacctccagatgaacagcctgagagccgaggacaccgccgtgtactattgtgcctctggcgtgtacagcttcgactacagaggccagggcaccctggtcacagtctcttctggtaccggcggaggcggatctggcggcggaggtagcggtggcggaggatctgaattcgacatcgtgatgacacagagccccgccacactgtcactgtctccaggcgaaagagccacactgagctgtcggagcagcaagagcctccagaacgtgaacggcaacacctacctgtactggttccagcagaagcccggccagtctcctcagctcctgatctacagaatgagcaacctgaacagcggcgtgcccgacagattttctggcagcggaagcggcaccgagttcaccctgaccataagcagcctggaacctgaggacttcgccgtgtactactgtatgcagcacctggaataccccatcaccttcggagccggcaccaagctggaaatcaaactcgagatccagaaccctgatcctgccgtgtaccagctgcgggatagcaagagcagcgacaagagcgtgtgtctgttcaccgacttcgacagccagaccaacgtgtcccagagcaaggactccgacgtgtacatcaccgataagtgcgtgctggacatgcggagcatggacttcaagagcaactccgccgtggcctggtccaacaagtccgatttcgcctgcgccaacgccttcaacaacagcattatccccgaggacacattcttcccaagccccgagagcagctgcgacgtgaagctggtggaaaagagcttcgagacagacaccaacctgaacttccagaacctgagcgtgatcggcttcagaatcctgctgctgaaagtggccggctttaacctgctgatgaccctgcggctgtggtccagccgcgccaagagaagcggatctggcgtgaagcagaccctgaatttcgacctgctgaagctggctggcgacgtggaatccaacccaggccctactagtatggactggatttggcgcatccttttccttgtcggcgctgctaccggcgcgcattccgggccccagctccagctgcaagagtctggacctggcctggtcaagcctagcgagacactgagcctgacctgtaccgtgtccggcgatagcatcagcagcggcgattactactggggctggatcagacagcctcctggcaaaggactggaatggatcggccacatctactacagcggcgtgacctactacaaccccagcctgaagtccagagtgaccatcagcgtggacaccagccggaaccagttctccctgaagctgtctagcgtgacagccgccgataccgccgtgtactactgcaccagagaggacagcagcaactggcggagtagaggccagggaacactggtcacagttagctctggatccggcggaggcggaagtggaggcggaggatctggcggcggaggctctttcgaagaagtgcaactggttgaatctggcggcggactggttaagcctggcggatctctgaagctgagctgtgccgccagcggctacacctttaccagctacgtgatgcactgggtccgacaggcccctggcaaaggacttgagtggatcggctacatcaacccctacaacgatggcaccaagtacaacgagaagttccagggcagagtgaccatcagctccgacaagagcatcagcaccgcctacatggaactgagcagcctgagaagcgaggataccgccatgtactattgcgccagaggcacctactactacggcaccagagtgttcgactactggggccagggaaccctggtcacagtctcttctacgcgtgaggacctgaagaacgtgttcccacctgaggtggccgtgttcgagcctagcgaggccgagatcagccacacccagaaagccaccctcgtgtgcctggctaccggcttctaccccgaccatgtggaactgtcttggtgggtcaacggcaaagaggtgcacagcggcgtgtgtaccgacccccagccactgaaagaacagcccgccctgaacgacagccggtactgcctgagcagcagactgagagtgtccgccaccttctggcagaacccccggaaccacttcagatgccaggtgcagttctacggcctgagcgagaacgacgagtggacccaggacagagccaagcccgtgacccagatcgtgtctgccgaagcctggggcagagccgattgcggctttaccagcgagagctaccagcagggcgtgctgagcgccaccatcctgtacgagatcctgctgggcaaggccaccctgtacgccgtgctggtgtctgccctggtgctgatggctatggtcaagcggaaggacagccgggga

SEQ ID NO: 2629 - DNA, 2694 bp, Artificial Sequence
  Synthetic Polynucloetide
atggccttaccagtgaccgccttgctcctgccgctggccttgctgctccacgccgccaggccggaagtgcagctggttgaatctggcggaggactggttcagcctggcggatctctgagactgtcttgtgccgccagcggcttcagcttcagcgacttttggatgagctgggtccgacaggcccctggcaaaggacttgaatgggtcgccacaatcagccaggccggcagcgagaaggactacgtggactctgtgaagggcagattcaccatcagccgggacaacgccaagaagtccctgtacctccagatgaacagcctgagagccgaggacaccgccgtgtactattgtgcctctggcgtgtacagcttcgactacagaggccagggcaccctggtcacagtctcttctggtaccggcggaggcggatctggcggcggaggtagcggtggcggaggatctgaattcgacatccagatgacacagagccctagcagcctgtctgccagcgtgggagacagagtgaccatcacatgcaaggccagcgaccacatcaacaactggctggcctggtatcagcagaagcctggacaggcccctaagctgctgatctacggcgctaccacactggaaacaggcgtgcccagcagattttctggcagcggctctggcaccgactacaccctgacaatatccagcctccagcctgaggacttcgccacctactactgtcagcagagctggaacaccccttggacattcggccagggcaccaagctggaaatcaagagactcgagatccagaaccctgatcctgccgtgtaccagctgcgggatagcaagagcagcgacaagagcgtgtgtctgttcaccgacttcgacagccagaccaacgtgtcccagagcaaggactccgacgtgtacatcaccgataagtgcgtgctggacatgcggagcatggacttcaagagcaactccgccgtggcctggtccaacaagtccgatttcgcctgcgccaacgccttcaacaacagcattatccccgaggacacattcttcccaagccccgagagcagctgcgacgtgaagctggtggaaaagagcttcgagacagacaccaacctgaacttccagaacctgagcgtgatcggcttcagaatcctgctgctgaaagtggccggctttaacctgctgatgaccctgcggctgtggtccagccgcgccaagagaagcggatctggcgtgaagcagaccctgaatttcgacctgctgaagctggctggcgacgtggaatccaacccaggccctactagtatggactggatttggcgcatccttttccttgtcggcgctgctaccggcgcgcattccgggccccagctccagctgcaagagtctggacctggcctggtcaagcctagcgagacactgagcctgacctgtaccgtgtccggcgatagcatcagcagcggcgattactactggggctggatcagacagcctcctggcaaaggactggaatggatcggccacatctactacagcggcgtgacctactacaaccccagcctgaagtccagagtgaccatcagcgtggacaccagccggaaccagttctccctgaagctgtctagcgtgacagccgccgataccgccgtgtactactgcaccagagaggacagcagcaactggcggagtagaggccagggaacactggtcacagttagctctggatccggcggaggcggaagtggaggcggaggatctggcggcggaggctctttcgaacaagttcagcttcaacagcctggcgctgagctggtcaaacctggcgcttctgtgaagatgagctgcaaagccagcggctacgccttcagcagctactggatcaactggatgaagcagaaacccggccagggactcgaatggatcggccaaatctatcccggcgacggcgacaccaactacaacggcaagttcaagggcagagccacactgaccgccgatacctctagcagcacagcctacatgcagctgagcagcctgaccagcgaagatagcgccgtgtacttctgtgcccggtccatcacaacagtcgtgggctgcgctatggactattggggccagggaacaagcgtgaccgtgtctagtacgcgtgaggacctgaagaacgtgttcccacctgaggtggccgtgttcgagcctagcgaggccgagatcagccacacccagaaagccaccctcgtgtgcctggctaccggcttctaccccgaccatgtggaactgtcttggtgggtcaacggcaaagaggtgcacagcggcgtgtgtaccgacccccagccactgaaagaacagcccgccctgaacgacagccggtactgcctgagcagcagactgagagtgtccgccaccttctggcagaacccccggaaccacttcagatgccaggtgcagttctacggcctgagcgagaacgacgagtggacccaggacagagccaagcccgtgacccagatcgtgtctgccgaagcctggggcagagccgattgcggctttaccagcgagagctaccagcagggcgtgctgagcgccaccatcctgtacgagatcctgctgggcaaggccaccctgtacgccgtgctggtgtctgccctggtgctgatggctatggtcaagcggaaggacagccgggga

SEQ ID NO: 2630 - DNA, 2700 bp, Artificial Sequence
  Synthetic Polynucloetide
atggccttaccagtgaccgccttgctcctgccgctggccttgctgctccacgccgccaggccggaagtgcagctggttgaatctggcggaggactggttcagcctggcggatctctgagactgtcttgtgccgccagcggcttcagcttcagcgacttttggatgagctgggtccgacaggcccctggcaaaggacttgaatgggtcgccacaatcagccaggccggcagcgagaaggactacgtggactctgtgaagggcagattcaccatcagccgggacaacgccaagaagtccctgtacctccagatgaacagcctgagagccgaggacaccgccgtgtactattgtgcctctggcgtgtacagcttcgactacagaggccagggcaccctggtcacagtctcttctggtaccggcggaggcggatctggcggcggaggtagcggtggcggaggatctgaattccagatcgtgctgtctcagtctcctgccatcctgagcgcttccccaggcgagaaagtgaccatgacctgtagagccagcagcagcgtgtcctacatgcactggtatcagcagaagcccggcagcagccctaagccttggatctacgccaccagcaatctggcctctggcgtgccagccagattttctggctctggcagcggcaccagctacagcttcacaatcagcagagtggaagccgaggacgccgccacctactattgtcagcagtggaccttcaatcctcctaccttcggcggaggcacccggctggaaatcaaaagaacagtggctgctctcgagatccagaaccctgatcctgccgtgtaccagctgcgggatagcaagagcagcgacaagagcgtgtgtctgttcaccgacttcgacagccagaccaacgtgtcccagagcaaggactccgacgtgtacatcaccgataagtgcgtgctggacatgcggagcatggacttcaagagcaactccgccgtggcctggtccaacaagtccgatttcgcctgcgccaacgccttcaacaacagcattatccccgaggacacattcttcccaagccccgagagcagctgcgacgtgaagctggtggaaaagagcttcgagacagacaccaacctgaacttccagaacctgagcgtgatcggcttcagaatcctgctgctgaaagtggccggctttaacctgctgatgaccctgcggctgtggtccagccgcgccaagagaagcggatctggcgtgaagcagaccctgaatttcgacctgctgaagctggctggcgacgtggaatccaacccaggccctactagtatggactggatttggcgcatccttttccttgtcggcgctgctaccggcgcgcattccgggccccagctccagctgcaagagtctggacctggcctggtcaagcctagcgagacactgagcctgacctgtaccgtgtccggcgatagcatcagcagcggcgattactactggggctggatcagacagcctcctggcaaaggactggaatggatcggccacatctactacagcggcgtgacctactacaaccccagcctgaagtccagagtgaccatcagcgtggacaccagccggaaccagttctccctgaagctgtctagcgtgacagccgccgataccgccgtgtactactgcaccagagaggacagcagcaactggcggagtagaggccagggaacactggtcacagttagctctggatccggcggaggcggaagtggaggcggaggatctggcggcggaggctctttcgaacaggcttatctgcaacagagcggagccgaactcgtcagacctggcgcttctgtgaagatgagctgcaaggccagcggctacaccttcaccagctataatatgcactgggtcaagcagacccctcggcagggactcgaatggatcggcggaatctatcccggcaacggcgacacctcctacaaccagaagttcaagggcaaagccacactgaccgtgggcaagagcagcagcaccgcctatatgcagctcagcagcctgaccagcgaggacagcgccgtgtacttctgcgccagatacgactacaactacgctatggactactggggccagggcaccagcgtgacagttagctctgccagcacgcgtgaggacctgaagaacgtgttcccacctgaggtggccgtgttcgagcctagcgaggccgagatcagccacacccagaaagccaccctcgtgtgcctggctaccggcttctaccccgaccatgtggaactgtcttggtgggtcaacggcaaagaggtgcacagcggcgtgtgtaccgacccccagccactgaaagaacagcccgccctgaacgacagccggtactgcctgagcagcagactgagagtgtccgccaccttctggcagaacccccggaaccacttcagatgccaggtgcagttctacggcctgagcgagaacgacgagtggacccaggacagagccaagcccgtgacccagatcgtgtctgccgaagcctggggcagagccgattgcggctttaccagcgagagctaccagcagggcgtgctgagcgccaccatcctgtacgagatcctgctgggcaaggccaccctgtacgccgtgctggtgtctgccctggtgctgatggctatggtcaagcggaaggacagccgggga

SEQ ID NO: 2631 - DNA, 2694 bp, Artificial Sequence
  Synthetic Polynucloetide
atggccttaccagtgaccgccttgctcctgccgctggccttgctgctccacgccgccaggccggaagtgcagctggttgaatctggcggaggactggttcagcctggcggatctctgagactgtcttgtgccgccagcggcttcagcttcagcgacttttggatgagctgggtccgacaggcccctggcaaaggacttgaatgggtcgccacaatcagccaggccggcagcgagaaggactacgtggactctgtgaagggcagattcaccatcagccgggacaacgccaagaagtccctgtacctccagatgaacagcctgagagccgaggacaccgccgtgtactattgtgcctctggcgtgtacagcttcgactacagaggccagggcaccctggtcacagtctcttctggtaccggcggaggcggatctggcggcggaggtagcggtggcggaggatctgaattcgagatcgtgctgacacagagccctgccaccctgtctctgagccctggcgaaagagccaccctgagctgtagagccagccagagcgtgtccagctacctggcctggtatcagcagaagcccggccaggctccccggctgctgatctacgatgccagcaatagagccaccggcatccccgccagattttccggctctggcagcggcaccgacttcaccctgaccatcagctccctggaacccgaggacttcgccgtgtactactgccagcagcggagcaactggcccatcacattcggccagggcacccggctggaaatcaaactcgagatccagaaccctgatcctgccgtgtaccagctgcgggatagcaagagcagcgacaagagcgtgtgtctgttcaccgacttcgacagccagaccaacgtgtcccagagcaaggactccgacgtgtacatcaccgataagtgcgtgctggacatgcggagcatggacttcaagagcaactccgccgtggcctggtccaacaagtccgatttcgcctgcgccaacgccttcaacaacagcattatccccgaggacacattcttcccaagccccgagagcagctgcgacgtgaagctggtggaaaagagcttcgagacagacaccaacctgaacttccagaacctgagcgtgatcggcttcagaatcctgctgctgaaagtggccggctttaacctgctgatgaccctgcggctgtggtccagccgcgccaagagaagcggatctggcgtgaagcagaccctgaatttcgacctgctgaagctggctggcgacgtggaatccaacccaggccctactagtatggactggatttggcgcatccttttccttgtcggcgctgctaccggcgcgcattccgggccccagctccagctgcaagagtctggacctggcctggtcaagcctagcgagacactgagcctgacctgtaccgtgtccggcgatagcatcagcagcggcgattactactggggctggatcagacagcctcctggcaaaggactggaatggatcggccacatctactacagcggcgtgacctactacaaccccagcctgaagtccagagtgaccatcagcgtggacaccagccggaaccagttctccctgaagctgtctagcgtgacagccgccgataccgccgtgtactactgcaccagagaggacagcagcaactggcggagtagaggccagggaacactggtcacagttagctctggatccggcggaggcggaagtggaggcggaggatctggcggcggaggctctttcgaagaggtgcagcttgttgagtctggcggaggactggtgcagcccgatagaagcctgagactgtcttgtgccgccagcggcttcaccttccacgattatgccatgcactgggtccgacaggcccctggcaaaggacttgaatgggtgtccaccatctcttggaacagcggcacaatcggctacgccgactctgtgaagggcagattcaccatcagccgggacaacgccaagaacagcctgtacctccagatgaactccctgagagccgaggacacagccctgtactactgcgccaaggacatccagtacggcaactactactacggcatggacgtgtggggccagggcacaacagtgacagtctcttctacgcgtgaggacctgaagaacgtgttcccacctgaggtggccgtgttcgagcctagcgaggccgagatcagccacacccagaaagccaccctcgtgtgcctggctaccggcttctaccccgaccatgtggaactgtcttggtgggtcaacggcaaagaggtgcacagcggcgtgtgtaccgacccccagccactgaaagaacagcccgccctgaacgacagccggtactgcctgagcagcagactgagagtgtccgccaccttctggcagaacccccggaaccacttcagatgccaggtgcagttctacggcctgagcgagaacgacgagtggacccaggacagagccaagcccgtgacccagatcgtgtctgccgaagcctggggcagagccgattgcggctttaccagcgagagctaccagcagggcgtgctgagcgccaccatcctgtacgagatcctgctgggcaaggccaccctgtacgccgtgctggtgtctgccctggtgctgatggctatggtcaagcggaaggacagccgggga

SEQ ID NO: 2632 - DNA, 2679 bp, Artificial Sequence
  Synthetic Polynucloetide
atggccttaccagtgaccgccttgctcctgccgctggccttgctgctccacgccgccaggccggaagtgcagctggttgaatctggcggaggactggttcagcctggcggatctctgagactgtcttgtgccgccagcggcttcagcttcagcgacttttggatgagctgggtccgacaggcccctggcaaaggacttgaatgggtcgccacaatcagccaggccggcagcgagaaggactacgtggactctgtgaagggcagattcaccatcagccgggacaacgccaagaagtccctgtacctccagatgaacagcctgagagccgaggacaccgccgtgtactattgtgcctctggcgtgtacagcttcgactacagaggccagggcaccctggtcacagtctcttctggtaccggcggaggcggatctggcggcggaggtagcggtggcggaggatctgaattcgacatccagatgacacagagccctagcagcctgtctgccagcgtgggagatagagtgaccatcaactgcaaggccagccaggacatcaacagctacctgagctggttccagcagaagcctggcaaggcccctaagacactgatctaccgggccaacagactggtggatggcgtgccaagcagattttctggcagcggcagcggccaggattacaccctgacaatatccagcctccagcctgaggacttcgccacctactactgcctccagtacgacgagttccctctgacctttggcggaggcaccaaggtggaaatcaaactcgagatccagaaccctgatcctgccgtgtaccagctgcgggatagcaagagcagcgacaagagcgtgtgtctgttcaccgacttcgacagccagaccaacgtgtcccagagcaaggactccgacgtgtacatcaccgataagtgcgtgctggacatgcggagcatggacttcaagagcaactccgccgtggcctggtccaacaagtccgatttcgcctgcgccaacgccttcaacaacagcattatccccgaggacacattcttcccaagccccgagagcagctgcgacgtgaagctggtggaaaagagcttcgagacagacaccaacctgaacttccagaacctgagcgtgatcggcttcagaatcctgctgctgaaagtggccggctttaacctgctgatgaccctgcggctgtggtccagccgcgccaagagaagcggatctggcgtgaagcagaccctgaatttcgacctgctgaagctggctggcgacgtggaatccaacccaggccctactagtatggactggatttggcgcatccttttccttgtcggcgctgctaccggcgcgcattccgggccccagctccagctgcaagagtctggacctggcctggtcaagcctagcgagacactgagcctgacctgtaccgtgtccggcgatagcatcagcagcggcgattactactggggctggatcagacagcctcctggcaaaggactggaatggatcggccacatctactacagcggcgtgacctactacaaccccagcctgaagtccagagtgaccatcagcgtggacaccagccggaaccagttctccctgaagctgtctagcgtgacagccgccgataccgccgtgtactactgcaccagagaggacagcagcaactggcggagtagaggccagggaacactggtcacagttagctctggatccggcggaggcggaagtggaggcggaggatctggcggcggaggctctttcgaacaggtgcaactggtgcagtctggggccgaagtgaagaaacctggggcctctgtgaaggtgtcctgcaaagccagcggctacacctttaccaactacgacatcaactgggtccgacaggctccaggccaaggactggaatggatcggctggatctatcctggcgacggcagcaccaagtacaacgagaagttcaaggccaaggccacactgaccgccgataccagcacaagcaccgcctacatggaactgcggagcctgagaagcgacgacaccgccgtgtactattgtgcctccggctacgaggacgctatggactattggggccagggcaccaccgtgacagtgtctagtacgcgtgaggacctgaagaacgtgttcccacctgaggtggccgtgttcgagcctagcgaggccgagatcagccacacccagaaagccaccctcgtgtgcctggctaccggcttctaccccgaccatgtggaactgtcttggtgggtcaacggcaaagaggtgcacagcggcgtgtgtaccgacccccagccactgaaagaacagcccgccctgaacgacagccggtactgcctgagcagcagactgagagtgtccgccaccttctggcagaacccccggaaccacttcagatgccaggtgcagttctacggcctgagcgagaacgacgagtggacccaggacagagccaagcccgtgacccagatcgtgtctgccgaagcctggggcagagccgattgcggctttaccagcgagagctaccagcagggcgtgctgagcgccaccatcctgtacgagatcctgctgggcaaggccaccctgtacgccgtgctggtgtctgccctggtgctgatggctatggtcaagcggaaggacagccgggga

SEQ ID NO: 2633 - DNA, 2685 bp, Artificial Sequence
  Synthetic Polynucloetide
atggccttaccagtgaccgccttgctcctgccgctggccttgctgctccacgccgccaggccggaagtgcagctggttgaatctggcggaggactggttcagcctggcggatctctgagactgtcttgtgccgccagcggcttcagcttcagcgacttttggatgagctgggtccgacaggcccctggcaaaggacttgaatgggtcgccacaatcagccaggccggcagcgagaaggactacgtggactctgtgaagggcagattcaccatcagccgggacaacgccaagaagtccctgtacctccagatgaacagcctgagagccgaggacaccgccgtgtactattgtgcctctggcgtgtacagcttcgactacagaggccagggcaccctggtcacagtctcttctggtaccggcggaggcggatctggcggcggaggtagcggtggcggaggatctgaattcgacatcgtgatgacccagacacctctgagcctgagcgtgacacctggacagcctgccagcattagctgcaagagcagccagtctctgctggacggcgacggcaagacctacctgaattggctgctccagaagcctggacagagccctcagcggctgatctacctggtgtccaagctggatagcggcgtgcccgatagattttctggcagcggctctggcaccgacttcaccctgaagatcagcagagtggaagccgaggacgtgggcgtgtactactgttggcagggcacacacttccccagaacattcggccagggcacaaagctggaaatcaaactcgagatccagaaccctgatcctgccgtgtaccagctgcgggatagcaagagcagcgacaagagcgtgtgtctgttcaccgacttcgacagccagaccaacgtgtcccagagcaaggactccgacgtgtacatcaccgataagtgcgtgctggacatgcggagcatggacttcaagagcaactccgccgtggcctggtccaacaagtccgatttcgcctgcgccaacgccttcaacaacagcattatccccgaggacacattcttcccaagccccgagagcagctgcgacgtgaagctggtggaaaagagcttcgagacagacaccaacctgaacttccagaacctgagcgtgatcggcttcagaatcctgctgctgaaagtggccggctttaacctgctgatgaccctgcggctgtggtccagccgcgccaagagaagcggatctggcgtgaagcagaccctgaatttcgacctgctgaagctggctggcgacgtggaatccaacccaggccctactagtatggactggatttggcgcatccttttccttgtcggcgctgctaccggcgcgcattccgggccccagctccagctgcaagagtctggacctggcctggtcaagcctagcgagacactgagcctgacctgtaccgtgtccggcgatagcatcagcagcggcgattactactggggctggatcagacagcctcctggcaaaggactggaatggatcggccacatctactacagcggcgtgacctactacaaccccagcctgaagtccagagtgaccatcagcgtggacaccagccggaaccagttctccctgaagctgtctagcgtgacagccgccgataccgccgtgtactactgcaccagagaggacagcagcaactggcggagtagaggccagggaacactggtcacagttagctctggatccggcggaggcggaagtggaggcggaggatctggcggcggaggctctttcgaacaagtgcaactggttcagagcggagccgaagtgaagaaacctggggcctctgtgaaggtgtcctgcaaggccagcggctacaccttcaaggacacctacatccactgggtccgacaggcccctggacaaggacttgagtggatgggcagaatcgaccccgccaacggcaacaccaaatacgaccccaagttccagggcagagtgaccatgaccagagacaccagcatcagcaccgcctacatggaactgagccggctgagatccgatgacaccgccgtgtactattgcgctagaagaggcggagtggattggggccagggaacactggttaccgtgtctagtacgcgtgaggacctgaagaacgtgttcccacctgaggtggccgtgttcgagcctagcgaggccgagatcagccacacccagaaagccaccctcgtgtgcctggctaccggcttctaccccgaccatgtggaactgtcttggtgggtcaacggcaaagaggtgcacagcggcgtgtgtaccgacccccagccactgaaagaacagcccgccctgaacgacagccggtactgcctgagcagcagactgagagtgtccgccaccttctggcagaacccccggaaccacttcagatgccaggtgcagttctacggcctgagcgagaacgacgagtggacccaggacagagccaagcccgtgacccagatcgtgtctgccgaagcctggggcagagccgattgcggctttaccagcgagagctaccagcagggcgtgctgagcgccaccatcctgtacgagatcctgctgggcaaggccaccctgtacgccgtgctggtgtctgccctggtgctgatggctatggtcaagcggaaggacagccgggga

SEQ ID NO: 2634 - DNA, 2688 bp, Artificial Sequence
  Synthetic Polynucloetide
atggccttaccagtgaccgccttgctcctgccgctggccttgctgctccacgccgccaggccggaagtgcagctggttgaatctggcggaggactggttcagcctggcggatctctgagactgtcttgtgccgccagcggcttcagcttcagcgacttttggatgagctgggtccgacaggcccctggcaaaggacttgaatgggtcgccacaatcagccaggccggcagcgagaaggactacgtggactctgtgaagggcagattcaccatcagccgggacaacgccaagaagtccctgtacctccagatgaacagcctgagagccgaggacaccgccgtgtactattgtgcctctggcgtgtacagcttcgactacagaggccagggcaccctggtcacagtctcttctggtaccggcggaggcggatctggcggcggaggtagcggtggcggaggatctgaattcgacatccagatgacacagagccctagcagcctgtctgccagcgtgggagacagagtgaccatcacatgcaaggccagccaggatgtgtctacagccgtggcctggttccagcagaagcctggaaaagcccctaagctgctgatctacagccccagctacagatacaccggcgtgcccagcagattttctggcagcggctctggcaccgacttcaccctgacaatatccagcctccagcctgaggacttcacctactactgccagcagctctacagcaccccttacacattcggccagggcaccaaggtggaaatcaaactcgagatccagaaccctgatcctgccgtgtaccagctgcgggatagcaagagcagcgacaagagcgtgtgtctgttcaccgacttcgacagccagaccaacgtgtcccagagcaaggactccgacgtgtacatcaccgataagtgcgtgctggacatgcggagcatggacttcaagagcaactccgccgtggcctggtccaacaagtccgatttcgcctgcgccaacgccttcaacaacagcattatccccgaggacacattcttcccaagccccgagagcagctgcgacgtgaagctggtggaaaagagcttcgagacagacaccaacctgaacttccagaacctgagcgtgatcggcttcagaatcctgctgctgaaagtggccggctttaacctgctgatgaccctgcggctgtggtccagccgcgccaagagaagcggatctggcgtgaagcagaccctgaatttcgacctgctgaagctggctggcgacgtggaatccaacccaggccctactagtatggactggatttggcgcatccttttccttgtcggcgctgctaccggcgcgcattccgggccccagctccagctgcaagagtctggacctggcctggtcaagcctagcgagacactgagcctgacctgtaccgtgtccggcgatagcatcagcagcggcgattactactggggctggatcagacagcctcctggcaaaggactggaatggatcggccacatctactacagcggcgtgacctactacaaccccagcctgaagtccagagtgaccatcagcgtggacaccagccggaaccagttctccctgaagctgtctagcgtgacagccgccgataccgccgtgtactactgcaccagagaggacagcagcaactggcggagtagaggccagggaacactggtcacagttagctctggatccggcggaggcggaagtggaggcggaggatctggcggcggaggctctttcgaagaagtgcaactggttcagagcggagccgaagtgaagaaacctggggcctctgtgaaggtgtcctgcaaagccagcggctacacctttaccgactactacctggacgtggtcgtgcggcaagctcctggacaaggactggaatggatcggcagagtgaacccctacaacggcggcaccatctacaaccagaaattcaagggaagagtgaccctgaccagagacaccagcacctccacagcctacctggaactgagcagcctgagaagcgaagataccgccgtgtactactgcgccagggaccactacagatatgaccctctgctggactactggggccagggaaccctggttacagtgtctagtacgcgtgaggacctgaagaacgtgttcccacctgaggtggccgtgttcgagcctagcgaggccgagatcagccacacccagaaagccaccctcgtgtgcctggctaccggcttctaccccgaccatgtggaactgtcttggtgggtcaacggcaaagaggtgcacagcggcgtgtgtaccgacccccagccactgaaagaacagcccgccctgaacgacagccggtactgcctgagcagcagactgagagtgtccgccaccttctggcagaacccccggaaccacttcagatgccaggtgcagttctacggcctgagcgagaacgacgagtggacccaggacagagccaagcccgtgacccagatcgtgtctgccgaagcctggggcagagccgattgcggctttaccagcgagagctaccagcagggcgtgctgagcgccaccatcctgtacgagatcctgctgggcaaggccaccctgtacgccgtgctggtgtctgccctggtgctgatggctatggtcaagcggaaggacagccgggga

SEQ ID NO: 2635 - DNA, 2706 bp, Artificial Sequence
  Synthetic Polynucloetide
atggccttaccagtgaccgccttgctcctgccgctggccttgctgctccacgccgccaggccggaagtgcagctggttgaatctggcggaggactggttcagcctggcggatctctgagactgtcttgtgccgccagcggcttcagcttcagcgacttttggatgagctgggtccgacaggcccctggcaaaggacttgaatgggtcgccacaatcagccaggccggcagcgagaaggactacgtggactctgtgaagggcagattcaccatcagccgggacaacgccaagaagtccctgtacctccagatgaacagcctgagagccgaggacaccgccgtgtactattgtgcctctggcgtgtacagcttcgactacagaggccagggcaccctggtcacagtctcttctggtaccggcggaggcggatctggcggcggaggtagcggtggcggaggatctgaattcgacatccagatgacacagagccctagcagcctgtctgccagcgtgggagacagagtgaccatcacctgtagagccagccagagcgtgtccaccagcagctacaactacatgcactggtatcagcagaagcccggcaagcctcctaagctgctgattaagtacgccagcaacctggaaagcggcgtgcccagcagattttctggcagcggctctggcaccgacttcaccctgacaatatccagcctccagcctgaggacttcgccacctactactgtcagcactcctgggagatccctctgacattcggccagggcaccaaggtggaaatcaaactcgagatccagaaccctgatcctgccgtgtaccagctgcgggatagcaagagcagcgacaagagcgtgtgtctgttcaccgacttcgacagccagaccaacgtgtcccagagcaaggactccgacgtgtacatcaccgataagtgcgtgctggacatgcggagcatggacttcaagagcaactccgccgtggcctggtccaacaagtccgatttcgcctgcgccaacgccttcaacaacagcattatccccgaggacacattcttcccaagccccgagagcagctgcgacgtgaagctggtggaaaagagcttcgagacagacaccaacctgaacttccagaacctgagcgtgatcggcttcagaatcctgctgctgaaagtggccggctttaacctgctgatgaccctgcggctgtggtccagccgcgccaagagaagcggatctggcgtgaagcagaccctgaatttcgacctgctgaagctggctggcgacgtggaatccaacccaggccctactagtatggactggatttggcgcatccttttccttgtcggcgctgctaccggcgcgcattccgggccccagctccagctgcaagagtctggacctggcctggtcaagcctagcgagacactgagcctgacctgtaccgtgtccggcgatagcatcagcagcggcgattactactggggctggatcagacagcctcctggcaaaggactggaatggatcggccacatctactacagcggcgtgacctactacaaccccagcctgaagtccagagtgaccatcagcgtggacaccagccggaaccagttctccctgaagctgtctagcgtgacagccgccgataccgccgtgtactactgcaccagagaggacagcagcaactggcggagtagaggccagggaacactggtcacagttagctctggatccggcggaggcggaagtggaggcggaggatctggcggcggaggctctttcgaagaagtgcaactggttcagagcggagccgaagtgaagaaacctggggcctctgtgaaggtgtcctgcaaggccagcggctacagcttcaccgactattatatgcactgggtccgacaggctccaggccagggacttgagtggatcggcagaatcaacccctacaacggcgctgccttctacagccagaacttcaaggatagagtgaccctgaccgtggacaccagcaccagcacagcctacctggaactgagcagcctgagaagcgaggacaccgccgtgtactactgcgccattgagagaggcgctgacctggaaggctacgctatggattattggggccagggaaccctggtcaccgtgtcatctacgcgtgaggacctgaagaacgtgttcccacctgaggtggccgtgttcgagcctagcgaggccgagatcagccacacccagaaagccaccctcgtgtgcctggctaccggcttctaccccgaccatgtggaactgtcttggtgggtcaacggcaaagaggtgcacagcggcgtgtgtaccgacccccagccactgaaagaacagcccgccctgaacgacagccggtactgcctgagcagcagactgagagtgtccgccaccttctggcagaacccccggaaccacttcagatgccaggtgcagttctacggcctgagcgagaacgacgagtggacccaggacagagccaagcccgtgacccagatcgtgtctgccgaagcctggggcagagccgattgcggctttaccagcgagagctaccagcagggcgtgctgagcgccaccatcctgtacgagatcctgctgggcaaggccaccctgtacgccgtgctggtgtctgccctggtgctgatggctatggtcaagcggaaggacagccgggga

SEQ ID NO: 2636 - DNA, 2700 bp, Artificial Sequence
  Synthetic Polynucloetide
atggccttaccagtgaccgccttgctcctgccgctggccttgctgctccacgccgccaggccggaagtgcagctggttgaatctggcggaggactggttcagcctggcggatctctgagactgtcttgtgccgccagcggcttcagcttcagcgacttttggatgagctgggtccgacaggcccctggcaaaggacttgaatgggtcgccacaatcagccaggccggcagcgagaaggactacgtggactctgtgaagggcagattcaccatcagccgggacaacgccaagaagtccctgtacctccagatgaacagcctgagagccgaggacaccgccgtgtactattgtgcctctggcgtgtacagcttcgactacagaggccagggcaccctggtcacagtctcttctggtaccggcggaggcggatctggcggcggaggtagcggtggcggaggatctgaattcgagatcgtgctgacacagtctccagccacactgagcgcttctccaggcgagagagtgaccctgacctgtagagccagcagcaacgtgatctccagctacgtgcactggtatcagcagaagcctggcagcagccccagactgtttctgtacagcaccagcaatctggcctccggcgtgccaagcagattttctggctctggcagcggcaccgacttcacctttaccatctctagcctggaagccgaggacgccgccacctactactgtcagcagtacagcggctaccctctgaccttcggccagggcacaagactggaaatcaaactcgagatccagaaccctgatcctgccgtgtaccagctgcgggatagcaagagcagcgacaagagcgtgtgtctgttcaccgacttcgacagccagaccaacgtgtcccagagcaaggactccgacgtgtacatcaccgataagtgcgtgctggacatgcggagcatggacttcaagagcaactccgccgtggcctggtccaacaagtccgatttcgcctgcgccaacgccttcaacaacagcattatccccgaggacacattcttcccaagccccgagagcagctgcgacgtgaagctggtggaaaagagcttcgagacagacaccaacctgaacttccagaacctgagcgtgatcggcttcagaatcctgctgctgaaagtggccggctttaacctgctgatgaccctgcggctgtggtccagccgcgccaagagaagcggatctggcgtgaagcagaccctgaatttcgacctgctgaagctggctggcgacgtggaatccaacccaggccctactagtatggactggatttggcgcatccttttccttgtcggcgctgctaccggcgcgcattccgggccccagctccagctgcaagagtctggacctggcctggtcaagcctagcgagacactgagcctgacctgtaccgtgtccggcgatagcatcagcagcggcgattactactggggctggatcagacagcctcctggcaaaggactggaatggatcggccacatctactacagcggcgtgacctactacaaccccagcctgaagtccagagtgaccatcagcgtggacaccagccggaaccagttctccctgaagctgtctagcgtgacagccgccgataccgccgtgtactactgcaccagagaggacagcagcaactggcggagtagaggccagggaacactggtcacagttagctctggatccggcggaggcggaagtggaggcggaggatctggcggcggaggctctttcgaacaagttcagctgcaagagtctggccctggcctggtcaagcctagcgaaacactgagcctgacctgcgccgtgtctggctactctatcaccagcgcctactattggaactggatcagacagcctcctggcaaaggactggaatggatcggctacatcagctacgacggcagaaacaactacaaccccagcctgaagaaccggatcaccatcaatcccgacaccagcaagaaccagttcagcctccagctgaacagcgtgacccctgaggataccgccgtgtactactgtgccagagaaggcgactacgacgtgggcaactactacgctatggactactggggccagggaaccctggtcacagtctcttctacgcgtgaggacctgaagaacgtgttcccacctgaggtggccgtgttcgagcctagcgaggccgagatcagccacacccagaaagccaccctcgtgtgcctggctaccggcttctaccccgaccatgtggaactgtcttggtgggtcaacggcaaagaggtgcacagcggcgtgtgtaccgacccccagccactgaaagaacagcccgccctgaacgacagccggtactgcctgagcagcagactgagagtgtccgccaccttctggcagaacccccggaaccacttcagatgccaggtgcagttctacggcctgagcgagaacgacgagtggacccaggacagagccaagcccgtgacccagatcgtgtctgccgaagcctggggcagagccgattgcggctttaccagcgagagctaccagcagggcgtgctgagcgccaccatcctgtacgagatcctgctgggcaaggccaccctgtacgccgtgctggtgtctgccctggtgctgatggctatggtcaagcggaaggacagccgggga

SEQ ID NO: 2637 - DNA, 2700 bp, Artificial Sequence
  Synthetic Polynucloetide
atggccttaccagtgaccgccttgctcctgccgctggccttgctgctccacgccgccaggccggaagtgcagctggttgaatctggcggaggactggttcagcctggcggatctctgagactgtcttgtgccgccagcggcttcagcttcagcgacttttggatgagctgggtccgacaggcccctggcaaaggacttgaatgggtcgccacaatcagccaggccggcagcgagaaggactacgtggactctgtgaagggcagattcaccatcagccgggacaacgccaagaagtccctgtacctccagatgaacagcctgagagccgaggacaccgccgtgtactattgtgcctctggcgtgtacagcttcgactacagaggccagggcaccctggtcacagtctcttctggtaccggcggaggcggatctggcggcggaggtagcggtggcggaggatctgaattcgagatcgtgctgacacagtctcccgccacactgtcactgtctccaggcgaaagagccacactgagctgtagagccagcagcaacgtgatctccagctacgtgcactggtatcagcagaagcctggacaggcccctcggctgctgatctacagcacaagcaatctggcctctggcatccccgccagattttctggctctggaagcggcaccgacttcaccctgaccataagcagcctggaacctgaggacttcgccgtgtactactgccagcagtatagcggctaccctctgaccttcggccagggcacaagactggaaatcaaactcgagatccagaaccctgatcctgccgtgtaccagctgcgggatagcaagagcagcgacaagagcgtgtgtctgttcaccgacttcgacagccagaccaacgtgtcccagagcaaggactccgacgtgtacatcaccgataagtgcgtgctggacatgcggagcatggacttcaagagcaactccgccgtggcctggtccaacaagtccgatttcgcctgcgccaacgccttcaacaacagcattatccccgaggacacattcttcccaagccccgagagcagctgcgacgtgaagctggtggaaaagagcttcgagacagacaccaacctgaacttccagaacctgagcgtgatcggcttcagaatcctgctgctgaaagtggccggctttaacctgctgatgaccctgcggctgtggtccagccgcgccaagagaagcggatctggcgtgaagcagaccctgaatttcgacctgctgaagctggctggcgacgtggaatccaacccaggccctactagtatggactggatttggcgcatccttttccttgtcggcgctgctaccggcgcgcattccgggccccagctccagctgcaagagtctggacctggcctggtcaagcctagcgagacactgagcctgacctgtaccgtgtccggcgatagcatcagcagcggcgattactactggggctggatcagacagcctcctggcaaaggactggaatggatcggccacatctactacagcggcgtgacctactacaaccccagcctgaagtccagagtgaccatcagcgtggacaccagccggaaccagttctccctgaagctgtctagcgtgacagccgccgataccgccgtgtactactgcaccagagaggacagcagcaactggcggagtagaggccagggaacactggtcacagttagctctggatccggcggaggcggaagtggaggcggaggatctggcggcggaggctctttcgaagaagtgcaactggtggaaagtggcggcggactggtgcaacctggaagaagcctgagactgtcctgtgccgccagcggctactctatcacaagcgcctactactggaactgggtccgacaggctcctggcaaaggactggaatgggtgtcctacatcagctacgacggcagaaacaactacaaccccagcctgaagaaccgcttcaccatcagccgggacaacgccaagaagtccctgtacctccagatgaacagcctgagagccgaggacacagccctgtactattgcgccaaagagggcgactacgacgtcggcaactactacgctatggactactggggccagggaaccaccgtgactgtctcttctacgcgtgaggacctgaagaacgtgttcccacctgaggtggccgtgttcgagcctagcgaggccgagatcagccacacccagaaagccaccctcgtgtgcctggctaccggcttctaccccgaccatgtggaactgtcttggtgggtcaacggcaaagaggtgcacagcggcgtgtgtaccgacccccagccactgaaagaacagcccgccctgaacgacagccggtactgcctgagcagcagactgagagtgtccgccaccttctggcagaacccccggaaccacttcagatgccaggtgcagttctacggcctgagcgagaacgacgagtggacccaggacagagccaagcccgtgacccagatcgtgtctgccgaagcctggggcagagccgattgcggctttaccagcgagagctaccagcagggcgtgctgagcgccaccatcctgtacgagatcctgctgggcaaggccaccctgtacgccgtgctggtgtctgccctggtgctgatggctatggtcaagcggaaggacagccgggga

SEQ ID NO: 2638 - DNA, 2697 bp, Artificial Sequence
  Synthetic Polynucloetide
atggccttaccagtgaccgccttgctcctgccgctggccttgctgctccacgccgccaggccggaagtgcagctggttgaatctggcggaggactggttcagcctggcggatctctgagactgtcttgtgccgccagcggcttcagcttcagcgacttttggatgagctgggtccgacaggcccctggcaaaggacttgaatgggtcgccacaatcagccaggccggcagcgagaaggactacgtggactctgtgaagggcagattcaccatcagccgggacaacgccaagaagtccctgtacctccagatgaacagcctgagagccgaggacaccgccgtgtactattgtgcctctggcgtgtacagcttcgactacagaggccagggcaccctggtcacagtctcttctggtaccggcggaggcggatctggcggcggaggtagcggtggcggaggatctgaattcgacgtggtcatgacacagaccccactgagcctgcctgtgtctctgggagatcaggccagcatctcctgtagaagcagccagagcctggtgcacagcaacggcaacacctacctgcggtggtatctccagaagcctggacagagccccaaggtgctgatctacaaggtgtccaacagagtgtccggcgtgcccgatagattttctggcagcggctctggcaccgacttcaccctgaagatcaatagagtggaagccgaggacctgggcgtgtacttctgtagccagagcacccatgtgccttggacctttggcggaggcaccaagctggaaatcaagctcgagatccagaaccctgatcctgccgtgtaccagctgcgggatagcaagagcagcgacaagagcgtgtgtctgttcaccgacttcgacagccagaccaacgtgtcccagagcaaggactccgacgtgtacatcaccgataagtgcgtgctggacatgcggagcatggacttcaagagcaactccgccgtggcctggtccaacaagtccgatttcgcctgcgccaacgccttcaacaacagcattatccccgaggacacattcttcccaagccccgagagcagctgcgacgtgaagctggtggaaaagagcttcgagacagacaccaacctgaacttccagaacctgagcgtgatcggcttcagaatcctgctgctgaaagtggccggctttaacctgctgatgaccctgcggctgtggtccagccgcgccaagagaagcggatctggcgtgaagcagaccctgaatttcgacctgctgaagctggctggcgacgtggaatccaacccaggccctactagtatggactggatttggcgcatccttttccttgtcggcgctgctaccggcgcgcattccgggccccagctccagctgcaagagtctggacctggcctggtcaagcctagcgagacactgagcctgacctgtaccgtgtccggcgatagcatcagcagcggcgattactactggggctggatcagacagcctcctggcaaaggactggaatggatcggccacatctactacagcggcgtgacctactacaaccccagcctgaagtccagagtgaccatcagcgtggacaccagccggaaccagttctccctgaagctgtctagcgtgacagccgccgataccgccgtgtactactgcaccagagaggacagcagcaactggcggagtagaggccagggaacactggtcacagttagctctggatccggcggaggcggaagtggaggcggaggatctggcggcggaggctctttcgaaggcgtgaagctggacgagacaggcggaggacttgttcaacctggcggagccatgaagctgagctgtgtgaccagcggctttaccttcggccactactggatgaactgggtccgacagtcccctgagaaaggactggaatgggtcgcccagttcagaaacaagccctacaactacgaaacctactacagcgacagcgtgaagggcagattcaccatcagccgggacgacagcaagtccagcgtgtacctccagatgaacaacctgcgcgtggaagataccggcatctactactgtaccggggccagctacggcatggaatatctcggccagggcaccagcgtgaccgtgtctacaacgcgtgaggacctgaagaacgtgttcccacctgaggtggccgtgttcgagcctagcgaggccgagatcagccacacccagaaagccaccctcgtgtgcctggctaccggcttctaccccgaccatgtggaactgtcttggtgggtcaacggcaaagaggtgcacagcggcgtgtgtaccgacccccagccactgaaagaacagcccgccctgaacgacagccggtactgcctgagcagcagactgagagtgtccgccaccttctggcagaacccccggaaccacttcagatgccaggtgcagttctacggcctgagcgagaacgacgagtggacccaggacagagccaagcccgtgacccagatcgtgtctgccgaagcctggggcagagccgattgcggctttaccagcgagagctaccagcagggcgtgctgagcgccaccatcctgtacgagatcctgctgggcaaggccaccctgtacgccgtgctggtgtctgccctggtgctgatggctatggtcaagcggaaggacagccgggga

SEQ ID NO: 2639 - DNA, 2715 bp, Artificial Sequence
  Synthetic Polynucloetide
atggccttaccagtgaccgccttgctcctgccgctggccttgctgctccacgccgccaggccggaagtgcagctggttgaatctggcggaggactggttcagcctggcggatctctgagactgtcttgtgccgccagcggcttcagcttcagcgacttttggatgagctgggtccgacaggcccctggcaaaggacttgaatgggtcgccacaatcagccaggccggcagcgagaaggactacgtggactctgtgaagggcagattcaccatcagccgggacaacgccaagaagtccctgtacctccagatgaacagcctgagagccgaggacaccgccgtgtactattgtgcctctggcgtgtacagcttcgactacagaggccagggcaccctggtcacagtctcttctggtaccggcggaggcggatctggcggcggaggtagcggtggcggaggatctgaattccaggtgcaactggtggaatctggcggcaatctggttcagcctggcggctctctgagactgtcttgtgccgccagcggcttcaccttcggcagcttttctatgagctgggtccgacaagctcctggcggaggacttgaatgggtggcaggactgtctgccagaagcagcctgacacactacgccgactctgtgaagggcagattcaccatcagccgggacaacgccaagaacagcgtgtacctccagatgaacagcctgagagtggaagataccgccgtgtactactgcgccagaagaagctacgacagcagcggctactggggccacttctacagctacatggatgtgtggggccagggcaccctggttacagtttctctcgagatccagaaccctgatcctgccgtgtaccagctgcgggatagcaagagcagcgacaagagcgtgtgtctgttcaccgacttcgacagccagaccaacgtgtcccagagcaaggactccgacgtgtacatcaccgataagtgcgtgctggacatgcggagcatggacttcaagagcaactccgccgtggcctggtccaacaagtccgatttcgcctgcgccaacgccttcaacaacagcattatccccgaggacacattcttcccaagccccgagagcagctgcgacgtgaagctggtggaaaagagcttcgagacagacaccaacctgaacttccagaacctgagcgtgatcggcttcagaatcctgctgctgaaagtggccggctttaacctgctgatgaccctgcggctgtggtccagccgcgccaagagaagcggatctggcgtgaagcagaccctgaatttcgacctgctgaagctggctggcgacgtggaatccaacccaggccctactagtatggactggatttggcgcatccttttccttgtcggcgctgctaccggcgcgcattccgggccccagctccagctgcaagagtctggacctggcctggtcaagcctagcgagacactgagcctgacctgtaccgtgtccggcgatagcatcagcagcggcgattactactggggctggatcagacagcctcctggcaaaggactggaatggatcggccacatctactacagcggcgtgacctactacaaccccagcctgaagtccagagtgaccatcagcgtggacaccagccggaaccagttctccctgaagctgtctagcgtgacagccgccgataccgccgtgtactactgcaccagagaggacagcagcaactggcggagtagaggccagggaacactggtcacagttagctctggatccggcggaggcggaagtggaggcggaggatctggcggcggaggctctttcgaatctgtgctgacccagcctagctccgtgtctgctgctcctggacagaaagtgaccatctcctgtagcggcagcaccagcaacatcggcaacaactacgtgtcctggtatcagcagcaccccggcaaggcccctaagctgatgatctacgacgtgtccaagaggcccagcggcgtgccagatagattttccggcagcaagagcggcaacagcgccagcctggatattagcggactccagtctgaggacgaggccgactactattgcgccgcctgggatgatagcctgagcgagtttctgtttggcaccggcaccaagctgacagtgcttggaacgcgtgaggacctgaagaacgtgttcccacctgaggtggccgtgttcgagcctagcgaggccgagatcagccacacccagaaagccaccctcgtgtgcctggctaccggcttctaccccgaccatgtggaactgtcttggtgggtcaacggcaaagaggtgcacagcggcgtgtgtaccgacccccagccactgaaagaacagcccgccctgaacgacagccggtactgcctgagcagcagactgagagtgtccgccaccttctggcagaacccccggaaccacttcagatgccaggtgcagttctacggcctgagcgagaacgacgagtggacccaggacagagccaagcccgtgacccagatcgtgtctgccgaagcctggggcagagccgattgcggctttaccagcgagagctaccagcagggcgtgctgagcgccaccatcctgtacgagatcctgctgggcaaggccaccctgtacgccgtgctggtgtctgccctggtgctgatggctatggtcaagcggaaggacagccgggga

SEQ ID NO: 2640 - DNA, 2700 bp, Artificial Sequence
  Synthetic Polynucloetide
atggccttaccagtgaccgccttgctcctgccgctggccttgctgctccacgccgccaggccggaagtgcagctggttgaatctggcggaggactggttcagcctggcggatctctgagactgtcttgtgccgccagcggcttcagcttcagcgacttttggatgagctgggtccgacaggcccctggcaaaggacttgaatgggtcgccacaatcagccaggccggcagcgagaaggactacgtggactctgtgaagggcagattcaccatcagccgggacaacgccaagaagtccctgtacctccagatgaacagcctgagagccgaggacaccgccgtgtactattgtgcctctggcgtgtacagcttcgactacagaggccagggcaccctggtcacagtctcttctggtaccggcggaggcggatctggcggcggaggtagcggtggcggaggatctgaattcgacgtggtcatgacacagagcccttctagcctgtctgccagcgtgggcgacagagtgacaatcacctgtcagagcagcctggacatcagccactacctgaactggtatcagcagaagcccggcaaggcccctaagctgctgatctacgacgccagcaatctggaaaccggcgtgcccagcagattttctggcagcggaagcggcacccacttcaccttcacaatatccagcctccagcctgaggacttcgccacctactactgccagcagtacgacaacctgcctctgacctttggcggaggcaccaagctggaaatcaagagactcgagatccagaaccctgatcctgccgtgtaccagctgcgggatagcaagagcagcgacaagagcgtgtgtctgttcaccgacttcgacagccagaccaacgtgtcccagagcaaggactccgacgtgtacatcaccgataagtgcgtgctggacatgcggagcatggacttcaagagcaactccgccgtggcctggtccaacaagtccgatttcgcctgcgccaacgccttcaacaacagcattatccccgaggacacattcttcccaagccccgagagcagctgcgacgtgaagctggtggaaaagagcttcgagacagacaccaacctgaacttccagaacctgagcgtgatcggcttcagaatcctgctgctgaaagtggccggctttaacctgctgatgaccctgcggctgtggtccagccgcgccaagagaagcggatctggcgtgaagcagaccctgaatttcgacctgctgaagctggctggcgacgtggaatccaacccaggccctactagtatggactggatttggcgcatccttttccttgtcggcgctgctaccggcgcgcattccgggccccagctccagctgcaagagtctggacctggcctggtcaagcctagcgagacactgagcctgacctgtaccgtgtccggcgatagcatcagcagcggcgattactactggggctggatcagacagcctcctggcaaaggactggaatggatcggccacatctactacagcggcgtgacctactacaaccccagcctgaagtccagagtgaccatcagcgtggacaccagccggaaccagttctccctgaagctgtctagcgtgacagccgccgataccgccgtgtactactgcaccagagaggacagcagcaactggcggagtagaggccagggaacactggtcacagttagctctggatccggcggaggcggaagtggaggcggaggatctggcggcggaggctctttcgaacaagttcaactggttcaatcaggcggaggcgtggtgcaacctggtggctctctgagagtgtcttgtgctgcctctggcgtgaccctgagcgactatggaatgcactgggtccgacaggcccctggcaaaggacttgagtgggtcgccttcatcagaaacgacggcagcgacaagtattacgccgacagcgtgaagggcagattcaccatcagccgggacaacagcgagaaaaccgtgtctctccagatgtctagcctgagagccgaggacaccgccgtgtactactgtgccaagaatggcgagagcggccctctggactactggtatctggatctgtggggcagaggcaccctggtcacagtctcttctacgcgtgaggacctgaagaacgtgttcccacctgaggtggccgtgttcgagcctagcgaggccgagatcagccacacccagaaagccaccctcgtgtgcctggctaccggcttctaccccgaccatgtggaactgtcttggtgggtcaacggcaaagaggtgcacagcggcgtgtgtaccgacccccagccactgaaagaacagcccgccctgaacgacagccggtactgcctgagcagcagactgagagtgtccgccaccttctggcagaacccccggaaccacttcagatgccaggtgcagttctacggcctgagcgagaacgacgagtggacccaggacagagccaagcccgtgacccagatcgtgtctgccgaagcctggggcagagccgattgcggctttaccagcgagagctaccagcagggcgtgctgagcgccaccatcctgtacgagatcctgctgggcaaggccaccctgtacgccgtgctggtgtctgccctggtgctgatggctatggtcaagcggaaggacagccgggga

SEQ ID NO: 2641 - DNA, 2712 bp, Artificial Sequence
  Synthetic Polynucloetide
atggccttaccagtgaccgccttgctcctgccgctggccttgctgctccacgccgccaggccggaagtgcagctggttgaatctggcggaggactggttcagcctggcggatctctgagactgtcttgtgccgccagcggcttcagcttcagcgacttttggatgagctgggtccgacaggcccctggcaaaggacttgaatgggtcgccacaatcagccaggccggcagcgagaaggactacgtggactctgtgaagggcagattcaccatcagccgggacaacgccaagaagtccctgtacctccagatgaacagcctgagagccgaggacaccgccgtgtactattgtgcctctggcgtgtacagcttcgactacagaggccagggcaccctggtcacagtctcttctggtaccggcggaggcggatctggcggcggaggtagcggtggcggaggatctgaattcagctacgagctgacacagcctccatccgtgtctggcacacctggacagagagtggctatctcctgtagcggcagcagcagcaacatcggcaccagaatggtcacctggtatcagcacgtgccaggcacagcccctaagctgctgatcttcaacaacaaccagcggcctagcggcgtgcccgatagattttctgccagcaagagcggcacaagcgccagcctggctatcatcggactccagtctgacgacgaggccgactactactgtgccacctgggacgacaacgtgaagtcctacgtgttcggcaccggcaccaaagtgacagtgcttggaagtagactcgagatccagaaccctgatcctgccgtgtaccagctgcgggatagcaagagcagcgacaagagcgtgtgtctgttcaccgacttcgacagccagaccaacgtgtcccagagcaaggactccgacgtgtacatcaccgataagtgcgtgctggacatgcggagcatggacttcaagagcaactccgccgtggcctggtccaacaagtccgatttcgcctgcgccaacgccttcaacaacagcattatccccgaggacacattcttcccaagccccgagagcagctgcgacgtgaagctggtggaaaagagcttcgagacagacaccaacctgaacttccagaacctgagcgtgatcggcttcagaatcctgctgctgaaagtggccggctttaacctgctgatgaccctgcggctgtggtccagccgcgccaagagaagcggatctggcgtgaagcagaccctgaatttcgacctgctgaagctggctggcgacgtggaatccaacccaggccctactagtatggactggatttggcgcatccttttccttgtcggcgctgctaccggcgcgcattccgggccccagctccagctgcaagagtctggacctggcctggtcaagcctagcgagacactgagcctgacctgtaccgtgtccggcgatagcatcagcagcggcgattactactggggctggatcagacagcctcctggcaaaggactggaatggatcggccacatctactacagcggcgtgacctactacaaccccagcctgaagtccagagtgaccatcagcgtggacaccagccggaaccagttctccctgaagctgtctagcgtgacagccgccgataccgccgtgtactactgcaccagagaggacagcagcaactggcggagtagaggccagggaacactggtcacagttagctctggatccggcggaggcggaagtggaggcggaggatctggcggcggaggctctttcgaacttgaaatggcccaggttcagctccagcagtggggagctggactgctgaagcctagcgagacactgagcctgacctgtgctgtgtacggcggcagcttcagcggctactactggtcctggatcagacagcctcctggcaaaggactggaatggatcggcgagatcaaccacagcggctccaccaactacaaccccagcctgaagtccagagtgaccatcagcgtggacaccagcaagaaccagttctccctgaagctgagcagcgtgacagccgctgataccgccgtgtactattgcgctagagcccctcagtcttggtacgtgggagatgtgtggggccagggcacactggttacagtgtcatctacgcgtgaggacctgaagaacgtgttcccacctgaggtggccgtgttcgagcctagcgaggccgagatcagccacacccagaaagccaccctcgtgtgcctggctaccggcttctaccccgaccatgtggaactgtcttggtgggtcaacggcaaagaggtgcacagcggcgtgtgtaccgacccccagccactgaaagaacagcccgccctgaacgacagccggtactgcctgagcagcagactgagagtgtccgccaccttctggcagaacccccggaaccacttcagatgccaggtgcagttctacggcctgagcgagaacgacgagtggacccaggacagagccaagcccgtgacccagatcgtgtctgccgaagcctggggcagagccgattgcggctttaccagcgagagctaccagcagggcgtgctgagcgccaccatcctgtacgagatcctgctgggcaaggccaccctgtacgccgtgctggtgtctgccctggtgctgatggctatggtcaagcggaaggacagccgggga

SEQ ID NO: 2642 - DNA, 2703 bp, Artificial Sequence
  Synthetic Polynucloetide
atggccttaccagtgaccgccttgctcctgccgctggccttgctgctccacgccgccaggccggaagtgcagctggttgaatctggcggaggactggttcagcctggcggatctctgagactgtcttgtgccgccagcggcttcagcttcagcgacttttggatgagctgggtccgacaggcccctggcaaaggacttgaatgggtcgccacaatcagccaggccggcagcgagaaggactacgtggactctgtgaagggcagattcaccatcagccgggacaacgccaagaagtccctgtacctccagatgaacagcctgagagccgaggacaccgccgtgtactattgtgcctctggcgtgtacagcttcgactacagaggccagggcaccctggtcacagtctcttctggtaccggcggaggcggatctggcggcggaggtagcggtggcggaggatctgaattccagtctgtgctgacacagcctcctagcctgtctgtggcccctggaaagacagccagcatcacatgcggcggcaacaacatcggcatgaagtccgtgcactggtatcagcagaggccaggacaggctcctgtgctggtcatctactacgacagcgacagaccctctggcatccccggcagattttccggcagcaactctggcaataccgccacactgaccatctccagagtggaagctggcgacgaggccgactactactgccaagtgtgggataccaccggcgatcaccctggctatgtgtttggcaccggcaccaaagtgacagtgcttctcgagatccagaaccctgatcctgccgtgtaccagctgcgggatagcaagagcagcgacaagagcgtgtgtctgttcaccgacttcgacagccagaccaacgtgtcccagagcaaggactccgacgtgtacatcaccgataagtgcgtgctggacatgcggagcatggacttcaagagcaactccgccgtggcctggtccaacaagtccgatttcgcctgcgccaacgccttcaacaacagcattatccccgaggacacattcttcccaagccccgagagcagctgcgacgtgaagctggtggaaaagagcttcgagacagacaccaacctgaacttccagaacctgagcgtgatcggcttcagaatcctgctgctgaaagtggccggctttaacctgctgatgaccctgcggctgtggtccagccgcgccaagagaagcggatctggcgtgaagcagaccctgaatttcgacctgctgaagctggctggcgacgtggaatccaacccaggccctactagtatggactggatttggcgcatccttttccttgtcggcgctgctaccggcgcgcattccgggccccagctccagctgcaagagtctggacctggcctggtcaagcctagcgagacactgagcctgacctgtaccgtgtccggcgatagcatcagcagcggcgattactactggggctggatcagacagcctcctggcaaaggactggaatggatcggccacatctactacagcggcgtgacctactacaaccccagcctgaagtccagagtgaccatcagcgtggacaccagccggaaccagttctccctgaagctgtctagcgtgacagccgccgataccgccgtgtactactgcaccagagaggacagcagcaactggcggagtagaggccagggaacactggtcacagttagctctggatccggcggaggcggaagtggaggcggaggatctggcggcggaggctctttcgaacaagttcaactggttcagagcggagccgaagtgaagaaacctggcagcagcgtgaaggtgtcctgcaaagcaagcggcggcacctttagcagctacgccatctcttgggtccgacaggcacctggacaaggactggaatggatgggcggcatcatccccatcttcggcacagccaattacgcccagaaattccagggcagagtgaccatcaccgccgacgagtctacaagcaccgcctacatggaactgagcagcctgagaagcgaggacaccgccgtgtactattgtgccagaggcgtgtacggctacagcggctctgccccttatgatgagtggggccagggaaccctggtcaccgtttcttctacgcgtgaggacctgaagaacgtgttcccacctgaggtggccgtgttcgagcctagcgaggccgagatcagccacacccagaaagccaccctcgtgtgcctggctaccggcttctaccccgaccatgtggaactgtcttggtgggtcaacggcaaagaggtgcacagcggcgtgtgtaccgacccccagccactgaaagaacagcccgccctgaacgacagccggtactgcctgagcagcagactgagagtgtccgccaccttctggcagaacccccggaaccacttcagatgccaggtgcagttctacggcctgagcgagaacgacgagtggacccaggacagagccaagcccgtgacccagatcgtgtctgccgaagcctggggcagagccgattgcggctttaccagcgagagctaccagcagggcgtgctgagcgccaccatcctgtacgagatcctgctgggcaaggccaccctgtacgccgtgctggtgtctgccctggtgctgatggctatggtcaagcggaaggacagccgggga

SEQ ID NO: 2643 - DNA, 2697 bp, Artificial Sequence
  Synthetic Polynucloetide
atggccttaccagtgaccgccttgctcctgccgctggccttgctgctccacgccgccaggccggaagtgcagctggttgaatctggcggaggactggttcagcctggcggatctctgagactgtcttgtgccgccagcggcttcagcttcagcgacttttggatgagctgggtccgacaggcccctggcaaaggacttgaatgggtcgccacaatcagccaggccggcagcgagaaggactacgtggactctgtgaagggcagattcaccatcagccgggacaacgccaagaagtccctgtacctccagatgaacagcctgagagccgaggacaccgccgtgtactattgtgcctctggcgtgtacagcttcgactacagaggccagggcaccctggtcacagtctcttctggtaccggcggaggcggatctggcggcggaggtagcggtggcggaggatctgaattcgaggtgcaactggttgagtctggcggaggactggtgcagcctggaagaagcctgagactgtcttgtgccgccagcggcttcaccttcgacgattatgccatgcactgggtccgacaggcccctggcaaaggacttgaatgggtgtccggcatctcctggaacagcggctctatcggctacgccgattccgtgaagggcagattcaccatcagccgggacaacgccaagaacagcctgtacctccagatgaactccctgagagccgaggacacagccctgtactactgcgccaaagacaaaggcggaggctactacgacttttggagcggcagcgattattggggccagggcacactggtcacagtgtctagcctcgagatccagaaccctgatcctgccgtgtaccagctgcgggatagcaagagcagcgacaagagcgtgtgtctgttcaccgacttcgacagccagaccaacgtgtcccagagcaaggactccgacgtgtacatcaccgataagtgcgtgctggacatgcggagcatggacttcaagagcaactccgccgtggcctggtccaacaagtccgatttcgcctgcgccaacgccttcaacaacagcattatccccgaggacacattcttcccaagccccgagagcagctgcgacgtgaagctggtggaaaagagcttcgagacagacaccaacctgaacttccagaacctgagcgtgatcggcttcagaatcctgctgctgaaagtggccggctttaacctgctgatgaccctgcggctgtggtccagccgcgccaagagaagcggatctggcgtgaagcagaccctgaatttcgacctgctgaagctggctggcgacgtggaatccaacccaggccctactagtatggactggatttggcgcatccttttccttgtcggcgctgctaccggcgcgcattccgggccccagctccagctgcaagagtctggacctggcctggtcaagcctagcgagacactgagcctgacctgtaccgtgtccggcgatagcatcagcagcggcgattactactggggctggatcagacagcctcctggcaaaggactggaatggatcggccacatctactacagcggcgtgacctactacaaccccagcctgaagtccagagtgaccatcagcgtggacaccagccggaaccagttctccctgaagctgtctagcgtgacagccgccgataccgccgtgtactactgcaccagagaggacagcagcaactggcggagtagaggccagggaacactggtcacagttagctctggatccggcggaggcggaagtggaggcggaggatctggcggcggaggctctttcgaatcttctgagctgacacaggaccctgccgtgtctgttgctctgggccagacagtgcggattacctgtcagggcgatagcctgagaagctactacgcctcctggtatcagcagaagccaggccaggctcctgtgctggtcatctacggcaagaacaacagacccagcggcatccccgatagattcagcggaagcagctctggcaataccgccagcctgacaattactggcgctcaggccgaggacgaggccgactactactgcaacagcagagatagcagcggctgggttttcggcggaggcacaaaactgacagtgctgacgcgtgaggacctgaagaacgtgttcccacctgaggtggccgtgttcgagcctagcgaggccgagatcagccacacccagaaagccaccctcgtgtgcctggctaccggcttctaccccgaccatgtggaactgtcttggtgggtcaacggcaaagaggtgcacagcggcgtgtgtaccgacccccagccactgaaagaacagcccgccctgaacgacagccggtactgcctgagcagcagactgagagtgtccgccaccttctggcagaacccccggaaccacttcagatgccaggtgcagttctacggcctgagcgagaacgacgagtggacccaggacagagccaagcccgtgacccagatcgtgtctgccgaagcctggggcagagccgattgcggctttaccagcgagagctaccagcagggcgtgctgagcgccaccatcctgtacgagatcctgctgggcaaggccaccctgtacgccgtgctggtgtctgccctggtgctgatggctatggtcaagcggaaggacagccgggga

SEQ ID NO: 2644 - DNA, 2724 bp, Artificial Sequence
  Synthetic Polynucloetide
atggccttaccagtgaccgccttgctcctgccgctggccttgctgctccacgccgccaggccggaagtgcagctggttgaatctggcggaggactggttcagcctggcggatctctgagactgtcttgtgccgccagcggcttcagcttcagcgacttttggatgagctgggtccgacaggcccctggcaaaggacttgaatgggtcgccacaatcagccaggccggcagcgagaaggactacgtggactctgtgaagggcagattcaccatcagccgggacaacgccaagaagtccctgtacctccagatgaacagcctgagagccgaggacaccgccgtgtactattgtgcctctggcgtgtacagcttcgactacagaggccagggcaccctggtcacagtctcttctggtaccggcggaggcggatctggcggcggaggtagcggtggcggaggatctgaattcgaagtgcagctccagcagtctggacctggcctggttaagcctagccagacactgagcctgacctgtgccatcagcggcgatagcgtgctgagcaacagcgacacctggaactggatcagacagagccctagcagaggactggaatggctgggcagaacctaccacagaagcacttggtacgacgactacgccagctctgtgcggggcagagtgtccatcaatgtggacaccagcaagaaccagtacagcctgcaactgaacgccgtgacacctgaggataccggcgtgtactactgcgccagagacagactccaggacggcaactcttggagcgacgcctttgatgtgtggggccagggcacaatggtcaccgtttctagcctcgagatccagaaccctgatcctgccgtgtaccagctgcgggatagcaagagcagcgacaagagcgtgtgtctgttcaccgacttcgacagccagaccaacgtgtcccagagcaaggactccgacgtgtacatcaccgataagtgcgtgctggacatgcggagcatggacttcaagagcaactccgccgtggcctggtccaacaagtccgatttcgcctgcgccaacgccttcaacaacagcattatccccgaggacacattcttcccaagccccgagagcagctgcgacgtgaagctggtggaaaagagcttcgagacagacaccaacctgaacttccagaacctgagcgtgatcggcttcagaatcctgctgctgaaagtggccggctttaacctgctgatgaccctgcggctgtggtccagccgcgccaagagaagcggatctggcgtgaagcagaccctgaatttcgacctgctgaagctggctggcgacgtggaatccaacccaggccctactagtatggactggatttggcgcatccttttccttgtcggcgctgctaccggcgcgcattccgggccccagctccagctgcaagagtctggacctggcctggtcaagcctagcgagacactgagcctgacctgtaccgtgtccggcgatagcatcagcagcggcgattactactggggctggatcagacagcctcctggcaaaggactggaatggatcggccacatctactacagcggcgtgacctactacaaccccagcctgaagtccagagtgaccatcagcgtggacaccagccggaaccagttctccctgaagctgtctagcgtgacagccgccgataccgccgtgtactactgcaccagagaggacagcagcaactggcggagtagaggccagggaacactggtcacagttagctctggatccggcggaggcggaagtggaggcggaggatctggcggcggaggctctttcgaacaatctgctctgacacagcctgccagcgtgtcaggatctcctggacagagcatcaccatctcttgcaccggcaccagctctgatgtcggcggctacaattacgtgtcctggtatcagcagcaccccggcaaggcccctaagctgatgatctacgacgtgtccaacagacccagcggcgtgtccaatagattctccggcagcaagagcggcaacaccgccagcctgacaatttctggactgcaagccgaggacgaggccgactactactgtagcagctacaccagcagcagcacactggtgtacgtgttcggcacaggcaccaaagtgaccgtgcttacgcgtgaggacctgaagaacgtgttcccacctgaggtggccgtgttcgagcctagcgaggccgagatcagccacacccagaaagccaccctcgtgtgcctggctaccggcttctaccccgaccatgtggaactgtcttggtgggtcaacggcaaagaggtgcacagcggcgtgtgtaccgacccccagccactgaaagaacagcccgccctgaacgacagccggtactgcctgagcagcagactgagagtgtccgccaccttctggcagaacccccggaaccacttcagatgccaggtgcagttctacggcctgagcgagaacgacgagtggacccaggacagagccaagcccgtgacccagatcgtgtctgccgaagcctggggcagagccgattgcggctttaccagcgagagctaccagcagggcgtgctgagcgccaccatcctgtacgagatcctgctgggcaaggccaccctgtacgccgtgctggtgtctgccctggtgctgatggctatggtcaagcggaaggacagccgggga

SEQ ID NO: 2645 - DNA, 2658 bp, Artificial Sequence
  Synthetic Polynucloetide
atggccttaccagtgaccgccttgctcctgccgctggccttgctgctccacgccgccaggccggaagtgcagctggttgaatctggcggaggactggttcagcctggcggatctctgagactgtcttgtgccgccagcggcttcagcttcagcgacttttggatgagctgggtccgacaggcccctggcaaaggacttgaatgggtcgccacaatcagccaggccggcagcgagaaggactacgtggactctgtgaagggcagattcaccatcagccgggacaacgccaagaagtccctgtacctccagatgaacagcctgagagccgaggacaccgccgtgtactattgtgcctctggcgtgtacagcttcgactacagaggccagggcaccctggtcacagtctcttctggtaccggcggaggcggatctggcggcggaggtagcggtggcggaggatctgaattccaggtgcaactggttcagtctggggccgaagtgaagaaacctggggcctctgtgaaggtgtcctgcaaggcttccggctacacctttaccagctacgacatcaactgggtccgacaggccacaggccaaggactggaatggatgggctggatgaaccccaacagcggcaataccggctacgcccagaaattccagggcagagtgaccatgaccagaaacaccagcatcagcaccgcctacatggaactgagcagcctgagaagcgaggacaccgccgtgtactattgcgccagaggcgacagcaccaaggtggaaatcaaactcgagatccagaaccctgatcctgccgtgtaccagctgcgggatagcaagagcagcgacaagagcgtgtgtctgttcaccgacttcgacagccagaccaacgtgtcccagagcaaggactccgacgtgtacatcaccgataagtgcgtgctggacatgcggagcatggacttcaagagcaactccgccgtggcctggtccaacaagtccgatttcgcctgcgccaacgccttcaacaacagcattatccccgaggacacattcttcccaagccccgagagcagctgcgacgtgaagctggtggaaaagagcttcgagacagacaccaacctgaacttccagaacctgagcgtgatcggcttcagaatcctgctgctgaaagtggccggctttaacctgctgatgaccctgcggctgtggtccagccgcgccaagagaagcggatctggcgtgaagcagaccctgaatttcgacctgctgaagctggctggcgacgtggaatccaacccaggccctactagtatggactggatttggcgcatccttttccttgtcggcgctgctaccggcgcgcattccgggccccagctccagctgcaagagtctggacctggcctggtcaagcctagcgagacactgagcctgacctgtaccgtgtccggcgatagcatcagcagcggcgattactactggggctggatcagacagcctcctggcaaaggactggaatggatcggccacatctactacagcggcgtgacctactacaaccccagcctgaagtccagagtgaccatcagcgtggacaccagccggaaccagttctccctgaagctgtctagcgtgacagccgccgataccgccgtgtactactgcaccagagaggacagcagcaactggcggagtagaggccagggaacactggtcacagttagctctggatccggcggaggcggaagtggaggcggaggatctggcggcggaggctctttcgaacaatctgtgctgacccagcctagatccgtgtctggctctcctggacagagcgtgaccatctcttgtaccggcaccagctctgatgtcggcggctacaattacgtgtcctggtatcagcagcaccccggcgaagcccctaagctgattatctacgacgccgacaagcggcccagcggcatcagcaatagattcagctctggcaagagcggcaacaccgccagcctgacaatcagcggactccaggtggaagatgaggccgactactactgctgctcctatgccggcggaagcacctgggttttcggaggcggtacaaaagtgaccgtgctgacgcgtgaggacctgaagaacgtgttcccacctgaggtggccgtgttcgagcctagcgaggccgagatcagccacacccagaaagccaccctcgtgtgcctggctaccggcttctaccccgaccatgtggaactgtcttggtgggtcaacggcaaagaggtgcacagcggcgtgtgtaccgacccccagccactgaaagaacagcccgccctgaacgacagccggtactgcctgagcagcagactgagagtgtccgccaccttctggcagaacccccggaaccacttcagatgccaggtgcagttctacggcctgagcgagaacgacgagtggacccaggacagagccaagcccgtgacccagatcgtgtctgccgaagcctggggcagagccgattgcggctttaccagcgagagctaccagcagggcgtgctgagcgccaccatcctgtacgagatcctgctgggcaaggccaccctgtacgccgtgctggtgtctgccctggtgctgatggctatggtcaagcggaaggacagccgggga

SEQ ID NO: 2646 - DNA, 2724 bp, Artificial Sequence
  Synthetic Polynucloetide
atggccttaccagtgaccgccttgctcctgccgctggccttgctgctccacgccgccaggccggaagtgcagctggttgaatctggcggaggactggttcagcctggcggatctctgagactgtcttgtgccgccagcggcttcagcttcagcgacttttggatgagctgggtccgacaggcccctggcaaaggacttgaatgggtcgccacaatcagccaggccggcagcgagaaggactacgtggactctgtgaagggcagattcaccatcagccgggacaacgccaagaagtccctgtacctccagatgaacagcctgagagccgaggacaccgccgtgtactattgtgcctctggcgtgtacagcttcgactacagaggccagggcaccctggtcacagtctcttctggtaccggcggaggcggatctggcggcggaggtagcggtggcggaggatctgaattcgaagtgcagctccagcagtctggacctggcctggttaagcctagccagacactgagcctgacctgtgccatcagcggcgatagcgtgtcctctaatagcgccgcctggaactggatcagacagagccctagcagaggactggaatggctgggcagaacctactaccgcagcaagtggtacagcgactacgccgtgtccgtgaagtcccggatcaccatcaatcccgacaccagcaagaaccagttcagcctgcaactgaacagcgtgacccctgaggataccgccgtgtactactgcgccagagatccctacgacttttggagcggctaccccgacgcctttgacatctggggacagggcacaatggtcaccgtttctagcctcgagatccagaaccctgatcctgccgtgtaccagctgcgggatagcaagagcagcgacaagagcgtgtgtctgttcaccgacttcgacagccagaccaacgtgtcccagagcaaggactccgacgtgtacatcaccgataagtgcgtgctggacatgcggagcatggacttcaagagcaactccgccgtggcctggtccaacaagtccgatttcgcctgcgccaacgccttcaacaacagcattatccccgaggacacattcttcccaagccccgagagcagctgcgacgtgaagctggtggaaaagagcttcgagacagacaccaacctgaacttccagaacctgagcgtgatcggcttcagaatcctgctgctgaaagtggccggctttaacctgctgatgaccctgcggctgtggtccagccgcgccaagagaagcggatctggcgtgaagcagaccctgaatttcgacctgctgaagctggctggcgacgtggaatccaacccaggccctactagtatggactggatttggcgcatccttttccttgtcggcgctgctaccggcgcgcattccgggccccagctccagctgcaagagtctggacctggcctggtcaagcctagcgagacactgagcctgacctgtaccgtgtccggcgatagcatcagcagcggcgattactactggggctggatcagacagcctcctggcaaaggactggaatggatcggccacatctactacagcggcgtgacctactacaaccccagcctgaagtccagagtgaccatcagcgtggacaccagccggaaccagttctccctgaagctgtctagcgtgacagccgccgataccgccgtgtactactgcaccagagaggacagcagcaactggcggagtagaggccagggaacactggtcacagttagctctggatccggcggaggcggaagtggaggcggaggatctggcggcggaggctctttcgaacaatctgctctgacacagcctgccagcgtgtcaggatctcctggacagagcatcaccatctcttgcaccggcaccagctctgatgtcggcggctacaattacgtgtcctggtatcagcagcaccccggcaaggcccctaaagtgattatcagcgaagtgaacaacagacccagcggcgtgtcccacagattcagcggctctaagtctggcaacaccgccagcctgacaatctctggactgcaagccgaggacgaggccgactacttctgtagcagctacaccagcggcagaaccctgtacgtgttcggcacaggcagcaaagtgacagtgctgggaacgcgtgaggacctgaagaacgtgttcccacctgaggtggccgtgttcgagcctagcgaggccgagatcagccacacccagaaagccaccctcgtgtgcctggctaccggcttctaccccgaccatgtggaactgtcttggtgggtcaacggcaaagaggtgcacagcggcgtgtgtaccgacccccagccactgaaagaacagcccgccctgaacgacagccggtactgcctgagcagcagactgagagtgtccgccaccttctggcagaacccccggaaccacttcagatgccaggtgcagttctacggcctgagcgagaacgacgagtggacccaggacagagccaagcccgtgacccagatcgtgtctgccgaagcctggggcagagccgattgcggctttaccagcgagagctaccagcagggcgtgctgagcgccaccatcctgtacgagatcctgctgggcaaggccaccctgtacgccgtgctggtgtctgccctggtgctgatggctatggtcaagcggaaggacagccgggga

SEQ ID NO: 2647 - DNA, 2721 bp, Artificial Sequence
  Synthetic Polynucloetide
atggccttaccagtgaccgccttgctcctgccgctggccttgctgctccacgccgccaggccggaagtgcagctggttgaatctggcggaggactggttcagcctggcggatctctgagactgtcttgtgccgccagcggcttcagcttcagcgacttttggatgagctgggtccgacaggcccctggcaaaggacttgaatgggtcgccacaatcagccaggccggcagcgagaaggactacgtggactctgtgaagggcagattcaccatcagccgggacaacgccaagaagtccctgtacctccagatgaacagcctgagagccgaggacaccgccgtgtactattgtgcctctggcgtgtacagcttcgactacagaggccagggcaccctggtcacagtctcttctggtaccggcggaggcggatctggcggcggaggtagcggtggcggaggatctgaattccaatctgctctgacacagcctgccagcgcctctggatctcctggacagagcgtgaccatctcctgtaccggcacctcttctgatgtcggcggctacaactacgtgtcctggtatcagcagcaccccggcaaggcccctaagctgatgatctacgacgtgtccaacagacccagcggcgtgtccaatagattctccggcagcaagagcggcaacaccgccagcctgacaatttctggactgcaagccgaggacgaggccgactactactgtagcagctacaccagcagcagcacactgtacgtgttcggcacaggcacccagctcacagttcttctcgagatccagaaccctgatcctgccgtgtaccagctgcgggatagcaagagcagcgacaagagcgtgtgtctgttcaccgacttcgacagccagaccaacgtgtcccagagcaaggactccgacgtgtacatcaccgataagtgcgtgctggacatgcggagcatggacttcaagagcaactccgccgtggcctggtccaacaagtccgatttcgcctgcgccaacgccttcaacaacagcattatccccgaggacacattcttcccaagccccgagagcagctgcgacgtgaagctggtggaaaagagcttcgagacagacaccaacctgaacttccagaacctgagcgtgatcggcttcagaatcctgctgctgaaagtggccggctttaacctgctgatgaccctgcggctgtggtccagccgcgccaagagaagcggatctggcgtgaagcagaccctgaatttcgacctgctgaagctggctggcgacgtggaatccaacccaggccctactagtatggactggatttggcgcatccttttccttgtcggcgctgctaccggcgcgcattccgggccccagctccagctgcaagagtctggacctggcctggtcaagcctagcgagacactgagcctgacctgtaccgtgtccggcgatagcatcagcagcggcgattactactggggctggatcagacagcctcctggcaaaggactggaatggatcggccacatctactacagcggcgtgacctactacaaccccagcctgaagtccagagtgaccatcagcgtggacaccagccggaaccagttctccctgaagctgtctagcgtgacagccgccgataccgccgtgtactactgcaccagagaggacagcagcaactggcggagtagaggccagggaacactggtcacagttagctctggatccggcggaggcggaagtggaggcggaggatctggcggcggaggctctttcgaagaagtgcagctccagcagtctggacctggcctggttaagcctagccagacactgagcctgacctgtgccatcagcggcgattccatgctgagcaacagcgacacctggaactggatcagacagagccccagcagaggcctggaatggctgggcagaacataccacagaagcacttggtacgacgactacgccagctctgtgcggggcagagtgtccatcaatgtggacaccagcaagaaccagtacagcctgcaactgaacgccgtgacacctgaggataccggcgtgtactactgtgccagagtgcggctccaggacggcaattcttggagcgacgcctttgatgtgtggggccagggcacaatggtcaccgtttctagcacgcgtgaggacctgaagaacgtgttcccacctgaggtggccgtgttcgagcctagcgaggccgagatcagccacacccagaaagccaccctcgtgtgcctggctaccggcttctaccccgaccatgtggaactgtcttggtgggtcaacggcaaagaggtgcacagcggcgtgtgtaccgacccccagccactgaaagaacagcccgccctgaacgacagccggtactgcctgagcagcagactgagagtgtccgccaccttctggcagaacccccggaaccacttcagatgccaggtgcagttctacggcctgagcgagaacgacgagtggacccaggacagagccaagcccgtgacccagatcgtgtctgccgaagcctggggcagagccgattgcggctttaccagcgagagctaccagcagggcgtgctgagcgccaccatcctgtacgagatcctgctgggcaaggccaccctgtacgccgtgctggtgtctgccctggtgctgatggctatggtcaagcggaaggacagccgggga

SEQ ID NO: 2648 - DNA, 2721 bp, Artificial Sequence
  Synthetic Polynucloetide
atggccttaccagtgaccgccttgctcctgccgctggccttgctgctccacgccgccaggccggaagtgcagctggttgaatctggcggaggactggttcagcctggcggatctctgagactgtcttgtgccgccagcggcttcagcttcagcgacttttggatgagctgggtccgacaggcccctggcaaaggacttgaatgggtcgccacaatcagccaggccggcagcgagaaggactacgtggactctgtgaagggcagattcaccatcagccgggacaacgccaagaagtccctgtacctccagatgaacagcctgagagccgaggacaccgccgtgtactattgtgcctctggcgtgtacagcttcgactacagaggccagggcaccctggtcacagtctcttctggtaccggcggaggcggatctggcggcggaggtagcggtggcggaggatctgaattcgacgtgatgctgacccagacaccactgagcctgcctgtgtctctgggcgatcaggccagcatctcctgtagaagcagccagagcatcctgcacagcaccggcgatacctacctggaatggtatctccagaagcctggacagagccccaagctgctgattaacaaggtgtccaaccggctgagcggcgtgcccgatagattttctggcagcggctctggcaccgacttcaccctgaagatcagcagagtggaagccgaggacctgggcgtgtactactgcttccaaggcagccatgttccttggacctttggcggaggcaccaagctggaaatcaagagagctgacgccgctcctaccgtgtccatctttcctctcgagatccagaaccctgatcctgccgtgtaccagctgcgggatagcaagagcagcgacaagagcgtgtgtctgttcaccgacttcgacagccagaccaacgtgtcccagagcaaggactccgacgtgtacatcaccgataagtgcgtgctggacatgcggagcatggacttcaagagcaactccgccgtggcctggtccaacaagtccgatttcgcctgcgccaacgccttcaacaacagcattatccccgaggacacattcttcccaagccccgagagcagctgcgacgtgaagctggtggaaaagagcttcgagacagacaccaacctgaacttccagaacctgagcgtgatcggcttcagaatcctgctgctgaaagtggccggctttaacctgctgatgaccctgcggctgtggtccagccgcgccaagagaagcggatctggcgtgaagcagaccctgaatttcgacctgctgaagctggctggcgacgtggaatccaacccaggccctactagtatggactggatttggcgcatccttttccttgtcggcgctgctaccggcgcgcattccgggccccagctccagctgcaagagtctggacctggcctggtcaagcctagcgagacactgagcctgacctgtaccgtgtccggcgatagcatcagcagcggcgattactactggggctggatcagacagcctcctggcaaaggactggaatggatcggccacatctactacagcggcgtgacctactacaaccccagcctgaagtccagagtgaccatcagcgtggacaccagccggaaccagttctccctgaagctgtctagcgtgacagccgccgataccgccgtgtactactgcaccagagaggacagcagcaactggcggagtagaggccagggaacactggtcacagttagctctggatccggcggaggcggaagtggaggcggaggatctggcggcggaggctctttcgaacaagtgaagctccagcagagcggccctagccttgtgaaacctggcgcttccgtgaagatgagctgcaaggccagcggctacaccttcaccgatttctacatgaaatgggtcaagcagagccacggcaagtctctggaatggatcggcgacatcaaccccaacatcggagacaccttctacaaccagaagttcaagggcaaagccacactgaccgtggacaagagcagcagcaccgcctacatgcagctcaacagcctgaccagcgaggacagcgccgtgtacttttgttccgtgggctacttcgacgtgtggggagccggaacaaccgtgacagtctcttctacgcgtgaggacctgaagaacgtgttcccacctgaggtggccgtgttcgagcctagcgaggccgagatcagccacacccagaaagccaccctcgtgtgcctggctaccggcttctaccccgaccatgtggaactgtcttggtgggtcaacggcaaagaggtgcacagcggcgtgtgtaccgacccccagccactgaaagaacagcccgccctgaacgacagccggtactgcctgagcagcagactgagagtgtccgccaccttctggcagaacccccggaaccacttcagatgccaggtgcagttctacggcctgagcgagaacgacgagtggacccaggacagagccaagcccgtgacccagatcgtgtctgccgaagcctggggcagagccgattgcggctttaccagcgagagctaccagcagggcgtgctgagcgccaccatcctgtacgagatcctgctgggcaaggccaccctgtacgccgtgctggtgtctgccctggtgctgatggctatggtcaagcggaaggacagccgggga

SEQ ID NO: 2649 - DNA, 2709 bp, Artificial Sequence
  Synthetic Polynucloetide
atggccttaccagtgaccgccttgctcctgccgctggccttgctgctccacgccgccaggccggaagtgcagctggttgaatctggcggaggactggttcagcctggcggatctctgagactgtcttgtgccgccagcggcttcagcttcagcgacttttggatgagctgggtccgacaggcccctggcaaaggacttgaatgggtcgccacaatcagccaggccggcagcgagaaggactacgtggactctgtgaagggcagattcaccatcagccgggacaacgccaagaagtccctgtacctccagatgaacagcctgagagccgaggacaccgccgtgtactattgtgcctctggcgtgtacagcttcgactacagaggccagggcaccctggtcacagtctcttctggtaccggcggaggcggatctggcggcggaggtagcggtggcggaggatctgaattcgagatcgtgctgacacagtctcccgccacactgtcactgtctccaggcgaaagagccacactgagctgtagagccagccagagcgtgtccatctacctggcctggtatcagcagaagcctggacaggctccccggctgctgatctacgatgccagcaatagagccacaggcatccccgccagattttctggctctggcagcggcaccgatttcaccctgaccataagcagcctggaacctgaggacttcgccgtgtactactgccagcagagaagcaactggcctcctttcacattcggccctggcaccaaggtggacatcaaactcgagatccagaaccctgatcctgccgtgtaccagctgcgggatagcaagagcagcgacaagagcgtgtgtctgttcaccgacttcgacagccagaccaacgtgtcccagagcaaggactccgacgtgtacatcaccgataagtgcgtgctggacatgcggagcatggacttcaagagcaactccgccgtggcctggtccaacaagtccgatttcgcctgcgccaacgccttcaacaacagcattatccccgaggacacattcttcccaagccccgagagcagctgcgacgtgaagctggtggaaaagagcttcgagacagacaccaacctgaacttccagaacctgagcgtgatcggcttcagaatcctgctgctgaaagtggccggctttaacctgctgatgaccctgcggctgtggtccagccgcgccaagagaagcggatctggcgtgaagcagaccctgaatttcgacctgctgaagctggctggcgacgtggaatccaacccaggccctactagtatggactggatttggcgcatccttttccttgtcggcgctgctaccggcgcgcattccgggccccagctccagctgcaagagtctggacctggcctggtcaagcctagcgagacactgagcctgacctgtaccgtgtccggcgatagcatcagcagcggcgattactactggggctggatcagacagcctcctggcaaaggactggaatggatcggccacatctactacagcggcgtgacctactacaaccccagcctgaagtccagagtgaccatcagcgtggacaccagccggaaccagttctccctgaagctgtctagcgtgacagccgccgataccgccgtgtactactgcaccagagaggacagcagcaactggcggagtagaggccagggaacactggtcacagttagctctggatccggcggaggcggaagtggaggcggaggatctggcggcggaggctctttcgaacaggtgcagcttgttgaaagcggaggcggagttgtgcagcctggcagaagtctgagactgtcttgtgccgccagcggcttcaccttcagcagctatggaatgcactgggtccgacaggcccctggcaaaggacttgaatgggttgccgtgatctgggacgacggcagcaacaagtattacgtggacagcgtgaagggcagattcaccatcagccgggacaacagcaagaacaccctgtacctccagatgaacagcctgagagccgaggacacagccgtgtattattgcgccagagatgactactacggcagcggctccttcaacagctactatggcacagacgtgtggggccagggcacaacagttaccgttagctctacgcgtgaggacctgaagaacgtgttcccacctgaggtggccgtgttcgagcctagcgaggccgagatcagccacacccagaaagccaccctcgtgtgcctggctaccggcttctaccccgaccatgtggaactgtcttggtgggtcaacggcaaagaggtgcacagcggcgtgtgtaccgacccccagccactgaaagaacagcccgccctgaacgacagccggtactgcctgagcagcagactgagagtgtccgccaccttctggcagaacccccggaaccacttcagatgccaggtgcagttctacggcctgagcgagaacgacgagtggacccaggacagagccaagcccgtgacccagatcgtgtctgccgaagcctggggcagagccgattgcggctttaccagcgagagctaccagcagggcgtgctgagcgccaccatcctgtacgagatcctgctgggcaaggccaccctgtacgccgtgctggtgtctgccctggtgctgatggctatggtcaagcggaaggacagccgggga

SEQ ID NO: 2650 - DNA, 2664 bp, Artificial Sequence
  Synthetic Polynucloetide
atggccttaccagtgaccgccttgctcctgccgctggccttgctgctccacgccgccaggccggaagtgcagctggttgaatctggcggaggactggttcagcctggcggatctctgagactgtcttgtgccgccagcggcttcagcttcagcgacttttggatgagctgggtccgacaggcccctggcaaaggacttgaatgggtcgccacaatcagccaggccggcagcgagaaggactacgtggactctgtgaagggcagattcaccatcagccgggacaacgccaagaagtccctgtacctccagatgaacagcctgagagccgaggacaccgccgtgtactattgtgcctctggcgtgtacagcttcgactacagaggccagggcaccctggtcacagtctcttctggtaccggcggaggcggatctggcggcggaggtagcggtggcggaggatctgaattcgacatccagatgacacagagccctagcagcctgtctgccagcgtgggagacagagtgaccatcacctgtagagccagccagggcatctcttcttggctggcctggtatcagcagaagcccgagaaggcccctaagagcctgatctatgccgccagctctctccagagcggagtgcctagcagattttctggcagcggctccggcaccgatttcaccctgacaatatccagcctccagcctgaggacttcgccacctactactgccagcagtacaacagctacccctacaccttcggccagggcaccaagctggaaatcaaactcgagatccagaaccctgatcctgccgtgtaccagctgcgggatagcaagagcagcgacaagagcgtgtgtctgttcaccgacttcgacagccagaccaacgtgtcccagagcaaggactccgacgtgtacatcaccgataagtgcgtgctggacatgcggagcatggacttcaagagcaactccgccgtggcctggtccaacaagtccgatttcgcctgcgccaacgccttcaacaacagcattatccccgaggacacattcttcccaagccccgagagcagctgcgacgtgaagctggtggaaaagagcttcgagacagacaccaacctgaacttccagaacctgagcgtgatcggcttcagaatcctgctgctgaaagtggccggctttaacctgctgatgaccctgcggctgtggtccagccgcgccaagagaagcggatctggcgtgaagcagaccctgaatttcgacctgctgaagctggctggcgacgtggaatccaacccaggccctactagtatggactggatttggcgcatccttttccttgtcggcgctgctaccggcgcgcattccgggccccagctccagctgcaagagtctggacctggcctggtcaagcctagcgagacactgagcctgacctgtaccgtgtccggcgatagcatcagcagcggcgattactactggggctggatcagacagcctcctggcaaaggactggaatggatcggccacatctactacagcggcgtgacctactacaaccccagcctgaagtccagagtgaccatcagcgtggacaccagccggaaccagttctccctgaagctgtctagcgtgacagccgccgataccgccgtgtactactgcaccagagaggacagcagcaactggcggagtagaggccagggaacactggtcacagttagctctggatccggcggaggcggaagtggaggcggaggatctggcggcggaggctctttcgaagaagtgcaactggttcaatctggcggcggactggttcatccaggcggttctctgagactgagctgtgccggctctggcttcaccttcagcacctacctgatgtactgggtccgacaggcccctggcaagacactggaatgggtgtccgctattggcagcggaggcgatacctactacgccgactctgtgaagggcagattcaccatcagccgggacaacgccaagaacagcctgtacctccagatgaactccctgagagccgaggacatggccgtgtactactgtgccagaggactcggctattggggccagggaacactggtcacagtgtcctctacgcgtgaggacctgaagaacgtgttcccacctgaggtggccgtgttcgagcctagcgaggccgagatcagccacacccagaaagccaccctcgtgtgcctggctaccggcttctaccccgaccatgtggaactgtcttggtgggtcaacggcaaagaggtgcacagcggcgtgtgtaccgacccccagccactgaaagaacagcccgccctgaacgacagccggtactgcctgagcagcagactgagagtgtccgccaccttctggcagaacccccggaaccacttcagatgccaggtgcagttctacggcctgagcgagaacgacgagtggacccaggacagagccaagcccgtgacccagatcgtgtctgccgaagcctggggcagagccgattgcggctttaccagcgagagctaccagcagggcgtgctgagcgccaccatcctgtacgagatcctgctgggcaaggccaccctgtacgccgtgctggtgtctgccctggtgctgatggctatggtcaagcggaaggacagccgggga

SEQ ID NO: 2651 - DNA, 2721 bp, Artificial Sequence
  Synthetic Polynucloetide
atggccttaccagtgaccgccttgctcctgccgctggccttgctgctccacgccgccaggccggaagtgcagctggttgaatctggcggaggactggttcagcctggcggatctctgagactgtcttgtgccgccagcggcttcagcttcagcgacttttggatgagctgggtccgacaggcccctggcaaaggacttgaatgggtcgccacaatcagccaggccggcagcgagaaggactacgtggactctgtgaagggcagattcaccatcagccgggacaacgccaagaagtccctgtacctccagatgaacagcctgagagccgaggacaccgccgtgtactattgtgcctctggcgtgtacagcttcgactacagaggccagggcaccctggtcacagtctcttctggtaccggcggaggcggatctggcggcggaggtagcggtggcggaggatctgaattcctgcctgttctgacacagcctccatccgtgtctgtggcccctggaaagaccgccagaatcacatgcggcggcaacaacatcggcagcaagagcgtgcactggtatcagcagaagcctggacaggctcctgtgctggtggtgtacgacgacagcgatagacctagcggcatccccgagagattcagcggcagcaattccggcaataccgccacactgaccatcagcagagtggaagctggcgacgaggccgactactactgccaagtgtgggacagcagcagcgactacgtggtgtttggcggcggaacaaagctgacagtgcttctcgagatccagaaccctgatcctgccgtgtaccagctgcgggatagcaagagcagcgacaagagcgtgtgtctgttcaccgacttcgacagccagaccaacgtgtcccagagcaaggactccgacgtgtacatcaccgataagtgcgtgctggacatgcggagcatggacttcaagagcaactccgccgtggcctggtccaacaagtccgatttcgcctgcgccaacgccttcaacaacagcattatccccgaggacacattcttcccaagccccgagagcagctgcgacgtgaagctggtggaaaagagcttcgagacagacaccaacctgaacttccagaacctgagcgtgatcggcttcagaatcctgctgctgaaagtggccggctttaacctgctgatgaccctgcggctgtggtccagccgcgccaagagaagcggatctggcgtgaagcagaccctgaatttcgacctgctgaagctggctggcgacgtggaatccaacccaggccctactagtatggactggatttggcgcatccttttccttgtcggcgctgctaccggcgcgcattccgggccccagctccagctgcaagagtctggacctggcctggtcaagcctagcgagacactgagcctgacctgtaccgtgtccggcgatagcatcagcagcggcgattactactggggctggatcagacagcctcctggcaaaggactggaatggatcggccacatctactacagcggcgtgacctactacaaccccagcctgaagtccagagtgaccatcagcgtggacaccagccggaaccagttctccctgaagctgtctagcgtgacagccgccgataccgccgtgtactactgcaccagagaggacagcagcaactggcggagtagaggccagggaacactggtcacagttagctctggatccggcggaggcggaagtggaggcggaggatctggcggcggaggctctttcgaagaagttcaactggtgcagagcggagccgaagtgaagaagccaggcgagagcctgaagattagctgcaaaggcagcggctacagcttcaccagctactggatcggctgggtccgacagatgcctggcaaaggactggaatggatgggcatcatctaccccggcgacagcgacaccagatacagccctagctttcagggccaagtgaccatctccgccgacaagagcatcagcacagcctacctccagtggtcctctctgaaggccagcgataccgccatgtactactgcgccagacaagtctggggatggcaaggcggcatgtaccccaggtctaactggtggtacaacctggactcttggggccagggcacactggtcacagtctcttctacgcgtgaggacctgaagaacgtgttcccacctgaggtggccgtgttcgagcctagcgaggccgagatcagccacacccagaaagccaccctcgtgtgcctggctaccggcttctaccccgaccatgtggaactgtcttggtgggtcaacggcaaagaggtgcacagcggcgtgtgtaccgacccccagccactgaaagaacagcccgccctgaacgacagccggtactgcctgagcagcagactgagagtgtccgccaccttctggcagaacccccggaaccacttcagatgccaggtgcagttctacggcctgagcgagaacgacgagtggacccaggacagagccaagcccgtgacccagatcgtgtctgccgaagcctggggcagagccgattgcggctttaccagcgagagctaccagcagggcgtgctgagcgccaccatcctgtacgagatcctgctgggcaaggccaccctgtacgccgtgctggtgtctgccctggtgctgatggctatggtcaagcggaaggacagccgggga

SEQ ID NO: 2652 - DNA, 2700 bp, Artificial Sequence
  Synthetic Polynucloetide
atggccttaccagtgaccgccttgctcctgccgctggccttgctgctccacgccgccaggccggaagtgcagctggttgaatctggcggaggactggttcagcctggcggatctctgagactgtcttgtgccgccagcggcttcagcttcagcgacttttggatgagctgggtccgacaggcccctggcaaaggacttgaatgggtcgccacaatcagccaggccggcagcgagaaggactacgtggactctgtgaagggcagattcaccatcagccgggacaacgccaagaagtccctgtacctccagatgaacagcctgagagccgaggacaccgccgtgtactattgtgcctctggcgtgtacagcttcgactacagaggccagggcaccctggtcacagtctcttctggtaccggcggaggcggatctggcggcggaggtagcggtggcggaggatctgaattcgagctggtcatgacacagagccctgcttctctggccgtgtcactgggacagagagccaccatctcttgcagagccagcgagagcgtggacagctacggcaagagcttcatgcactggtatcagctcaagcccggccagcctcctaagctgctgatctacagagcctccaacctggaaagcggcgtgccagccagattttctggcagcggcagcagaaccgacttcaccctgaccattgatcccgtggaagccgatgatgccgccacctactactgccagcagaacaacgaggacccctggacatttggcggaggcaccaagctggaaatcaaactcgagatccagaaccctgatcctgccgtgtaccagctgcgggatagcaagagcagcgacaagagcgtgtgtctgttcaccgacttcgacagccagaccaacgtgtcccagagcaaggactccgacgtgtacatcaccgataagtgcgtgctggacatgcggagcatggacttcaagagcaactccgccgtggcctggtccaacaagtccgatttcgcctgcgccaacgccttcaacaacagcattatccccgaggacacattcttcccaagccccgagagcagctgcgacgtgaagctggtggaaaagagcttcgagacagacaccaacctgaacttccagaacctgagcgtgatcggcttcagaatcctgctgctgaaagtggccggctttaacctgctgatgaccctgcggctgtggtccagccgcgccaagagaagcggatctggcgtgaagcagaccctgaatttcgacctgctgaagctggctggcgacgtggaatccaacccaggccctactagtatggactggatttggcgcatccttttccttgtcggcgctgctaccggcgcgcattccgggccccagctccagctgcaagagtctggacctggcctggtcaagcctagcgagacactgagcctgacctgtaccgtgtccggcgatagcatcagcagcggcgattactactggggctggatcagacagcctcctggcaaaggactggaatggatcggccacatctactacagcggcgtgacctactacaaccccagcctgaagtccagagtgaccatcagcgtggacaccagccggaaccagttctccctgaagctgtctagcgtgacagccgccgataccgccgtgtactactgcaccagagaggacagcagcaactggcggagtagaggccagggaacactggtcacagttagctctggatccggcggaggcggaagtggaggcggaggatctggcggcggaggctctttcgaagaagtgcagctcgaacagtctggccccgagcttgtgaaacctggcgcttccgtgaagatgagctgcaaggccagcggctacaccttcaccaactactacatgaaatgggtcaagcagagccacggcaagtccctggaatggatcggcgatctgaaccccaacaacggcgacaccttctacaaccagaagttcaagggcaaagccacactgaccgtggacaagagcagcaacaccgcctacatgcagctcaactccctgaccagcgaggacagcgccgtgtactactgtgccagaaccggcagatacgaagagaacgctatggactactggggccagggcacaagcgtgacagtctcttctacgcgtgaggacctgaagaacgtgttcccacctgaggtggccgtgttcgagcctagcgaggccgagatcagccacacccagaaagccaccctcgtgtgcctggctaccggcttctaccccgaccatgtggaactgtcttggtgggtcaacggcaaagaggtgcacagcggcgtgtgtaccgacccccagccactgaaagaacagcccgccctgaacgacagccggtactgcctgagcagcagactgagagtgtccgccaccttctggcagaacccccggaaccacttcagatgccaggtgcagttctacggcctgagcgagaacgacgagtggacccaggacagagccaagcccgtgacccagatcgtgtctgccgaagcctggggcagagccgattgcggctttaccagcgagagctaccagcagggcgtgctgagcgccaccatcctgtacgagatcctgctgggcaaggccaccctgtacgccgtgctggtgtctgccctggtgctgatggctatggtcaagcggaaggacagccgggga

SEQ ID NO: 2653 - DNA, 2682 bp, Artificial Sequence
  Synthetic Polynucloetide
atggccttaccagtgaccgccttgctcctgccgctggccttgctgctccacgccgccaggccggaagtgcagctggttgaatctggcggaggactggttcagcctggcggatctctgagactgtcttgtgccgccagcggcttcagcttcagcgacttttggatgagctgggtccgacaggcccctggcaaaggacttgaatgggtcgccacaatcagccaggccggcagcgagaaggactacgtggactctgtgaagggcagattcaccatcagccgggacaacgccaagaagtccctgtacctccagatgaacagcctgagagccgaggacaccgccgtgtactattgtgcctctggcgtgtacagcttcgactacagaggccagggcaccctggtcacagtctcttctggtaccggcggaggcggatctggcggcggaggtagcggtggcggaggatctgaattcgacgtggtcatgacacagagcccttctagcctgtctgccagcgtgggcgacagagtgaccatcacctgtatggcctccgaggacatctacatccggctggcctggtatcagcagaagcctggaaacgcccctaagctgctgatctacgccgccacctctctggaaacaggcgtgccaagcagattttccggcagcggctctggcaccgatttcaccctgacaatatccagcctccagcctgaggacttcgccacctactactgccagcagtattggagcagcccctggacatttggcggaggcaccaaggtggaaatcaaactcgagatccagaaccctgatcctgccgtgtaccagctgcgggatagcaagagcagcgacaagagcgtgtgtctgttcaccgacttcgacagccagaccaacgtgtcccagagcaaggactccgacgtgtacatcaccgataagtgcgtgctggacatgcggagcatggacttcaagagcaactccgccgtggcctggtccaacaagtccgatttcgcctgcgccaacgccttcaacaacagcattatccccgaggacacattcttcccaagccccgagagcagctgcgacgtgaagctggtggaaaagagcttcgagacagacaccaacctgaacttccagaacctgagcgtgatcggcttcagaatcctgctgctgaaagtggccggctttaacctgctgatgaccctgcggctgtggtccagccgcgccaagagaagcggatctggcgtgaagcagaccctgaatttcgacctgctgaagctggctggcgacgtggaatccaacccaggccctactagtatggactggatttggcgcatccttttccttgtcggcgctgctaccggcgcgcattccgggccccagctccagctgcaagagtctggacctggcctggtcaagcctagcgagacactgagcctgacctgtaccgtgtccggcgatagcatcagcagcggcgattactactggggctggatcagacagcctcctggcaaaggactggaatggatcggccacatctactacagcggcgtgacctactacaaccccagcctgaagtccagagtgaccatcagcgtggacaccagccggaaccagttctccctgaagctgtctagcgtgacagccgccgataccgccgtgtactactgcaccagagaggacagcagcaactggcggagtagaggccagggaacactggtcacagttagctctggatccggcggaggcggaagtggaggcggaggatctggcggcggaggctctttcgaacaggttcagctgcaagagtctggccccggactggtcaagcctagccaaacactgagcctgacctgtaccgtgtccggctacagcatcaccagcgactacacctggaactggatcagacagcctcctggcaacggactggaatggatcggctacatcacctacagcggcagcaccagctacaaccccagcctgaaaagccgggtgctgatctccgtggacaccagcaagaatcaggtgtccctgaagctgagcagcgtgacagccgctgataccgccgtgtactactgtgccagactggggagaagatacacaatggactactggggccagggcaccaccgtgacagtttcttctacgcgtgaggacctgaagaacgtgttcccacctgaggtggccgtgttcgagcctagcgaggccgagatcagccacacccagaaagccaccctcgtgtgcctggctaccggcttctaccccgaccatgtggaactgtcttggtgggtcaacggcaaagaggtgcacagcggcgtgtgtaccgacccccagccactgaaagaacagcccgccctgaacgacagccggtactgcctgagcagcagactgagagtgtccgccaccttctggcagaacccccggaaccacttcagatgccaggtgcagttctacggcctgagcgagaacgacgagtggacccaggacagagccaagcccgtgacccagatcgtgtctgccgaagcctggggcagagccgattgcggctttaccagcgagagctaccagcagggcgtgctgagcgccaccatcctgtacgagatcctgctgggcaaggccaccctgtacgccgtgctggtgtctgccctggtgctgatggctatggtcaagcggaaggacagccgggga

SEQ ID NO: 2654 - DNA, 2694 bp, Artificial Sequence
  Synthetic Polynucloetide
atggccttaccagtgaccgccttgctcctgccgctggccttgctgctccacgccgccaggccggaagtgcagctggttgaatctggcggaggactggttcagcctggcggatctctgagactgtcttgtgccgccagcggcttcagcttcagcgacttttggatgagctgggtccgacaggcccctggcaaaggacttgaatgggtcgccacaatcagccaggccggcagcgagaaggactacgtggactctgtgaagggcagattcaccatcagccgggacaacgccaagaagtccctgtacctccagatgaacagcctgagagccgaggacaccgccgtgtactattgtgcctctggcgtgtacagcttcgactacagaggccagggcaccctggtcacagtctcttctggtaccggcggaggcggatctggcggcggaggtagcggtggcggaggatctgaattcgatattgtgctgactcagagccctgccactctgagccttagtccaggcgacagagctaccatctcctgtagggcctctgaatccgtgaccattctgggctctcatctcatatattggtatcaacaaaagccgggccagcctccacggctgctcattcaactggcctctaacgtgcagaccggcgtgccagctagattttctggctctggctcccggaccgactttacactgacaatcagctccgtggaacccgaagattttgccgtctattattgcctccagtccaggaccattcctcggacattcggccagggaacaaaactcgaaatcaagcggctcgagatccagaaccctgatcctgccgtgtaccagctgcgggatagcaagagcagcgacaagagcgtgtgtctgttcaccgacttcgacagccagaccaacgtgtcccagagcaaggactccgacgtgtacatcaccgataagtgcgtgctggacatgcggagcatggacttcaagagcaactccgccgtggcctggtccaacaagtccgatttcgcctgcgccaacgccttcaacaacagcattatccccgaggacacattcttcccaagccccgagagcagctgcgacgtgaagctggtggaaaagagcttcgagacagacaccaacctgaacttccagaacctgagcgtgatcggcttcagaatcctgctgctgaaagtggccggctttaacctgctgatgaccctgcggctgtggtccagccgcgccaagagaagcggatctggcgtgaagcagaccctgaatttcgacctgctgaagctggctggcgacgtggaatccaacccaggccctactagtatggactggatttggcgcatccttttccttgtcggcgctgctaccggcgcgcattccgggccccagctccagctgcaagagtctggacctggcctggtcaagcctagcgagacactgagcctgacctgtaccgtgtccggcgatagcatcagcagcggcgattactactggggctggatcagacagcctcctggcaaaggactggaatggatcggccacatctactacagcggcgtgacctactacaaccccagcctgaagtccagagtgaccatcagcgtggacaccagccggaaccagttctccctgaagctgtctagcgtgacagccgccgataccgccgtgtactactgcaccagagaggacagcagcaactggcggagtagaggccagggaacactggtcacagttagctctggatccggcggaggcggaagtggaggcggaggatctggcggcggaggctctttcgaacaggtgcagctcgttcagagtggccccgaagtgaaaaagccaggcgagtccgtgaagatttcctgcaaagcctccggctacacattccggcactactctatgaattgggtcaagcaggccccaggccagggccttaagtggatgggacgcatcaataccgagtccggcgtgccaatctacgccgatgacttcaaaggccggttcagcttcaccgtggatacctctgcctccaccgcctacctggaaatcagcagcctgaccagcgaggatacagctgtgtacttctgtagcaacgattacctctacagcctggatttctggggacagggaaccacactgaccgtgtctagcacgcgtgaggacctgaagaacgtgttcccacctgaggtggccgtgttcgagcctagcgaggccgagatcagccacacccagaaagccaccctcgtgtgcctggctaccggcttctaccccgaccatgtggaactgtcttggtgggtcaacggcaaagaggtgcacagcggcgtgtgtaccgacccccagccactgaaagaacagcccgccctgaacgacagccggtactgcctgagcagcagactgagagtgtccgccaccttctggcagaacccccggaaccacttcagatgccaggtgcagttctacggcctgagcgagaacgacgagtggacccaggacagagccaagcccgtgacccagatcgtgtctgccgaagcctggggcagagccgattgcggctttaccagcgagagctaccagcagggcgtgctgagcgccaccatcctgtacgagatcctgctgggcaaggccaccctgtacgccgtgctggtgtctgccctggtgctgatggctatggtcaagcggaaggacagccgggga

SEQ ID NO: 2655 - DNA, 2694 bp, Artificial Sequence
  Synthetic Polynucloetide
atggccttaccagtgaccgccttgctcctgccgctggccttgctgctccacgccgccaggccggaagtgcagctggttgaatctggcggaggactggttcagcctggcggatctctgagactgtcttgtgccgccagcggcttcagcttcagcgacttttggatgagctgggtccgacaggcccctggcaaaggacttgaatgggtcgccacaatcagccaggccggcagcgagaaggactacgtggactctgtgaagggcagattcaccatcagccgggacaacgccaagaagtccctgtacctccagatgaacagcctgagagccgaggacaccgccgtgtactattgtgcctctggcgtgtacagcttcgactacagaggccagggcaccctggtcacagtctcttctggtaccggcggaggcggatctggcggcggaggtagcggtggcggaggatctgaattcgacatcgtgctgacacagtctcccgccacactgtcactgagccctggcgatagagccacactgagctgtagagccagcgagagcgtgacaatcctgggcagccacctgatctactggtatcagcagaagcccggacaggcccctagactgctgattcagctcgccagcaatgtgcagacaggcatccctgccagattttccggcagcggcagcagaaccgatttcaccctgaccataagcagcctggaacctgaggacttcgccgtgtactactgcctccagagccggacaatccccagaacctttggacagggcaccaagctggaaatcaagagactcgagatccagaaccctgatcctgccgtgtaccagctgcgggatagcaagagcagcgacaagagcgtgtgtctgttcaccgacttcgacagccagaccaacgtgtcccagagcaaggactccgacgtgtacatcaccgataagtgcgtgctggacatgcggagcatggacttcaagagcaactccgccgtggcctggtccaacaagtccgatttcgcctgcgccaacgccttcaacaacagcattatccccgaggacacattcttcccaagccccgagagcagctgcgacgtgaagctggtggaaaagagcttcgagacagacaccaacctgaacttccagaacctgagcgtgatcggcttcagaatcctgctgctgaaagtggccggctttaacctgctgatgaccctgcggctgtggtccagccgcgccaagagaagcggatctggcgtgaagcagaccctgaatttcgacctgctgaagctggctggcgacgtggaatccaacccaggccctactagtatggactggatttggcgcatccttttccttgtcggcgctgctaccggcgcgcattccgggccccagctccagctgcaagagtctggacctggcctggtcaagcctagcgagacactgagcctgacctgtaccgtgtccggcgatagcatcagcagcggcgattactactggggctggatcagacagcctcctggcaaaggactggaatggatcggccacatctactacagcggcgtgacctactacaaccccagcctgaagtccagagtgaccatcagcgtggacaccagccggaaccagttctccctgaagctgtctagcgtgacagccgccgataccgccgtgtactactgcaccagagaggacagcagcaactggcggagtagaggccagggaacactggtcacagttagctctggatccggcggaggcggaagtggaggcggaggatctggcggcggaggctctttcgaacaggttcagctggtgcagtctggcagcgagctgaagaaacctggcgagagcgtgaagatcagctgcaaggccagcggctacaccttcacacactacagcatgaactgggtccgacaggcccctggacaaggactggaatggatgggcagaatcaacaccgagacaggcgagcccctgtacgccgacgatttcaagggcagattcgtgttcagcctggacaccagcgccagcacagcctatctccagatcagctctctgaaggccgaggacaccgccgtgtactactgctccaacgactacctgtactccctggactattggggccagggcacactggtcacagtgtctagtacgcgtgaggacctgaagaacgtgttcccacctgaggtggccgtgttcgagcctagcgaggccgagatcagccacacccagaaagccaccctcgtgtgcctggctaccggcttctaccccgaccatgtggaactgtcttggtgggtcaacggcaaagaggtgcacagcggcgtgtgtaccgacccccagccactgaaagaacagcccgccctgaacgacagccggtactgcctgagcagcagactgagagtgtccgccaccttctggcagaacccccggaaccacttcagatgccaggtgcagttctacggcctgagcgagaacgacgagtggacccaggacagagccaagcccgtgacccagatcgtgtctgccgaagcctggggcagagccgattgcggctttaccagcgagagctaccagcagggcgtgctgagcgccaccatcctgtacgagatcctgctgggcaaggccaccctgtacgccgtgctggtgtctgccctggtgctgatggctatggtcaagcggaaggacagccgggga

SEQ ID NO: 2656 - DNA, 2697 bp, Artificial Sequence
  Synthetic Polynucloetide
atggccttaccagtgaccgccttgctcctgccgctggccttgctgctccacgccgccaggccggaagtgcagctggttgaatctggcggaggactggttcagcctggcggatctctgagactgtcttgtgccgccagcggcttcagcttcagcgacttttggatgagctgggtccgacaggcccctggcaaaggacttgaatgggtcgccacaatcagccaggccggcagcgagaaggactacgtggactctgtgaagggcagattcaccatcagccgggacaacgccaagaagtccctgtacctccagatgaacagcctgagagccgaggacaccgccgtgtactattgtgcctctggcgtgtacagcttcgactacagaggccagggcaccctggtcacagtctcttctggtaccggcggaggcggatctggcggcggaggtagcggtggcggaggatctgaattcgacatccagctgactcagagccctagctttctgagcgccagcgtgggcgacagagtgaccattacatgtagagccagccagggcatcagcaccgacctgaactggtatcagcagaagcctggcaaggcccctaagctgctgatctacgccgccagcaatctggaaagcggcgtgccaagcagattttccggctctggcagcggcaccgagttcaccctgacaatatctagcctccagcctgaggacttcgccacctactactgccagcagagctacaactggccctacacctttggcggaggcaccaaggtggaaatcaagagactcgagatccagaaccctgatcctgccgtgtaccagctgcgggatagcaagagcagcgacaagagcgtgtgtctgttcaccgacttcgacagccagaccaacgtgtcccagagcaaggactccgacgtgtacatcaccgataagtgcgtgctggacatgcggagcatggacttcaagagcaactccgccgtggcctggtccaacaagtccgatttcgcctgcgccaacgccttcaacaacagcattatccccgaggacacattcttcccaagccccgagagcagctgcgacgtgaagctggtggaaaagagcttcgagacagacaccaacctgaacttccagaacctgagcgtgatcggcttcagaatcctgctgctgaaagtggccggctttaacctgctgatgaccctgcggctgtggtccagccgcgccaagagaagcggatctggcgtgaagcagaccctgaatttcgacctgctgaagctggctggcgacgtggaatccaacccaggccctactagtatggactggatttggcgcatccttttccttgtcggcgctgctaccggcgcgcattccgggccccagctccagctgcaagagtctggacctggcctggtcaagcctagcgagacactgagcctgacctgtaccgtgtccggcgatagcatcagcagcggcgattactactggggctggatcagacagcctcctggcaaaggactggaatggatcggccacatctactacagcggcgtgacctactacaaccccagcctgaagtccagagtgaccatcagcgtggacaccagccggaaccagttctccctgaagctgtctagcgtgacagccgccgataccgccgtgtactactgcaccagagaggacagcagcaactggcggagtagaggccagggaacactggtcacagttagctctggatccggcggaggcggaagtggaggcggaggatctggcggcggaggctctttcgaagaagttcagctggttgaatcaggcggaggactcgtgaaacctggcggctctctgagactgtcttgtgccgccagcggcttcaccttcagcaacttcgagatgaactgggtccgacaggccccaggcaaaggactggaatgggtgtccggcatcagctccaatggccggtacatcaactacgccgacagcgtgaagggcagattcaccatcagccgggacaacgccaagaacagcctgtacctccagatgaactccctgagagccgaggacaccgccgtgtactattgtgccagagtggtggacttcgaccaggactacaacggcttcgactattggggccagggcaccctggttaccgttagctctacgcgtgaggacctgaagaacgtgttcccacctgaggtggccgtgttcgagcctagcgaggccgagatcagccacacccagaaagccaccctcgtgtgcctggctaccggcttctaccccgaccatgtggaactgtcttggtgggtcaacggcaaagaggtgcacagcggcgtgtgtaccgacccccagccactgaaagaacagcccgccctgaacgacagccggtactgcctgagcagcagactgagagtgtccgccaccttctggcagaacccccggaaccacttcagatgccaggtgcagttctacggcctgagcgagaacgacgagtggacccaggacagagccaagcccgtgacccagatcgtgtctgccgaagcctggggcagagccgattgcggctttaccagcgagagctaccagcagggcgtgctgagcgccaccatcctgtacgagatcctgctgggcaaggccaccctgtacgccgtgctggtgtctgccctggtgctgatggctatggtcaagcggaaggacagccgggga

SEQ ID NO: 2657 - DNA, 2691 bp, Artificial Sequence
  Synthetic Polynucloetide
atggccttaccagtgaccgccttgctcctgccgctggccttgctgctccacgccgccaggccggaagtgcagctggttgaatctggcggaggactggttcagcctggcggatctctgagactgtcttgtgccgccagcggcttcagcttcagcgacttttggatgagctgggtccgacaggcccctggcaaaggacttgaatgggtcgccacaatcagccaggccggcagcgagaaggactacgtggactctgtgaagggcagattcaccatcagccgggacaacgccaagaagtccctgtacctccagatgaacagcctgagagccgaggacaccgccgtgtactattgtgcctctggcgtgtacagcttcgactacagaggccagggcaccctggtcacagtctcttctggtaccggcggaggcggatctggcggcggaggtagcggtggcggaggatctgaattcgacatccaactgactcagagccccagctttctgagcgcctctgtgggcgacagagtgaccatcacatgtagtctcagcctgggcatcagcacatggcgggattggtttccgccgaggcttggcaggggccttgagccgctgacctacgccgccagcacactgcaaagcggagtgcctagcagattttccggcagcggctctggcaccgagttcaccctgacaatatccagcctccagcctgaggacttcgccacctactactgccagcagctcaacagctaccctctgacctttggcggaggcaccaaggtggaaatcaagagactcgagatccagaaccctgatcctgccgtgtaccagctgcgggatagcaagagcagcgacaagagcgtgtgtctgttcaccgacttcgacagccagaccaacgtgtcccagagcaaggactccgacgtgtacatcaccgataagtgcgtgctggacatgcggagcatggacttcaagagcaactccgccgtggcctggtccaacaagtccgatttcgcctgcgccaacgccttcaacaacagcattatccccgaggacacattcttcccaagccccgagagcagctgcgacgtgaagctggtggaaaagagcttcgagacagacaccaacctgaacttccagaacctgagcgtgatcggcttcagaatcctgctgctgaaagtggccggctttaacctgctgatgaccctgcggctgtggtccagccgcgccaagagaagcggatctggcgtgaagcagaccctgaatttcgacctgctgaagctggctggcgacgtggaatccaacccaggccctactagtatggactggatttggcgcatccttttccttgtcggcgctgctaccggcgcgcattccgggccccagctccagctgcaagagtctggacctggcctggtcaagcctagcgagacactgagcctgacctgtaccgtgtccggcgatagcatcagcagcggcgattactactggggctggatcagacagcctcctggcaaaggactggaatggatcggccacatctactacagcggcgtgacctactacaaccccagcctgaagtccagagtgaccatcagcgtggacaccagccggaaccagttctccctgaagctgtctagcgtgacagccgccgataccgccgtgtactactgcaccagagaggacagcagcaactggcggagtagaggccagggaacactggtcacagttagctctggatccggcggaggcggaagtggaggcggaggatctggcggcggaggctctttcgaagaagttcaactggttgagtctggtggcggcctggttaagcctggcggatctctgagactgagctgtgccgccagcggcttcacctttagcacatacggcatgagctgggtccgacaggcccctggaaaaggacttgagtgggtcgcctacatcaacaacggctccggctacatctactacgccgacagcgtgaagggcagattcaccatcagccgggacaacgccaagaacagcctgtacctccagatgaactccctgagagccgaggacaccgccgtgtactattgtgccagaggacagtggtggagcggcggagactttgattattggggccagggcaccctggtcaccgtttcttctacgcgtgaggacctgaagaacgtgttcccacctgaggtggccgtgttcgagcctagcgaggccgagatcagccacacccagaaagccaccctcgtgtgcctggctaccggcttctaccccgaccatgtggaactgtcttggtgggtcaacggcaaagaggtgcacagcggcgtgtgtaccgacccccagccactgaaagaacagcccgccctgaacgacagccggtactgcctgagcagcagactgagagtgtccgccaccttctggcagaacccccggaaccacttcagatgccaggtgcagttctacggcctgagcgagaacgacgagtggacccaggacagagccaagcccgtgacccagatcgtgtctgccgaagcctggggcagagccgattgcggctttaccagcgagagctaccagcagggcgtgctgagcgccaccatcctgtacgagatcctgctgggcaaggccaccctgtacgccgtgctggtgtctgccctggtgctgatggctatggtcaagcggaaggacagccgggga

SEQ ID NO: 2658 - DNA, 2694 bp, Artificial Sequence
  Synthetic Polynucloetide
atggccttaccagtgaccgccttgctcctgccgctggccttgctgctccacgccgccaggccggaagtgcagctggttgaatctggcggaggactggttcagcctggcggatctctgagactgtcttgtgccgccagcggcttcagcttcagcgacttttggatgagctgggtccgacaggcccctggcaaaggacttgaatgggtcgccacaatcagccaggccggcagcgagaaggactacgtggactctgtgaagggcagattcaccatcagccgggacaacgccaagaagtccctgtacctccagatgaacagcctgagagccgaggacaccgccgtgtactattgtgcctctggcgtgtacagcttcgactacagaggccagggcaccctggtcacagtctcttctggtaccggcggaggcggatctggcggcggaggtagcggtggcggaggatctgaattcgagatcgtgctgacacagtctcccgccacactgtcactgtctccaggcgaaagagccacactgagctgtagcgccagcagcagcgtgtcctacatgtactggtatcagcagaagcccggacaggcccctagactgctgatctacagaaccagcaacctggcctctggcatccccgccagattttctggctctggcagcggcaccgatttcaccctgaccataagcagcctggaacctgaggacttcgccgtgtactactgccagcagtaccacagctaccccaccacctttggacagggcaccaaggtggaaatcaagcggacagttctcgagatccagaaccctgatcctgccgtgtaccagctgcgggatagcaagagcagcgacaagagcgtgtgtctgttcaccgacttcgacagccagaccaacgtgtcccagagcaaggactccgacgtgtacatcaccgataagtgcgtgctggacatgcggagcatggacttcaagagcaactccgccgtggcctggtccaacaagtccgatttcgcctgcgccaacgccttcaacaacagcattatccccgaggacacattcttcccaagccccgagagcagctgcgacgtgaagctggtggaaaagagcttcgagacagacaccaacctgaacttccagaacctgagcgtgatcggcttcagaatcctgctgctgaaagtggccggctttaacctgctgatgaccctgcggctgtggtccagccgcgccaagagaagcggatctggcgtgaagcagaccctgaatttcgacctgctgaagctggctggcgacgtggaatccaacccaggccctactagtatggactggatttggcgcatccttttccttgtcggcgctgctaccggcgcgcattccgggccccagctccagctgcaagagtctggacctggcctggtcaagcctagcgagacactgagcctgacctgtaccgtgtccggcgatagcatcagcagcggcgattactactggggctggatcagacagcctcctggcaaaggactggaatggatcggccacatctactacagcggcgtgacctactacaaccccagcctgaagtccagagtgaccatcagcgtggacaccagccggaaccagttctccctgaagctgtctagcgtgacagccgccgataccgccgtgtactactgcaccagagaggacagcagcaactggcggagtagaggccagggaacactggtcacagttagctctggatccggcggaggcggaagtggaggcggaggatctggcggcggaggctctttcgaagaagtgcagctggttgaatcaggtggcggcctggttcaacctggcggatctctgagactgtcttgtgccgccagcggcttcagcttcaacacctacgccatgaactgggtccgacaggctcctggcaaaggactggaatgggtgtcccacatcagaagcaagagcaacaacttcgccacctactacgccgacagcgtgaaggacagattcaccatcagccgggacaacgccaagaacagcctgtacctccagatgaactccctgagagccgaggacaccgccgtgtattattgcgccagacaaggcggcgacttccctatggattattggggccagggcaccctggtcaccgtttcttctacgcgtgaggacctgaagaacgtgttcccacctgaggtggccgtgttcgagcctagcgaggccgagatcagccacacccagaaagccaccctcgtgtgcctggctaccggcttctaccccgaccatgtggaactgtcttggtgggtcaacggcaaagaggtgcacagcggcgtgtgtaccgacccccagccactgaaagaacagcccgccctgaacgacagccggtactgcctgagcagcagactgagagtgtccgccaccttctggcagaacccccggaaccacttcagatgccaggtgcagttctacggcctgagcgagaacgacgagtggacccaggacagagccaagcccgtgacccagatcgtgtctgccgaagcctggggcagagccgattgcggctttaccagcgagagctaccagcagggcgtgctgagcgccaccatcctgtacgagatcctgctgggcaaggccaccctgtacgccgtgctggtgtctgccctggtgctgatggctatggtcaagcggaaggacagccgggga

SEQ ID NO: 2659 - DNA, 2682 bp, Artificial Sequence
  Synthetic Polynucloetide
atggccttaccagtgaccgccttgctcctgccgctggccttgctgctccacgccgccaggccggaagtgcagctggttgaatctggcggaggactggttcagcctggcggatctctgagactgtcttgtgccgccagcggcttcagcttcagcgacttttggatgagctgggtccgacaggcccctggcaaaggacttgaatgggtcgccacaatcagccaggccggcagcgagaaggactacgtggactctgtgaagggcagattcaccatcagccgggacaacgccaagaagtccctgtacctccagatgaacagcctgagagccgaggacaccgccgtgtactattgtgcctctggcgtgtacagcttcgactacagaggccagggcaccctggtcacagtctcttctggtaccggcggaggcggatctggcggcggaggtagcggtggcggaggatctgaattcgacgtggtcatgacacagagcccttctagcctgtctgccagcgtgggcgacagagtgaccatcacctgtaaagccagcgaggacatctacatccggctggcctggtatcagcagaagcctggaaaggcccctaagctgctgatctacgccgccacctctctggaaacaggcgtgccaagcagattttccggcagcggctctggcaccgatttcaccctgacaatatccagcctccagcctgaggacttcgccacctactactgccagcagtattggaccacaccttggacctttggcggaggcaccaaggtggaaatcaaactcgagatccagaaccctgatcctgccgtgtaccagctgcgggatagcaagagcagcgacaagagcgtgtgtctgttcaccgacttcgacagccagaccaacgtgtcccagagcaaggactccgacgtgtacatcaccgataagtgcgtgctggacatgcggagcatggacttcaagagcaactccgccgtggcctggtccaacaagtccgatttcgcctgcgccaacgccttcaacaacagcattatccccgaggacacattcttcccaagccccgagagcagctgcgacgtgaagctggtggaaaagagcttcgagacagacaccaacctgaacttccagaacctgagcgtgatcggcttcagaatcctgctgctgaaagtggccggctttaacctgctgatgaccctgcggctgtggtccagccgcgccaagagaagcggatctggcgtgaagcagaccctgaatttcgacctgctgaagctggctggcgacgtggaatccaacccaggccctactagtatggactggatttggcgcatccttttccttgtcggcgctgctaccggcgcgcattccgggccccagctccagctgcaagagtctggacctggcctggtcaagcctagcgagacactgagcctgacctgtaccgtgtccggcgatagcatcagcagcggcgattactactggggctggatcagacagcctcctggcaaaggactggaatggatcggccacatctactacagcggcgtgacctactacaaccccagcctgaagtccagagtgaccatcagcgtggacaccagccggaaccagttctccctgaagctgtctagcgtgacagccgccgataccgccgtgtactactgcaccagagaggacagcagcaactggcggagtagaggccagggaacactggtcacagttagctctggatccggcggaggcggaagtggaggcggaggatctggcggcggaggctctttcgaacaggtgcagctccaagagtctggccctggactggtcaagcctagccagacactgagcctgacctgtaccgtgtccggctacagcatcaccatcgactacacctggaactggatcagacagcctcctggcaaaggactggaatggatcggctacatcacctacagcggcagcaccgactacaaccccagcctgaaaagccgggtgctgatctccgtggacaccagcaagaatcaggtgtccctgaagctgagcagcgtgacagccgctgataccgccgtgtactactgtgccagactgggcagaagatacgccctggattattggggccagggcaccaccgtgacagtgtcatctacgcgtgaggacctgaagaacgtgttcccacctgaggtggccgtgttcgagcctagcgaggccgagatcagccacacccagaaagccaccctcgtgtgcctggctaccggcttctaccccgaccatgtggaactgtcttggtgggtcaacggcaaagaggtgcacagcggcgtgtgtaccgacccccagccactgaaagaacagcccgccctgaacgacagccggtactgcctgagcagcagactgagagtgtccgccaccttctggcagaacccccggaaccacttcagatgccaggtgcagttctacggcctgagcgagaacgacgagtggacccaggacagagccaagcccgtgacccagatcgtgtctgccgaagcctggggcagagccgattgcggctttaccagcgagagctaccagcagggcgtgctgagcgccaccatcctgtacgagatcctgctgggcaaggccaccctgtacgccgtgctggtgtctgccctggtgctgatggctatggtcaagcggaaggacagccgggga

SEQ ID NO: 2660 - DNA, 2694 bp, Artificial Sequence
  Synthetic Polynucloetide
atggccttaccagtgaccgccttgctcctgccgctggccttgctgctccacgccgccaggccggaagtgcagctggttgaatctggcggaggactggttcagcctggcggatctctgagactgtcttgtgccgccagcggcttcagcttcagcgacttttggatgagctgggtccgacaggcccctggcaaaggacttgaatgggtcgccacaatcagccaggccggcagcgagaaggactacgtggactctgtgaagggcagattcaccatcagccgggacaacgccaagaagtccctgtacctccagatgaacagcctgagagccgaggacaccgccgtgtactattgtgcctctggcgtgtacagcttcgactacagaggccagggcaccctggtcacagtctcttctggtaccggcggaggcggatctggcggcggaggtagcggtggcggaggatctgaattcgacatccagatgacccagaccacaagcagcctgtctgccagcctgggcgacagagtgaccatctcttgtagagccagccaggacatcagcaactacctgaactggtatcagcagaaacccgacggcaccgtgaagctgctgatctactacaccagcatcctgcacagcggcgtgcccagcagattttctggctctggcagcggcaccgactacagcctgaccatcagcaatctggaacaagaggacttcgctacctacttctgccagcaaggcaacaccctgccttggacatttggcggaggcaccaagctggaaatcaaagctctcgagatccagaaccctgatcctgccgtgtaccagctgcgggatagcaagagcagcgacaagagcgtgtgtctgttcaccgacttcgacagccagaccaacgtgtcccagagcaaggactccgacgtgtacatcaccgataagtgcgtgctggacatgcggagcatggacttcaagagcaactccgccgtggcctggtccaacaagtccgatttcgcctgcgccaacgccttcaacaacagcattatccccgaggacacattcttcccaagccccgagagcagctgcgacgtgaagctggtggaaaagagcttcgagacagacaccaacctgaacttccagaacctgagcgtgatcggcttcagaatcctgctgctgaaagtggccggctttaacctgctgatgaccctgcggctgtggtccagccgcgccaagagaagcggatctggcgtgaagcagaccctgaatttcgacctgctgaagctggctggcgacgtggaatccaacccaggccctactagtatggactggatttggcgcatccttttccttgtcggcgctgctaccggcgcgcattccgggccccagctccagctgcaagagtctggacctggcctggtcaagcctagcgagacactgagcctgacctgtaccgtgtccggcgatagcatcagcagcggcgattactactggggctggatcagacagcctcctggcaaaggactggaatggatcggccacatctactacagcggcgtgacctactacaaccccagcctgaagtccagagtgaccatcagcgtggacaccagccggaaccagttctccctgaagctgtctagcgtgacagccgccgataccgccgtgtactactgcaccagagaggacagcagcaactggcggagtagaggccagggaacactggtcacagttagctctggatccggcggaggcggaagtggaggcggaggatctggcggcggaggctctttcgaagtgcaactggttgaatctggcggcggactggttaagcctggcggatctctgaagctgagctgtgccgcctctggcttcgccttcagcatctacgatatgagctgggtccgacagacccctgagaagagactggaatgggtcgcctacatctctagcggcggagggacctactatcccgacacagtgaagggcagattcaccatctccagagacaacgccaagaacaccctgtacctccagatgagcagcctgaagtccgaggacaccgccatgtactactgcgccagacacagcggctatggcacacattggggagtgctgtttgcctactggggccagggaacactggtcacagtttctgctacgcgtgaggacctgaagaacgtgttcccacctgaggtggccgtgttcgagcctagcgaggccgagatcagccacacccagaaagccaccctcgtgtgcctggctaccggcttctaccccgaccatgtggaactgtcttggtgggtcaacggcaaagaggtgcacagcggcgtgtgtaccgacccccagccactgaaagaacagcccgccctgaacgacagccggtactgcctgagcagcagactgagagtgtccgccaccttctggcagaacccccggaaccacttcagatgccaggtgcagttctacggcctgagcgagaacgacgagtggacccaggacagagccaagcccgtgacccagatcgtgtctgccgaagcctggggcagagccgattgcggctttaccagcgagagctaccagcagggcgtgctgagcgccaccatcctgtacgagatcctgctgggcaaggccaccctgtacgccgtgctggtgtctgccctggtgctgatggctatggtcaagcggaaggacagccgggga

SEQ ID NO: 2661 - DNA, 2727 bp, Artificial Sequence
  Synthetic Polynucloetide
atggccttaccagtgaccgccttgctcctgccgctggccttgctgctccacgccgccaggccggaagtgcagctggttgaatctggcggaggactggttcagcctggcggatctctgagactgtcttgtgccgccagcggcttcagcttcagcgacttttggatgagctgggtccgacaggcccctggcaaaggacttgaatgggtcgccacaatcagccaggccggcagcgagaaggactacgtggactctgtgaagggcagattcaccatcagccgggacaacgccaagaagtccctgtacctccagatgaacagcctgagagccgaggacaccgccgtgtactattgtgcctctggcgtgtacagcttcgactacagaggccagggcaccctggtcacagtctcttctggtaccggcggaggcggatctggcggcggaggtagcggtggcggaggatctgaattcgacatcgtgatgacacagagccctgatagcctggccgtgtctctgggagagagagccaccatcaactgcaagagcagccagagcctgctgtacagaagcaaccagaagaactacctggcctggtatcagcagaagcccggccagcctcctaagctgctgatctactgggccagcaccagagaaagcggcgtgcccgatagattttctggctctggcagcggcaccgacttcaccctgacaatttctagcctgcaagccgaggacgtggccgtgtactactgccagcagtattacaactaccccagaaccttcggccagggcaccaaggtggaaatcaagagaacagttctcgagatccagaaccctgatcctgccgtgtaccagctgcgggatagcaagagcagcgacaagagcgtgtgtctgttcaccgacttcgacagccagaccaacgtgtcccagagcaaggactccgacgtgtacatcaccgataagtgcgtgctggacatgcggagcatggacttcaagagcaactccgccgtggcctggtccaacaagtccgatttcgcctgcgccaacgccttcaacaacagcattatccccgaggacacattcttcccaagccccgagagcagctgcgacgtgaagctggtggaaaagagcttcgagacagacaccaacctgaacttccagaacctgagcgtgatcggcttcagaatcctgctgctgaaagtggccggctttaacctgctgatgaccctgcggctgtggtccagccgcgccaagagaagcggatctggcgtgaagcagaccctgaatttcgacctgctgaagctggctggcgacgtggaatccaacccaggccctactagtatggactggatttggcgcatccttttccttgtcggcgctgctaccggcgcgcattccgggccccagctccagctgcaagagtctggacctggcctggtcaagcctagcgagacactgagcctgacctgtaccgtgtccggcgatagcatcagcagcggcgattactactggggctggatcagacagcctcctggcaaaggactggaatggatcggccacatctactacagcggcgtgacctactacaaccccagcctgaagtccagagtgaccatcagcgtggacaccagccggaaccagttctccctgaagctgtctagcgtgacagccgccgataccgccgtgtactactgcaccagagaggacagcagcaactggcggagtagaggccagggaacactggtcacagttagctctggatccggcggaggcggaagtggaggcggaggatctggcggcggaggctctttcgaagaagttcagctgcttgaatcaggcggcggactggttcaacctggcggatctctgagactgagctgtgccgccagcggctacagcatcacaagcgactatgcctggaactgggtccgacaggcccctggcaaaggactggaatgggtgtcctacatcagcaacagcggcagcaccagctacaaccccagcctgaagtcccggttcaccatcagcagagacaacagcaagaacaccctgtacctccagatgaacagcctgagagctgaggacaccgccgtgtattattgcgccaaagagcggaactacgactacgacgattactactacgctatggactactggggccagggaaccctggtcacagtctcttctacgcgtgaggacctgaagaacgtgttcccacctgaggtggccgtgttcgagcctagcgaggccgagatcagccacacccagaaagccaccctcgtgtgcctggctaccggcttctaccccgaccatgtggaactgtcttggtgggtcaacggcaaagaggtgcacagcggcgtgtgtaccgacccccagccactgaaagaacagcccgccctgaacgacagccggtactgcctgagcagcagactgagagtgtccgccaccttctggcagaacccccggaaccacttcagatgccaggtgcagttctacggcctgagcgagaacgacgagtggacccaggacagagccaagcccgtgacccagatcgtgtctgccgaagcctggggcagagccgattgcggctttaccagcgagagctaccagcagggcgtgctgagcgccaccatcctgtacgagatcctgctgggcaaggccaccctgtacgccgtgctggtgtctgccctggtgctgatggctatggtcaagcggaaggacagccgggga

SEQ ID NO: 2662 - DNA, 2706 bp, Artificial Sequence
  Synthetic Polynucloetide
atggccttaccagtgaccgccttgctcctgccgctggccttgctgctccacgccgccaggccggaagtgcagctggttgaatctggcggaggactggttcagcctggcggatctctgagactgtcttgtgccgccagcggcttcagcttcagcgacttttggatgagctgggtccgacaggcccctggcaaaggacttgaatgggtcgccacaatcagccaggccggcagcgagaaggactacgtggactctgtgaagggcagattcaccatcagccgggacaacgccaagaagtccctgtacctccagatgaacagcctgagagccgaggacaccgccgtgtactattgtgcctctggcgtgtacagcttcgactacagaggccagggcaccctggtcacagtctcttctggtaccggcggaggcggatctggcggcggaggtagcggtggcggaggatctgaattcgacgtggtcatgacacagagccctctgagcctgcctgtgacacttggacagcctgccagcatcagctgtagaagcagccagagcctgctgcacagcagcggcaatacctacctggaatggtatcagcagaggcccggacagagccccagacctctgatctacaagatcagcacccggttcagcggcgtgcccgatagattttctggctctggcagcggcaccgacttcaccctgaagattagcagagtggaagccgaggacgtgggcgtgtactactgcttccaaggcagccacgtgccatacacctttggcggcggaacaaaggtggaaatcaagagactcgagatccagaaccctgatcctgccgtgtaccagctgcgggatagcaagagcagcgacaagagcgtgtgtctgttcaccgacttcgacagccagaccaacgtgtcccagagcaaggactccgacgtgtacatcaccgataagtgcgtgctggacatgcggagcatggacttcaagagcaactccgccgtggcctggtccaacaagtccgatttcgcctgcgccaacgccttcaacaacagcattatccccgaggacacattcttcccaagccccgagagcagctgcgacgtgaagctggtggaaaagagcttcgagacagacaccaacctgaacttccagaacctgagcgtgatcggcttcagaatcctgctgctgaaagtggccggctttaacctgctgatgaccctgcggctgtggtccagccgcgccaagagaagcggatctggcgtgaagcagaccctgaatttcgacctgctgaagctggctggcgacgtggaatccaacccaggccctactagtatggactggatttggcgcatccttttccttgtcggcgctgctaccggcgcgcattccgggccccagctccagctgcaagagtctggacctggcctggtcaagcctagcgagacactgagcctgacctgtaccgtgtccggcgatagcatcagcagcggcgattactactggggctggatcagacagcctcctggcaaaggactggaatggatcggccacatctactacagcggcgtgacctactacaaccccagcctgaagtccagagtgaccatcagcgtggacaccagccggaaccagttctccctgaagctgtctagcgtgacagccgccgataccgccgtgtactactgcaccagagaggacagcagcaactggcggagtagaggccagggaacactggtcacagttagctctggatccggcggaggcggaagtggaggcggaggatctggcggcggaggctctttcgaacaagttcagctggttcagagcggagccgaagtgaagaaacctggggcctctgtgaaggtgtcctgcaaagcctctggcctgaccatcgaggactactacatgcactgggtccgacaggcccctggacaaggacttgaatggatgggctggatcgaccccgagaacggcgatacagagtacggccctaagttccagggcagagtgaccatgaccagagacaccagcatcaacaccgcctacatggaactgagccggctgagatccgatgacaccgccgtgtactattgcgccgtgcacaatgcccactacggcacttggtttgcctattggggccagggcacactggtcaccgttagctctacgcgtgaggacctgaagaacgtgttcccacctgaggtggccgtgttcgagcctagcgaggccgagatcagccacacccagaaagccaccctcgtgtgcctggctaccggcttctaccccgaccatgtggaactgtcttggtgggtcaacggcaaagaggtgcacagcggcgtgtgtaccgacccccagccactgaaagaacagcccgccctgaacgacagccggtactgcctgagcagcagactgagagtgtccgccaccttctggcagaacccccggaaccacttcagatgccaggtgcagttctacggcctgagcgagaacgacgagtggacccaggacagagccaagcccgtgacccagatcgtgtctgccgaagcctggggcagagccgattgcggctttaccagcgagagctaccagcagggcgtgctgagcgccaccatcctgtacgagatcctgctgggcaaggccaccctgtacgccgtgctggtgtctgccctggtgctgatggctatggtcaagcggaaggacagccgggga

SEQ ID NO: 2663 - DNA, 2682 bp, Artificial Sequence
  Synthetic Polynucloetide
atggccttaccagtgaccgccttgctcctgccgctggccttgctgctccacgccgccaggccggaagtgcagctggttgaatctggcggaggactggttcagcctggcggatctctgagactgtcttgtgccgccagcggcttcagcttcagcgacttttggatgagctgggtccgacaggcccctggcaaaggacttgaatgggtcgccacaatcagccaggccggcagcgagaaggactacgtggactctgtgaagggcagattcaccatcagccgggacaacgccaagaagtccctgtacctccagatgaacagcctgagagccgaggacaccgccgtgtactattgtgcctctggcgtgtacagcttcgactacagaggccagggcaccctggtcacagtctcttctggtaccggcggaggcggatctggcggcggaggtagcggtggcggaggatctgaattcgacatccagatgacacagagccctagcagcctgtctgccagcgtgggagacagagtgaccatcacctgtagagccagcgagaacatctacagcaacctggcctggtatcagcagaagcctggcaaggcccctaagctgctgatctacgccgccaccaatctggctgatggcgtgccaagcagattttccggctctggcagcggcaccgatttcaccctgacaatatccagcctccagcctgaggacttcgccacctactactgccagcacttttggggcacccctacattcggccagggcaccaaggtggaaatcaagagaacagttctcgagatccagaaccctgatcctgccgtgtaccagctgcgggatagcaagagcagcgacaagagcgtgtgtctgttcaccgacttcgacagccagaccaacgtgtcccagagcaaggactccgacgtgtacatcaccgataagtgcgtgctggacatgcggagcatggacttcaagagcaactccgccgtggcctggtccaacaagtccgatttcgcctgcgccaacgccttcaacaacagcattatccccgaggacacattcttcccaagccccgagagcagctgcgacgtgaagctggtggaaaagagcttcgagacagacaccaacctgaacttccagaacctgagcgtgatcggcttcagaatcctgctgctgaaagtggccggctttaacctgctgatgaccctgcggctgtggtccagccgcgccaagagaagcggatctggcgtgaagcagaccctgaatttcgacctgctgaagctggctggcgacgtggaatccaacccaggccctactagtatggactggatttggcgcatccttttccttgtcggcgctgctaccggcgcgcattccgggccccagctccagctgcaagagtctggacctggcctggtcaagcctagcgagacactgagcctgacctgtaccgtgtccggcgatagcatcagcagcggcgattactactggggctggatcagacagcctcctggcaaaggactggaatggatcggccacatctactacagcggcgtgacctactacaaccccagcctgaagtccagagtgaccatcagcgtggacaccagccggaaccagttctccctgaagctgtctagcgtgacagccgccgataccgccgtgtactactgcaccagagaggacagcagcaactggcggagtagaggccagggaacactggtcacagttagctctggatccggcggaggcggaagtggaggcggaggatctggcggcggaggctctttcgaagaagtgcagctggttgaatcaggtggcggcctggttcaacctggcggatctctgagactgagctgtgccgcctctggcttcagcctgacaaattacggcgtgcactgggtccgacaggcccctggaaaaggactggaatgggtgtccgtgatttggagcggcggcagcaccgattacaacgccgccttcatcagccggttcaccatcagcgccgacaccagcaagaataccgcctacctccagatgaactccctgagagccgaggacaccgccgtgtactattgcgccagagaactgatccacgctatggacaactggggccagggaaccctggtcacagtctcttctacgcgtgaggacctgaagaacgtgttcccacctgaggtggccgtgttcgagcctagcgaggccgagatcagccacacccagaaagccaccctcgtgtgcctggctaccggcttctaccccgaccatgtggaactgtcttggtgggtcaacggcaaagaggtgcacagcggcgtgtgtaccgacccccagccactgaaagaacagcccgccctgaacgacagccggtactgcctgagcagcagactgagagtgtccgccaccttctggcagaacccccggaaccacttcagatgccaggtgcagttctacggcctgagcgagaacgacgagtggacccaggacagagccaagcccgtgacccagatcgtgtctgccgaagcctggggcagagccgattgcggctttaccagcgagagctaccagcagggcgtgctgagcgccaccatcctgtacgagatcctgctgggcaaggccaccctgtacgccgtgctggtgtctgccctggtgctgatggctatggtcaagcggaaggacagccgggga

SEQ ID NO: 2664 - DNA, 2703 bp, Artificial Sequence
  Synthetic Polynucloetide
atggccttaccagtgaccgccttgctcctgccgctggccttgctgctccacgccgccaggccggaagtgcagctggttgaatctggcggaggactggttcagcctggcggatctctgagactgtcttgtgccgccagcggcttcagcttcagcgacttttggatgagctgggtccgacaggcccctggcaaaggacttgaatgggtcgccacaatcagccaggccggcagcgagaaggactacgtggactctgtgaagggcagattcaccatcagccgggacaacgccaagaagtccctgtacctccagatgaacagcctgagagccgaggacaccgccgtgtactattgtgcctctggcgtgtacagcttcgactacagaggccagggcaccctggtcacagtctcttctggtaccggcggaggcggatctggcggcggaggtagcggtggcggaggatctgaattcgacttcgtgatgacacagagccctctgagcctgcctgtgacacctggcgaacctgccagcatcagctgtagaagcagccagagcatcgtgcacagcaacggcaacacctacctggaatggtatctccagaagcctggacagagcccacagctgctgatctacaaggtgtccaacagattcagcggcgtgcccgacagattttctggcagcggctctggcaccgacttcaccctgaagattagcagagtggaagccgaggacgtgggcgtgtactactgcttccaaggctctcacgtgcccctgacctttggacagggcaccaagctggaaatcaagagactcgagatccagaaccctgatcctgccgtgtaccagctgcgggatagcaagagcagcgacaagagcgtgtgtctgttcaccgacttcgacagccagaccaacgtgtcccagagcaaggactccgacgtgtacatcaccgataagtgcgtgctggacatgcggagcatggacttcaagagcaactccgccgtggcctggtccaacaagtccgatttcgcctgcgccaacgccttcaacaacagcattatccccgaggacacattcttcccaagccccgagagcagctgcgacgtgaagctggtggaaaagagcttcgagacagacaccaacctgaacttccagaacctgagcgtgatcggcttcagaatcctgctgctgaaagtggccggctttaacctgctgatgaccctgcggctgtggtccagccgcgccaagagaagcggatctggcgtgaagcagaccctgaatttcgacctgctgaagctggctggcgacgtggaatccaacccaggccctactagtatggactggatttggcgcatccttttccttgtcggcgctgctaccggcgcgcattccgggccccagctccagctgcaagagtctggacctggcctggtcaagcctagcgagacactgagcctgacctgtaccgtgtccggcgatagcatcagcagcggcgattactactggggctggatcagacagcctcctggcaaaggactggaatggatcggccacatctactacagcggcgtgacctactacaaccccagcctgaagtccagagtgaccatcagcgtggacaccagccggaaccagttctccctgaagctgtctagcgtgacagccgccgataccgccgtgtactactgcaccagagaggacagcagcaactggcggagtagaggccagggaacactggtcacagttagctctggatccggcggaggcggaagtggaggcggaggatctggcggcggaggctctttcgaagaagtgcagctggttgaaagcggagccgaagtgaagaaacctggggcctctgtgaaggtgtcctgcaaggccagcggctacacctttaccagctactggattcactgggtccgacaggcccctggacaaggacttgagtggatgggcgagaacgacccctccaacggcaggaccaactacaacgagaagttcaagaaccgcgtgaccctgaccgtggacaccagcatctctaccgcctacatggaactgagccggctgagatccgatgacaccgccgtgtactattgcgccagaggacccaactacttttacagcatggactactggggccagggcacaatggtcaccgttagctctacgcgtgaggacctgaagaacgtgttcccacctgaggtggccgtgttcgagcctagcgaggccgagatcagccacacccagaaagccaccctcgtgtgcctggctaccggcttctaccccgaccatgtggaactgtcttggtgggtcaacggcaaagaggtgcacagcggcgtgtgtaccgacccccagccactgaaagaacagcccgccctgaacgacagccggtactgcctgagcagcagactgagagtgtccgccaccttctggcagaacccccggaaccacttcagatgccaggtgcagttctacggcctgagcgagaacgacgagtggacccaggacagagccaagcccgtgacccagatcgtgtctgccgaagcctggggcagagccgattgcggctttaccagcgagagctaccagcagggcgtgctgagcgccaccatcctgtacgagatcctgctgggcaaggccaccctgtacgccgtgctggtgtctgccctggtgctgatggctatggtcaagcggaaggacagccgggga

SEQ ID NO: 2665 - DNA, 2682 bp, Artificial Sequence
  Synthetic Polynucloetide
atggccttaccagtgaccgccttgctcctgccgctggccttgctgctccacgccgccaggccggaagtgcagctggttgaatctggcggaggactggttcagcctggcggatctctgagactgtcttgtgccgccagcggcttcagcttcagcgacttttggatgagctgggtccgacaggcccctggcaaaggacttgaatgggtcgccacaatcagccaggccggcagcgagaaggactacgtggactctgtgaagggcagattcaccatcagccgggacaacgccaagaagtccctgtacctccagatgaacagcctgagagccgaggacaccgccgtgtactattgtgcctctggcgtgtacagcttcgactacagaggccagggcaccctggtcacagtctcttctggtaccggcggaggcggatctggcggcggaggtagcggtggcggaggatctgaattcgacatccagctgactcagagccctagctttctgagcgccagcgtgggcgacagagtgaccatcacatgtagcgccagatccagcatcagcttcatgtactggtatcagcagaagcccggcaaggcccctaagctgctgatctacgacaccagcaatctggcctctggcgtgcccagcagattttctggaagcggcagcggcaccgagttcaccctgacaatctctagcctggaagccgaggatgccgccacctactattgccagcagtggtccagctatcccctgacatttggacagggcaccaagctggaaatcaaactcgagatccagaaccctgatcctgccgtgtaccagctgcgggatagcaagagcagcgacaagagcgtgtgtctgttcaccgacttcgacagccagaccaacgtgtcccagagcaaggactccgacgtgtacatcaccgataagtgcgtgctggacatgcggagcatggacttcaagagcaactccgccgtggcctggtccaacaagtccgatttcgcctgcgccaacgccttcaacaacagcattatccccgaggacacattcttcccaagccccgagagcagctgcgacgtgaagctggtggaaaagagcttcgagacagacaccaacctgaacttccagaacctgagcgtgatcggcttcagaatcctgctgctgaaagtggccggctttaacctgctgatgaccctgcggctgtggtccagccgcgccaagagaagcggatctggcgtgaagcagaccctgaatttcgacctgctgaagctggctggcgacgtggaatccaacccaggccctactagtatggactggatttggcgcatccttttccttgtcggcgctgctaccggcgcgcattccgggccccagctccagctgcaagagtctggacctggcctggtcaagcctagcgagacactgagcctgacctgtaccgtgtccggcgatagcatcagcagcggcgattactactggggctggatcagacagcctcctggcaaaggactggaatggatcggccacatctactacagcggcgtgacctactacaaccccagcctgaagtccagagtgaccatcagcgtggacaccagccggaaccagttctccctgaagctgtctagcgtgacagccgccgataccgccgtgtactactgcaccagagaggacagcagcaactggcggagtagaggccagggaacactggtcacagttagctctggatccggcggaggcggaagtggaggcggaggatctggcggcggaggctctttcgaacaggttcagctggttcagtctggggccgaagtgaagaaacctggggcctctgtgaaggtgtcctgcaaggcttccggctacacctttaccggctcttggatgaactgggtccgacaggctcctggacagggactcgaatggatcggcagaatctatcctggcgacggcgagacaaactacaacggcaagttcaaggaccgcgtgacaatcaccgccgacaagagcacaagcaccgcctacatggaactgagcagcctgcggagcgaagataccgccgtgtactactgcgcccggatctacggcaacaacgtgtacttcgatgtgtggggccagggcacaaccgtgacagtctcttctacgcgtgaggacctgaagaacgtgttcccacctgaggtggccgtgttcgagcctagcgaggccgagatcagccacacccagaaagccaccctcgtgtgcctggctaccggcttctaccccgaccatgtggaactgtcttggtgggtcaacggcaaagaggtgcacagcggcgtgtgtaccgacccccagccactgaaagaacagcccgccctgaacgacagccggtactgcctgagcagcagactgagagtgtccgccaccttctggcagaacccccggaaccacttcagatgccaggtgcagttctacggcctgagcgagaacgacgagtggacccaggacagagccaagcccgtgacccagatcgtgtctgccgaagcctggggcagagccgattgcggctttaccagcgagagctaccagcagggcgtgctgagcgccaccatcctgtacgagatcctgctgggcaaggccaccctgtacgccgtgctggtgtctgccctggtgctgatggctatggtcaagcggaaggacagccgggga

SEQ ID NO: 2666 - DNA, 2706 bp, Artificial Sequence
  Synthetic Polynucloetide
atggccttaccagtgaccgccttgctcctgccgctggccttgctgctccacgccgccaggccggaagtgcagctggttgaatctggcggaggactggttcagcctggcggatctctgagactgtcttgtgccgccagcggcttcagcttcagcgacttttggatgagctgggtccgacaggcccctggcaaaggacttgaatgggtcgccacaatcagccaggccggcagcgagaaggactacgtggactctgtgaagggcagattcaccatcagccgggacaacgccaagaagtccctgtacctccagatgaacagcctgagagccgaggacaccgccgtgtactattgtgcctctggcgtgtacagcttcgactacagaggccagggcaccctggtcacagtctcttctggtaccggcggaggcggatctggcggcggaggtagcggtggcggaggatctgaattccagctggtgctgacacagtctccaagcgcctctgccagcctgggatctagcgtgaagctgacctgtacactgagcagcggccacaagaccgacaccatcgactggtatcagcagcagcctggcaaggcccctagatacctgatgaagctggaaggcagcggcagctacaacaaaggctctggcgtgcccgatagattcagcggcagttcttctggcgctgattggtatctgaccatcagcagcctccagagcgaggacgaggccgattactactgcggcacagactaccccggcaactacctgtttggcggcggaacacagctgacagtgcttggcctcgagatccagaaccctgatcctgccgtgtaccagctgcgggatagcaagagcagcgacaagagcgtgtgtctgttcaccgacttcgacagccagaccaacgtgtcccagagcaaggactccgacgtgtacatcaccgataagtgcgtgctggacatgcggagcatggacttcaagagcaactccgccgtggcctggtccaacaagtccgatttcgcctgcgccaacgccttcaacaacagcattatccccgaggacacattcttcccaagccccgagagcagctgcgacgtgaagctggtggaaaagagcttcgagacagacaccaacctgaacttccagaacctgagcgtgatcggcttcagaatcctgctgctgaaagtggccggctttaacctgctgatgaccctgcggctgtggtccagccgcgccaagagaagcggatctggcgtgaagcagaccctgaatttcgacctgctgaagctggctggcgacgtggaatccaacccaggccctactagtatggactggatttggcgcatccttttccttgtcggcgctgctaccggcgcgcattccgggccccagctccagctgcaagagtctggacctggcctggtcaagcctagcgagacactgagcctgacctgtaccgtgtccggcgatagcatcagcagcggcgattactactggggctggatcagacagcctcctggcaaaggactggaatggatcggccacatctactacagcggcgtgacctactacaaccccagcctgaagtccagagtgaccatcagcgtggacaccagccggaaccagttctccctgaagctgtctagcgtgacagccgccgataccgccgtgtactactgcaccagagaggacagcagcaactggcggagtagaggccagggaacactggtcacagttagctctggatccggcggaggcggaagtggaggcggaggatctggcggcggaggctctttcgaacaagaacagctggttgaaagcggcggaggactggttcaacctggcggttctctgagactgagctgtgccgccagcggcttcaccttcagcgactactacatgagctggatcagacaggccccaggcaaaggactggaatgggtcgccacaatctaccccagcagcggcaagacctactacgccgattctgccaagggcagactgaccatctccagcgacaacgccaaggacagcctgtacctccagatgaacagcctgagagccgaggacaccgccgtgtactactgcaccagagatagctacgccgacgacgccgctctgtttgacatttggggccagggcaccaccgtgaccgtttcttctacgcgtgaggacctgaagaacgtgttcccacctgaggtggccgtgttcgagcctagcgaggccgagatcagccacacccagaaagccaccctcgtgtgcctggctaccggcttctaccccgaccatgtggaactgtcttggtgggtcaacggcaaagaggtgcacagcggcgtgtgtaccgacccccagccactgaaagaacagcccgccctgaacgacagccggtactgcctgagcagcagactgagagtgtccgccaccttctggcagaacccccggaaccacttcagatgccaggtgcagttctacggcctgagcgagaacgacgagtggacccaggacagagccaagcccgtgacccagatcgtgtctgccgaagcctggggcagagccgattgcggctttaccagcgagagctaccagcagggcgtgctgagcgccaccatcctgtacgagatcctgctgggcaaggccaccctgtacgccgtgctggtgtctgccctggtgctgatggctatggtcaagcggaaggacagccgggga

SEQ ID NO: 2667 - DNA, 2696 bp, Artificial Sequence
  Synthetic Polynucloetide
atggccttaccagtgaccgccttgctcctgccgctggccttgctgctccacgccgccaggccggaagtgcagctggttgaatctggcggaggactggttcagcctggcggatctctgagactgtcttgtgccgccagcggcttcagcttcagcgacttttggatgagctgggtccgacaggcccctggcaaaggacttgaatgggtcgccacaatcagccaggccggcagcgagaaggactacgtggactctgtgaagggcagattcaccatcagccgggacaacgccaagaagtccctgtacctccagatgaacagcctgagagccgaggacaccgccgtgtactattgtgcctctggcgtgtacagcttcgactacagaggccagggcaccctggtcacagtctcttctggtaccggcggaggcggatctggcggcggaggtagcggtggcggaggatctgaattcgagattgtgttgacacagtctcccgataccctgtcactgtcacccggcgagaaggcaacgctgagttgcagagcaagccagtcagtctcctcttcttttctggcctggtatcagcaaaaaccaggtcaggcaccatctctcctgatttacgttgccagcagacgggcggctggcattcccgacaggttctctggaagcggatctgggaccgattttaccctgacaattagccgcttggagcccgaagactttggtatgttttactgccagcactacggaaggacacctttcacatttggcccgggcacgaaagtcgatataaaacgcgcctcgagatccagaaccctgatcctgccgtgtaccagctgcgggatagcaagagcagcgacaagagcgtgtgtctgttcaccgacttcgacagccagaccaacgtgtcccagagcaaggactccgacgtgtacatcaccgataagtgcgtgctggacatgcggagcatggacttcaagagcaactccgccgtggcctggtccaacaagtccgatttcgcctgcgccaacgccttcaacaacagcattatccccgaggacacattcttcccaagccccgagagcagctgcgacgtgaagctggtggaaaagagcttcgagacagacaccaacctgaacttccagaacctgagcgtgatcggcttcagaatcctgctgctgaaagtggccggctttaacctgctgatgaccctgcggctgtggtccagccgcgccaagagaagcggatctggcgtgaagcagaccctgaatttcgacctgctgaagctggctggcgacgtggaatccaacccaggccctactagtatggactggatttggcgcatccttttccttgtcggcgctgctaccggcgcgcattccgggccccagctccagctgcaagagtctggacctggcctggtcaagcctagcgagacactgagcctgacctgtaccgtgtccggcgatagcatcagcagcggcgattactactggggctggatcagacagcctcctggcaaaggactggaatggatcggccacatctactacagcggcgtgacctactacaaccccagcctgaagtccagagtgaccatcagcgtggacaccagccggaaccagttctccctgaagctgtctagcgtgacagccgccgataccgccgtgtactactgcaccagagaggacagcagcaactggcggagtagaggccagggaacactggtcacagttagctctggatccggcggaggcggaagtggaggcggaggatctggcggcggaggctctttcgaacagatccagttggtggaatcagggggcggtgtggtgcagccgggtaggagcctgagactgtcatgcgtggcgtctggcttcacattcaagaactacggcatgcactgggtgcgacaggcccccggaaagggtttggagtgggtcgccgtgatctggtacgacggatctaatgagtattacggagatcctgtgaagggaaggttcaccatctcccgcgacaatagcaaaaatatgctctacctgcaaatgaactcactcagggcggatgatacggcggtctactattgcgctcgctcagggattgctgtggccggcgcattcgattactggggacagggtaccctggtgacagtatcaagcacgcgtgaggacctgaagaacgtgttcccacctgaggtggccgtgttcgagcctagcgaggccgagatcagccacacccagaaagccaccctcgtgtgcctggctaccggcttctaccccgaccatgtggaactgtcttggtgggtcaacggcaaagaggtgcacagcggcgtgtgtaccgacccccagccactgaaagaacagcccgccctgaacgacagccggtactgcctgagcagcagactgagagtgtccgccaccttctggcagaacccccggaaccacttcagatgccaggtgcagttctacggcctgagcgagaacgacgagtggacccaggacagagccaagcccgtgacccagatcgtgtctgccgaagcctggggcagagccgattgcggctttaccagcgagagctaccagcagggcgtgctgagcgccaccatcctgtacgagatcctgctgggcaaggccaccctgtacgccgtgctggtgtctgccctggtgctgatggctatggtcaagcggaaggacagccgggga

SEQ ID NO: 2668 - DNA, 2712 bp, Artificial Sequence
  Synthetic Polynucloetide
atggccttaccagtgaccgccttgctcctgccgctggccttgctgctccacgccgccaggccggaagtgcagctggttgaatctggcggaggactggttcagcctggcggatctctgagactgtcttgtgccgccagcggcttcagcttcagcgacttttggatgagctgggtccgacaggcccctggcaaaggacttgaatgggtcgccacaatcagccaggccggcagcgagaaggactacgtggactctgtgaagggcagattcaccatcagccgggacaacgccaagaagtccctgtacctccagatgaacagcctgagagccgaggacaccgccgtgtactattgtgcctctggcgtgtacagcttcgactacagaggccagggcaccctggtcacagtctcttctggtaccggcggaggcggatctggcggcggaggtagcggtggcggaggatctgaattcgacattcagatgacccaaagcccgtccagcctgtccgccagcctgggagatagagtgacaatcacgtgtagagcttcccaagggataagaaatgatctcgggtggtatcagcagaagcccggcaaagcccccaaaaggcttatatatgctagtagtacactgcagtctggagttccttcccgattttcaggtagcggctccggtacagagttcaccctcacgataagctcactccagcctgaggatttcgcaacgtactactgcctccagcacaacaattttccctggactttcggccagggcaccaaggtggagatcaagaggctcgagatccagaaccctgatcctgccgtgtaccagctgcgggatagcaagagcagcgacaagagcgtgtgtctgttcaccgacttcgacagccagaccaacgtgtcccagagcaaggactccgacgtgtacatcaccgataagtgcgtgctggacatgcggagcatggacttcaagagcaactccgccgtggcctggtccaacaagtccgatttcgcctgcgccaacgccttcaacaacagcattatccccgaggacacattcttcccaagccccgagagcagctgcgacgtgaagctggtggaaaagagcttcgagacagacaccaacctgaacttccagaacctgagcgtgatcggcttcagaatcctgctgctgaaagtggccggctttaacctgctgatgaccctgcggctgtggtccagccgcgccaagagaagcggatctggcgtgaagcagaccctgaatttcgacctgctgaagctggctggcgacgtggaatccaacccaggccctactagtatggactggatttggcgcatccttttccttgtcggcgctgctaccggcgcgcattccgggccccagctccagctgcaagagtctggacctggcctggtcaagcctagcgagacactgagcctgacctgtaccgtgtccggcgatagcatcagcagcggcgattactactggggctggatcagacagcctcctggcaaaggactggaatggatcggccacatctactacagcggcgtgacctactacaaccccagcctgaagtccagagtgaccatcagcgtggacaccagccggaaccagttctccctgaagctgtctagcgtgacagccgccgataccgccgtgtactactgcaccagagaggacagcagcaactggcggagtagaggccagggaacactggtcacagttagctctggatccggcggaggcggaagtggaggcggaggatctggcggcggaggctctttcgaacaagttactttgaaggagtctggacctgtactggtgaagccaaccgagacactgacactcacgtgtacagtgagtggtttttccttgatcaacgcaaggatgggcgtcagctggatcaggcaaccccctggcaaggctctggaatggctcgctcacatattcagcaatgccgaaaaaagctaccggacaagcctgaaatcccgcctgactatttccaaggacacttctaagtctcaggtggtgctgaccatgaccaacatggacccggtggacaccgccacctattactgcgcaagaatccctgggtatggtgggaatggtgactaccattattatgggatggatgtgtgggggcaaggcacaaccgtaacggtctcaagcacgcgtgaggacctgaagaacgtgttcccacctgaggtggccgtgttcgagcctagcgaggccgagatcagccacacccagaaagccaccctcgtgtgcctggctaccggcttctaccccgaccatgtggaactgtcttggtgggtcaacggcaaagaggtgcacagcggcgtgtgtaccgacccccagccactgaaagaacagcccgccctgaacgacagccggtactgcctgagcagcagactgagagtgtccgccaccttctggcagaacccccggaaccacttcagatgccaggtgcagttctacggcctgagcgagaacgacgagtggacccaggacagagccaagcccgtgacccagatcgtgtctgccgaagcctggggcagagccgattgcggctttaccagcgagagctaccagcagggcgtgctgagcgccaccatcctgtacgagatcctgctgggcaaggccaccctgtacgccgtgctggtgtctgccctggtgctgatggctatggtcaagcggaaggacagccgggga

SEQ ID NO: 2669 - DNA, 2691 bp, Artificial Sequence
  Synthetic Polynucloetide
atggccttaccagtgaccgccttgctcctgccgctggccttgctgctccacgccgccaggccggaagtgcagctggttgaatctggcggaggactggttcagcctggcggatctctgagactgtcttgtgccgccagcggcttcagcttcagcgacttttggatgagctgggtccgacaggcccctggcaaaggacttgaatgggtcgccacaatcagccaggccggcagcgagaaggactacgtggactctgtgaagggcagattcaccatcagccgggacaacgccaagaagtccctgtacctccagatgaacagcctgagagccgaggacaccgccgtgtactattgtgcctctggcgtgtacagcttcgactacagaggccagggcaccctggtcacagtctcttctggtaccggcggaggcggatctggcggcggaggtagcggtggcggaggatctgaattcgacatcgtgctgacacagagccctccaagcctggctatgagcctgggaaagagagccaccatcagctgtagagccagcgagagcgtgacaatcctgggctctcacctgatccactggtatcagcagaagcccggccagcctcctacactgctgattcagctggcctccaatgtgcagacaggcgtgccagccagattttctggcagcggcagcagaaccgacttcaccctgaccattgatcccgtggaagaggacgacgtggccgtgtactactgcctccagagcagaacaatccccagaacctttggcggaggcaccaagctggaaatcaaactcgagatccagaaccctgatcctgccgtgtaccagctgcgggatagcaagagcagcgacaagagcgtgtgtctgttcaccgacttcgacagccagaccaacgtgtcccagagcaaggactccgacgtgtacatcaccgataagtgcgtgctggacatgcggagcatggacttcaagagcaactccgccgtggcctggtccaacaagtccgatttcgcctgcgccaacgccttcaacaacagcattatccccgaggacacattcttcccaagccccgagagcagctgcgacgtgaagctggtggaaaagagcttcgagacagacaccaacctgaacttccagaacctgagcgtgatcggcttcagaatcctgctgctgaaagtggccggctttaacctgctgatgaccctgcggctgtggtccagccgcgccaagagaagcggatctggcgtgaagcagaccctgaatttcgacctgctgaagctggctggcgacgtggaatccaacccaggccctactagtatggactggatttggcgcatccttttccttgtcggcgctgctaccggcgcgcattccgggccccagctccagctgcaagagtctggacctggcctggtcaagcctagcgagacactgagcctgacctgtaccgtgtccggcgatagcatcagcagcggcgattactactggggctggatcagacagcctcctggcaaaggactggaatggatcggccacatctactacagcggcgtgacctactacaaccccagcctgaagtccagagtgaccatcagcgtggacaccagccggaaccagttctccctgaagctgtctagcgtgacagccgccgataccgccgtgtactactgcaccagagaggacagcagcaactggcggagtagaggccagggaacactggtcacagttagctctggatccggcggaggcggaagtggaggcggaggatctggcggcggaggctctttcgaacaaatccagctggtgcagtctggccccgagctgaagaaacctggcgagacagtgaagatcagctgcaaggccagcggctacaccttcaccgactacagcatcaactgggtcaagagagcccctggcaagggcctgaaatggatgggctggatcaacaccgaaaccagagagcccgcctacgcctacgacttcagaggcagattcgccttcagcctggaaaccagcgccagcacagcctacctccagatcaacaacctgaagtacgaggacaccgccacctacttttgcgccctggactacagctacgctatggactattggggccagggcaccagcgtgacagtctcttctacgcgtgaggacctgaagaacgtgttcccacctgaggtggccgtgttcgagcctagcgaggccgagatcagccacacccagaaagccaccctcgtgtgcctggctaccggcttctaccccgaccatgtggaactgtcttggtgggtcaacggcaaagaggtgcacagcggcgtgtgtaccgacccccagccactgaaagaacagcccgccctgaacgacagccggtactgcctgagcagcagactgagagtgtccgccaccttctggcagaacccccggaaccacttcagatgccaggtgcagttctacggcctgagcgagaacgacgagtggacccaggacagagccaagcccgtgacccagatcgtgtctgccgaagcctggggcagagccgattgcggctttaccagcgagagctaccagcagggcgtgctgagcgccaccatcctgtacgagatcctgctgggcaaggccaccctgtacgccgtgctggtgtctgccctggtgctgatggctatggtcaagcggaaggacagccgggga

SEQ ID NO: 2670 - DNA, 2697 bp, Artificial Sequence
  Synthetic Polynucloetide
atggccttaccagtgaccgccttgctcctgccgctggccttgctgctccacgccgccaggccggaagtgcagctggttgaatctggcggaggactggttcagcctggcggatctctgagactgtcttgtgccgccagcggcttcagcttcagcgacttttggatgagctgggtccgacaggcccctggcaaaggacttgaatgggtcgccacaatcagccaggccggcagcgagaaggactacgtggactctgtgaagggcagattcaccatcagccgggacaacgccaagaagtccctgtacctccagatgaacagcctgagagccgaggacaccgccgtgtactattgtgcctctggcgtgtacagcttcgactacagaggccagggcaccctggtcacagtctcttctggtaccggcggaggcggatctggcggcggaggtagcggtggcggaggatctgaattcgatattcaactgacacaatcccccagctcactcagcgccagcgtgggggacagggttagctttacctgtcaagcctctcaggatataaataactttctgaactggtatcaacagaagcctgggaaggcgcccaaactcctgatctatgatgcgtccaacctggaaactggcgtgccttcacgctttagcggctctggcagtggtacagacttcacttttaccatctcttcacttcagccggaggacatcgccacatattactgtcaacagtacggaaacttgccctttacttttggaggcggcaccaaagttgaaatcaaaagactcgagatccagaaccctgatcctgccgtgtaccagctgcgggatagcaagagcagcgacaagagcgtgtgtctgttcaccgacttcgacagccagaccaacgtgtcccagagcaaggactccgacgtgtacatcaccgataagtgcgtgctggacatgcggagcatggacttcaagagcaactccgccgtggcctggtccaacaagtccgatttcgcctgcgccaacgccttcaacaacagcattatccccgaggacacattcttcccaagccccgagagcagctgcgacgtgaagctggtggaaaagagcttcgagacagacaccaacctgaacttccagaacctgagcgtgatcggcttcagaatcctgctgctgaaagtggccggctttaacctgctgatgaccctgcggctgtggtccagccgcgccaagagaagcggatctggcgtgaagcagaccctgaatttcgacctgctgaagctggctggcgacgtggaatccaacccaggccctactagtatggactggatttggcgcatccttttccttgtcggcgctgctaccggcgcgcattccgggccccagctccagctgcaagagtctggacctggcctggtcaagcctagcgagacactgagcctgacctgtaccgtgtccggcgatagcatcagcagcggcgattactactggggctggatcagacagcctcctggcaaaggactggaatggatcggccacatctactacagcggcgtgacctactacaaccccagcctgaagtccagagtgaccatcagcgtggacaccagccggaaccagttctccctgaagctgtctagcgtgacagccgccgataccgccgtgtactactgcaccagagaggacagcagcaactggcggagtagaggccagggaacactggtcacagttagctctggatccggcggaggcggaagtggaggcggaggatctggcggcggaggctctttcgaacaggtccaactgcaagaaagcggacccggactggtgaagccttctgagacacttagtctgacgtgcacggtcagtggcggctccatctcctcctattattggtcatggatacgacaacccccaggtaagggcctggaatggattggctatatctactattcaggaagcacgaactacaatcccagcctgaagtcccgagtgacaatttcagtagataccagtaaaaaccagttcagtcttaaactgtcaagcgtgacagctgccgacaccgctgtgtattactgcgtctcactggtgtattgtggaggggattgttatagcgggttcgattattggggacagggaaccctggtgactgtatcttccacgcgtgaggacctgaagaacgtgttcccacctgaggtggccgtgttcgagcctagcgaggccgagatcagccacacccagaaagccaccctcgtgtgcctggctaccggcttctaccccgaccatgtggaactgtcttggtgggtcaacggcaaagaggtgcacagcggcgtgtgtaccgacccccagccactgaaagaacagcccgccctgaacgacagccggtactgcctgagcagcagactgagagtgtccgccaccttctggcagaacccccggaaccacttcagatgccaggtgcagttctacggcctgagcgagaacgacgagtggacccaggacagagccaagcccgtgacccagatcgtgtctgccgaagcctggggcagagccgattgcggctttaccagcgagagctaccagcagggcgtgctgagcgccaccatcctgtacgagatcctgctgggcaaggccaccctgtacgccgtgctggtgtctgccctggtgctgatggctatggtcaagcggaaggacagccgggga

SEQ ID NO: 2671 - DNA, 2703 bp, Artificial Sequence
  Synthetic Polynucloetide
atggccttaccagtgaccgccttgctcctgccgctggccttgctgctccacgccgccaggccggaagtgcagctggttgaatctggcggaggactggttcagcctggcggatctctgagactgtcttgtgccgccagcggcttcagcttcagcgacttttggatgagctgggtccgacaggcccctggcaaaggacttgaatgggtcgccacaatcagccaggccggcagcgagaaggactacgtggactctgtgaagggcagattcaccatcagccgggacaacgccaagaagtccctgtacctccagatgaacagcctgagagccgaggacaccgccgtgtactattgtgcctctggcgtgtacagcttcgactacagaggccagggcaccctggtcacagtctcttctggtaccggcggaggcggatctggcggcggaggtagcggtggcggaggatctgaattcgatatccagctcactcaaagcccctctagtctctctgcctcagtgggggatcgggtcagttttacttgtcaagcttcacaggatatcaacaacttccttaattggtatcagcagaagccaggaaaagcacccaagctgctcatctatgatgcctcaaatttggagacgggtgttcccagtcgattctctgggtcagggtccgggaccgactttacgtttacgatctcctctctgcagcccgaagacatcgccacatactattgtcaacagtacggcaacttgcctttcacatttgggggcgggactaaggttgaaatcaagaggctcgagatccagaaccctgatcctgccgtgtaccagctgcgggatagcaagagcagcgacaagagcgtgtgtctgttcaccgacttcgacagccagaccaacgtgtcccagagcaaggactccgacgtgtacatcaccgataagtgcgtgctggacatgcggagcatggacttcaagagcaactccgccgtggcctggtccaacaagtccgatttcgcctgcgccaacgccttcaacaacagcattatccccgaggacacattcttcccaagccccgagagcagctgcgacgtgaagctggtggaaaagagcttcgagacagacaccaacctgaacttccagaacctgagcgtgatcggcttcagaatcctgctgctgaaagtggccggctttaacctgctgatgaccctgcggctgtggtccagccgcgccaagagaagcggatctggcgtgaagcagaccctgaatttcgacctgctgaagctggctggcgacgtggaatccaacccaggccctactagtatggactggatttggcgcatccttttccttgtcggcgctgctaccggcgcgcattccgggccccagctccagctgcaagagtctggacctggcctggtcaagcctagcgagacactgagcctgacctgtaccgtgtccggcgatagcatcagcagcggcgattactactggggctggatcagacagcctcctggcaaaggactggaatggatcggccacatctactacagcggcgtgacctactacaaccccagcctgaagtccagagtgaccatcagcgtggacaccagccggaaccagttctccctgaagctgtctagcgtgacagccgccgataccgccgtgtactactgcaccagagaggacagcagcaactggcggagtagaggccagggaacactggtcacagttagctctggatccggcggaggcggaagtggaggcggaggatctggcggcggaggctctttcgaacaggtacagctgcaggaatctgggcccggacttgtcaagccaagtcagacactttctcttacatgtaccgtgagcggcggaagtataagcagtggaggcttttactggtcttggatacggcagcacccaggcaaaggcttggagtggattggatacattcatcattcaggatctacacactataatccatcccttaagtcccgggtcaccattagcattgatacgtctaagaatctgttcagtctcaggctgtcctccgtcactgctgccgacacagccgtgtactactgcgcctccttggtttactgcggaggcgactgttatagcggctttgattattgggggcaggggaccctcgtaaccgtgagctctacgcgtgaggacctgaagaacgtgttcccacctgaggtggccgtgttcgagcctagcgaggccgagatcagccacacccagaaagccaccctcgtgtgcctggctaccggcttctaccccgaccatgtggaactgtcttggtgggtcaacggcaaagaggtgcacagcggcgtgtgtaccgacccccagccactgaaagaacagcccgccctgaacgacagccggtactgcctgagcagcagactgagagtgtccgccaccttctggcagaacccccggaaccacttcagatgccaggtgcagttctacggcctgagcgagaacgacgagtggacccaggacagagccaagcccgtgacccagatcgtgtctgccgaagcctggggcagagccgattgcggctttaccagcgagagctaccagcagggcgtgctgagcgccaccatcctgtacgagatcctgctgggcaaggccaccctgtacgccgtgctggtgtctgccctggtgctgatggctatggtcaagcggaaggacagccgggga

SEQ ID NO: 2672 - DNA, 2691 bp, Artificial Sequence
  Synthetic Polynucloetide
atggccttaccagtgaccgccttgctcctgccgctggccttgctgctccacgccgccaggccggaagtgcagctggttgaatctggcggaggactggttcagcctggcggatctctgagactgtcttgtgccgccagcggcttcagcttcagcgacttttggatgagctgggtccgacaggcccctggcaaaggacttgaatgggtcgccacaatcagccaggccggcagcgagaaggactacgtggactctgtgaagggcagattcaccatcagccgggacaacgccaagaagtccctgtacctccagatgaacagcctgagagccgaggacaccgccgtgtactattgtgcctctggcgtgtacagcttcgactacagaggccagggcaccctggtcacagtctcttctggtaccggcggaggcggatctggcggcggaggtagcggtggcggaggatctgaattcgacattcagatgacacagagccctagcagcctgagcgcctctgtgggagacagagtgaccatcacatgcaagagcagccagagcgtgctgtactccagcaatcagaagaactacctggcctggttccagcagaagcctggcaaggctcctaagctgctgatctactgggccagcaccagagaaagcggcgtgccaagcagattttctggcagcggctctggcaccgacttcaccctgacaatatccagcctccagcctgaggacttcgccacctacttttgccaccagtacctgagcagctacacattcggacagggcaccaaggtggaaatcaagcggctcgagatccagaaccctgatcctgccgtgtaccagctgcgggatagcaagagcagcgacaagagcgtgtgtctgttcaccgacttcgacagccagaccaacgtgtcccagagcaaggactccgacgtgtacatcaccgataagtgcgtgctggacatgcggagcatggacttcaagagcaactccgccgtggcctggtccaacaagtccgatttcgcctgcgccaacgccttcaacaacagcattatccccgaggacacattcttcccaagccccgagagcagctgcgacgtgaagctggtggaaaagagcttcgagacagacaccaacctgaacttccagaacctgagcgtgatcggcttcagaatcctgctgctgaaagtggccggctttaacctgctgatgaccctgcggctgtggtccagccgcgccaagagaagcggatctggcgtgaagcagaccctgaatttcgacctgctgaagctggctggcgacgtggaatccaacccaggccctactagtatggactggatttggcgcatccttttccttgtcggcgctgctaccggcgcgcattccgggccccagctccagctgcaagagtctggacctggcctggtcaagcctagcgagacactgagcctgacctgtaccgtgtccggcgatagcatcagcagcggcgattactactggggctggatcagacagcctcctggcaaaggactggaatggatcggccacatctactacagcggcgtgacctactacaaccccagcctgaagtccagagtgaccatcagcgtggacaccagccggaaccagttctccctgaagctgtctagcgtgacagccgccgataccgccgtgtactactgcaccagagaggacagcagcaactggcggagtagaggccagggaacactggtcacagttagctctggatccggcggaggcggaagtggaggcggaggatctggcggcggaggctctttcgaagaggtgcagctggttgaatctggcggaggactggttcagcctggcggatctctgagactgtcttgtgccgccagcggctacaccttcaccacctattggatgcactgggtccgacaggcccctggcaaaggacttgagtgggtcggatatatcaggcccagcaccggctacacagagtacaaccagaagttcaaggaccgcttcaccatcagcgccgacaccagcaagaataccgcctacctccagatgaacagcctgagagccgaggacaccgccgtgtactactgtgccagatccagatggctgctggactattggggccagggcacactggttacagtttctacgcgtgaggacctgaagaacgtgttcccacctgaggtggccgtgttcgagcctagcgaggccgagatcagccacacccagaaagccaccctcgtgtgcctggctaccggcttctaccccgaccatgtggaactgtcttggtgggtcaacggcaaagaggtgcacagcggcgtgtgtaccgacccccagccactgaaagaacagcccgccctgaacgacagccggtactgcctgagcagcagactgagagtgtccgccaccttctggcagaacccccggaaccacttcagatgccaggtgcagttctacggcctgagcgagaacgacgagtggacccaggacagagccaagcccgtgacccagatcgtgtctgccgaagcctggggcagagccgattgcggctttaccagcgagagctaccagcagggcgtgctgagcgccaccatcctgtacgagatcctgctgggcaaggccaccctgtacgccgtgctggtgtctgccctggtgctgatggctatggtcaagcggaaggacagccgggga

SEQ ID NO: 2673 - DNA, 2682 bp, Artificial Sequence
  Synthetic Polynucloetide
atggccttaccagtgaccgccttgctcctgccgctggccttgctgctccacgccgccaggccggaagtgcagctggttgaatctggcggaggactggttcagcctggcggatctctgagactgtcttgtgccgccagcggcttcagcttcagcgacttttggatgagctgggtccgacaggcccctggcaaaggacttgaatgggtcgccacaatcagccaggccggcagcgagaaggactacgtggactctgtgaagggcagattcaccatcagccgggacaacgccaagaagtccctgtacctccagatgaacagcctgagagccgaggacaccgccgtgtactattgtgcctctggcgtgtacagcttcgactacagaggccagggcaccctggtcacagtctcttctggtaccggcggaggcggatctggcggcggaggtagcggtggcggaggatctgaattcgacatccagatgacacagagccctagcagcctgtctgccagcgtgggagacagagtgaccatcacctgtagagccagccaggacatcagcaactacctgaactggtatcagcagaagcccggcaaggcccctaagctgctgatctactacaccagcagactgcacagcggcgtgcccagcagattttctggctctggcagcggcaccgacttcaccctgacaatatctagcctccagcctgaggacttcgccacctactattgccagcagggcaacaccctgccttacacatttggacagggcaccaaggtggaaatcaagagactcgagatccagaaccctgatcctgccgtgtaccagctgcgggatagcaagagcagcgacaagagcgtgtgtctgttcaccgacttcgacagccagaccaacgtgtcccagagcaaggactccgacgtgtacatcaccgataagtgcgtgctggacatgcggagcatggacttcaagagcaactccgccgtggcctggtccaacaagtccgatttcgcctgcgccaacgccttcaacaacagcattatccccgaggacacattcttcccaagccccgagagcagctgcgacgtgaagctggtggaaaagagcttcgagacagacaccaacctgaacttccagaacctgagcgtgatcggcttcagaatcctgctgctgaaagtggccggctttaacctgctgatgaccctgcggctgtggtccagccgcgccaagagaagcggatctggcgtgaagcagaccctgaatttcgacctgctgaagctggctggcgacgtggaatccaacccaggccctactagtatggactggatttggcgcatccttttccttgtcggcgctgctaccggcgcgcattccgggccccagctccagctgcaagagtctggacctggcctggtcaagcctagcgagacactgagcctgacctgtaccgtgtccggcgatagcatcagcagcggcgattactactggggctggatcagacagcctcctggcaaaggactggaatggatcggccacatctactacagcggcgtgacctactacaaccccagcctgaagtccagagtgaccatcagcgtggacaccagccggaaccagttctccctgaagctgtctagcgtgacagccgccgataccgccgtgtactactgcaccagagaggacagcagcaactggcggagtagaggccagggaacactggtcacagttagctctggatccggcggaggcggaagtggaggcggaggatctggcggcggaggctctttcgaagaagtgcagctggttgaatcaggtggcggcctggttcaacctggcggatctctgagactgagctgtgccgccagcggcttcaccttcagcgactactttatgagctgggtccgacaggcccctggcaaaggacttgaatgggtcgccaccatcagcaatggcggcacctacacttactaccccgacagcgtgaagggcagattcaccatctccagagacaacagcaagaacaccctgtacctccagatgaactccctgagagccgaggacaccgccgtgtactactgcgccagattcgacggctacatcttcgactattggggccagggcaccctggtcacagtctcttctacgcgtgaggacctgaagaacgtgttcccacctgaggtggccgtgttcgagcctagcgaggccgagatcagccacacccagaaagccaccctcgtgtgcctggctaccggcttctaccccgaccatgtggaactgtcttggtgggtcaacggcaaagaggtgcacagcggcgtgtgtaccgacccccagccactgaaagaacagcccgccctgaacgacagccggtactgcctgagcagcagactgagagtgtccgccaccttctggcagaacccccggaaccacttcagatgccaggtgcagttctacggcctgagcgagaacgacgagtggacccaggacagagccaagcccgtgacccagatcgtgtctgccgaagcctggggcagagccgattgcggctttaccagcgagagctaccagcagggcgtgctgagcgccaccatcctgtacgagatcctgctgggcaaggccaccctgtacgccgtgctggtgtctgccctggtgctgatggctatggtcaagcggaaggacagccgggga

SEQ ID NO: 2674 - DNA, 3261 bp, Artificial Sequence
  Synthetic Polynucloetide
atggccttaccagtgaccgccttgctcctgccgctggccttgctgctccacgccgccaggccggaagtgcagctggttgaatctggcggaggactggttcagcctggcggatctctgagactgtcttgtgccgccagcggcttcagcttcagcgacttttggatgagctgggtccgacaggcccctggcaaaggacttgaatgggtcgccacaatcagccaggccggcagcgagaaggactacgtggactctgtgaagggcagattcaccatcagccgggacaacgccaagaagtccctgtacctccagatgaacagcctgagagccgaggacaccgccgtgtactattgtgcctctggcgtgtacagcttcgactacagaggccagggcaccctggtcacagtctcttctggtaccggcggaggcggatctggcggcggaggtagcggtggcggaggatctgaattcgacatccagatgacacagactacatcctccctgtctgcctctctgggagacagagtcaccatcagttgcagggcaagtcaggacattagtaagtacctgaactggtatcagcagaaaccagatggaactgttaaactcctgatctaccatacatcaagattacactcaggagtcccatcaaggttcagtggcagtgggtctggaacagattattctctcaccattagcaacctggagcaagaagatattgccacttacttttgccaacagggtaatacgcttccgtacacgttcggaggggggaccaagctggagatcacactcgaggacctgaagaacgtgttcccacctgaggtggccgtgttcgagcctagcgaggccgagatcagccacacccagaaagccaccctcgtgtgcctggctaccggcttctaccccgaccatgtggaactgtcttggtgggtcaacggcaaagaggtgcacagcggcgtgtctaccgacccccagccactgaaagaacagcccgccctgaacgacagccggtactgcctgagcagcagactgagagtgtccgccaccttctggcagaacccccggaaccacttcagatgccaggtgcagttctacggcctgagcgagaacgacgagtggacccaggacagagccaagcccgtgacccagatcgtgtctgccgaagcctggggcagagccgattgcggatcccagagcttcggcctgctggaccccaagctgtgctacctgctggatggcatcctgttcatctacggcgtgatcctgaccgccctgttcctgagagtgaagttcagcagaagcgccgacgcccctgcctaccagcagggacagaaccaactgtacaacgagctgaacctgggcagacgggaagagtacgacgtgctggacaagcggagaggcagggaccctgagatgggcggaaagccccagcggagaaagaacccccaggaaggactgtataacgaactccagaaagacaagatggccgaagcctacagcgagatcggcatgaagggcgagcggagaagaggcaagggccacgatggcctgtaccagggcctgagcaccgccaccaaggacacctatgacgccctgcacatgcaggccctgcctccaagaagggccaagcgatctggatctggagcaacaaacttctcactactcaaacaagcaggtgacgtggaggagaatcccgggcctactagtatggactggatttggcgcatccttttccttgtcggcgctgctaccggcgcgcattccgggccccagctccagctgcaagagtctggacctggcctggtcaagcctagcgagacactgagcctgacctgtaccgtgtccggcgatagcatcagcagcggcgattactactggggctggatcagacagcctcctggcaaaggactggaatggatcggccacatctactacagcggcgtgacctactacaaccccagcctgaagtccagagtgaccatcagcgtggacaccagccggaaccagttctccctgaagctgtctagcgtgacagccgccgataccgccgtgtactactgcaccagagaggacagcagcaactggcggagtagaggccagggaacactggtcacagttagctctggatccggcggaggcggaagtggaggcggaggatctggcggcggaggctctttcgaagtgaaactgcaggagtcaggacctggcctggtggcgccctcacagagcctgtccgtcacatgcactgtctcaggggtctcattacccgactatggtgtaagctggattcgccagcctccacgaaagggtctggagtggctgggagtaatatggggtagtgaaaccacatactataattcagctctcaaatccagactgaccatcatcaaggacaactccaagagccaagttttcttaaaaatgaacagtctgcaaactgatgacacagccatttactactgtgccaaacattattactacggtggtagctatgctatggactactggggccaaggaacctcagtcaccgtctcctcaacgcgtatccagaaccctgatcctgccgtgtaccagctgcgggatagcaagagcagcgacaagagcgtgtgtctgttcaccgacttcgacagccagaccaacgtgtcccagagcaaggactccgacgtgtacatcaccgataagaccgtgctggacatgcggagcatggacttcaagagcaactccgccgtggcctggtccaacaagtccgatttcgcctgcgccaacgccttcaacaacagcattatccccgaggacacattcttcccaagccccgagagcagctgcggtacccagagttttgggttgttggaccctaaattgtgctatctgttggacggaatcctgttcatttacggagtgatcctgaccgcattgttcctgcgggttaagttttccagatccgcagacgcacccgcttaccaacaagggcagaaccaactctacaatgaacttaatttggggcggagggaagagtacgacgttctggacaaaaggaggggacgagatcccgagatgggcggaaagcctcagcgaaggaagaatccgcaagaggggctttataacgaactccagaaagataaaatggcagaagcctatagtgagattgggatgaagggagaaaggaggaggggtaaaggtcacgatgggttgtaccaaggattgagcacagccactaaagatacctatgatgcgctccacatgcaggccctgccgccaaga

SEQ ID NO: 2675 - DNA, 3264 bp, Artificial Sequence
  Synthetic Polynucloetide
atggccttaccagtgaccgccttgctcctgccgctggccttgctgctccacgccgccaggccggaagtgcagctggttgaatctggcggaggactggttcagcctggcggatctctgagactgtcttgtgccgccagcggcttcagcttcagcgacttttggatgagctgggtccgacaggcccctggcaaaggacttgaatgggtcgccacaatcagccaggccggcagcgagaaggactacgtggactctgtgaagggcagattcaccatcagccgggacaacgccaagaagtccctgtacctccagatgaacagcctgagagccgaggacaccgccgtgtactattgtgcctctggcgtgtacagcttcgactacagaggccagggcaccctggtcacagtctcttctggtaccggcggaggcggatctggcggcggaggtagcggtggcggaggatctgaattcgagatcgtgatgacccagagccctgccaccctgtctctgagccctggcgaaagagccaccctgagctgtagagccagccaggacatcagcaagtacctgaactggtatcagcagaagcccggccaggcccccagactgctgatctaccacaccagcagactgcacagcggcatccccgccagattttctggctctggcagcggcaccgactacaccctgacaatcagcagcctccagcccgaggacttcgccgtgtacttctgtcagcaaggcaacaccctgccctacaccttcggccagggcaccaagctggaaatcaagctcgaggacctgaagaacgtgttcccacctgaggtggccgtgttcgagcctagcgaggccgagatcagccacacccagaaagccaccctcgtgtgcctggctaccggcttctaccccgaccatgtggaactgtcttggtgggtcaacggcaaagaggtgcacagcggcgtgtctaccgacccccagccactgaaagaacagcccgccctgaacgacagccggtactgcctgagcagcagactgagagtgtccgccaccttctggcagaacccccggaaccacttcagatgccaggtgcagttctacggcctgagcgagaacgacgagtggacccaggacagagccaagcccgtgacccagatcgtgtctgccgaagcctggggcagagccgattgcggatcccagagcttcggcctgctggaccccaagctgtgctacctgctggatggcatcctgttcatctacggcgtgatcctgaccgccctgttcctgagagtgaagttcagcagaagcgccgacgcccctgcctaccagcagggacagaaccaactgtacaacgagctgaacctgggcagacgggaagagtacgacgtgctggacaagcggagaggcagggaccctgagatgggcggaaagccccagcggagaaagaacccccaggaaggactgtataacgaactccagaaagacaagatggccgaagcctacagcgagatcggcatgaagggcgagcggagaagaggcaagggccacgatggcctgtaccagggcctgagcaccgccaccaaggacacctatgacgccctgcacatgcaggccctgcctccaagaagggccaagcgatctggatctggagcaacaaacttctcactactcaaacaagcaggtgacgtggaggagaatcccgggcctactagtatggactggatttggcgcatccttttccttgtcggcgctgctaccggcgcgcattccgggccccagctccagctgcaagagtctggacctggcctggtcaagcctagcgagacactgagcctgacctgtaccgtgtccggcgatagcatcagcagcggcgattactactggggctggatcagacagcctcctggcaaaggactggaatggatcggccacatctactacagcggcgtgacctactacaaccccagcctgaagtccagagtgaccatcagcgtggacaccagccggaaccagttctccctgaagctgtctagcgtgacagccgccgataccgccgtgtactactgcaccagagaggacagcagcaactggcggagtagaggccagggaacactggtcacagttagctctggatccggcggaggcggaagtggaggcggaggatctggcggcggaggctctttcgaacaggtgcaactccaggaatctggccctggcctcgtgaagcccagcgagacactgagcctgacctgtaccgtgtccggcgtgtccctgcctgactatggcgtgtcctggatcagacagccccctggcaagggcctggaatggatcggagtgatttggggcagcgaaaccacctactacaacagctccctgaagtccagagtgaccatctccaaggacaactccaagaaccaggtgtccctgaagctgagcagcgtgacagccgccgacaccgccgtgtattactgcgccaagcactactactacggcggcagctacgctatggactactggggccagggaaccctcgtgaccgtgtctagtacgcgtatccagaaccctgatcctgccgtgtaccagctgcgggatagcaagagcagcgacaagagcgtgtgtctgttcaccgacttcgacagccagaccaacgtgtcccagagcaaggactccgacgtgtacatcaccgataagaccgtgctggacatgcggagcatggacttcaagagcaactccgccgtggcctggtccaacaagtccgatttcgcctgcgccaacgccttcaacaacagcattatccccgaggacacattcttcccaagccccgagagcagctgcggtacccagagttttgggttgttggaccctaaattgtgctatctgttggacggaatcctgttcatttacggagtgatcctgaccgcattgttcctgcgggttaagttttccagatccgcagacgcacccgcttaccaacaagggcagaaccaactctacaatgaacttaatttggggcggagggaagagtacgacgttctggacaaaaggaggggacgagatcccgagatgggcggaaagcctcagcgaaggaagaatccgcaagaggggctttataacgaactccagaaagataaaatggcagaagcctatagtgagattgggatgaagggagaaaggaggaggggtaaaggtcacgatgggttgtaccaaggattgagcacagccactaaagatacctatgatgcgctccacatgcaggccctgccgccaaga

SEQ ID NO: 2676 - DNA, 3267 bp, Artificial Sequence
  Synthetic Polynucloetide
atggccttaccagtgaccgccttgctcctgccgctggccttgctgctccacgccgccaggccggaagtgcagctggttgaatctggcggaggactggttcagcctggcggatctctgagactgtcttgtgccgccagcggcttcagcttcagcgacttttggatgagctgggtccgacaggcccctggcaaaggacttgaatgggtcgccacaatcagccaggccggcagcgagaaggactacgtggactctgtgaagggcagattcaccatcagccgggacaacgccaagaagtccctgtacctccagatgaacagcctgagagccgaggacaccgccgtgtactattgtgcctctggcgtgtacagcttcgactacagaggccagggcaccctggtcacagtctcttctggtaccggcggaggcggatctggcggcggaggtagcggtggcggaggatctgaattcgacgagatcgtgctgacacagagccccgccaccctgtcactgtctccaggcgaaagagccaccctgagctgtagcgccagcagcagcgtgtcctacatgcactggtatcagcagaagcccggccaggcccccagactgctgatctacgataccagcaagctggcctccggcatccccgccagattttctggcagcggctccggcaccgacttcaccctgacaatcagcagcctggaacccgaggacgtggccgtgtactactgttttcaaggcagcgtgtaccccttcaccttcggccagggcaccaagctggaaatcaagagactcgaggacctgaagaacgtgttcccacctgaggtggccgtgttcgagcctagcgaggccgagatcagccacacccagaaagccaccctcgtgtgcctggctaccggcttctaccccgaccatgtggaactgtcttggtgggtcaacggcaaagaggtgcacagcggcgtgtctaccgacccccagccactgaaagaacagcccgccctgaacgacagccggtactgcctgagcagcagactgagagtgtccgccaccttctggcagaacccccggaaccacttcagatgccaggtgcagttctacggcctgagcgagaacgacgagtggacccaggacagagccaagcccgtgacccagatcgtgtctgccgaagcctggggcagagccgattgcggatcccagagcttcggcctgctggaccccaagctgtgctacctgctggatggcatcctgttcatctacggcgtgatcctgaccgccctgttcctgagagtgaagttcagcagaagcgccgacgcccctgcctaccagcagggacagaaccaactgtacaacgagctgaacctgggcagacgggaagagtacgacgtgctggacaagcggagaggcagggaccctgagatgggcggaaagccccagcggagaaagaacccccaggaaggactgtataacgaactccagaaagacaagatggccgaagcctacagcgagatcggcatgaagggcgagcggagaagaggcaagggccacgatggcctgtaccagggcctgagcaccgccaccaaggacacctatgacgccctgcacatgcaggccctgcctccaagaagggccaagcgatctggatctggagcaacaaacttctcactactcaaacaagcaggtgacgtggaggagaatcccgggcctactagtatggactggatttggcgcatccttttccttgtcggcgctgctaccggcgcgcattccgggccccagctccagctgcaagagtctggacctggcctggtcaagcctagcgagacactgagcctgacctgtaccgtgtccggcgatagcatcagcagcggcgattactactggggctggatcagacagcctcctggcaaaggactggaatggatcggccacatctactacagcggcgtgacctactacaaccccagcctgaagtccagagtgaccatcagcgtggacaccagccggaaccagttctccctgaagctgtctagcgtgacagccgccgataccgccgtgtactactgcaccagagaggacagcagcaactggcggagtagaggccagggaacactggtcacagttagctctggatccggcggaggcggaagtggaggcggaggatctggcggcggaggctctttcgaacaggtgcagctccaggaatctggccctggcctcgtgaagcctagccagaccctgagcctgacctgtaccgtgtctggcggcagcatcagcacaagcggcatgggcgtgggctggatcagacagcaccctggcaagggcctggaatggatcggccacatttggtgggacgacgacaagcggtacaaccccgccctgaagtccagagtgaccatcagcgtggacaccagcaagaaccagttcagcctgaagctgagcagcgtgacagccgccgataccgccgtgtattattgcgcccggatggaactgtggtcctactacttcgactactggggccagggaaccctcgtgaccgtgtctagtacgcgtatccagaaccctgatcctgccgtgtaccagctgcgggatagcaagagcagcgacaagagcgtgtgtctgttcaccgacttcgacagccagaccaacgtgtcccagagcaaggactccgacgtgtacatcaccgataagaccgtgctggacatgcggagcatggacttcaagagcaactccgccgtggcctggtccaacaagtccgatttcgcctgcgccaacgccttcaacaacagcattatccccgaggacacattcttcccaagccccgagagcagctgcggtacccagagttttgggttgttggaccctaaattgtgctatctgttggacggaatcctgttcatttacggagtgatcctgaccgcattgttcctgcgggttaagttttccagatccgcagacgcacccgcttaccaacaagggcagaaccaactctacaatgaacttaatttggggcggagggaagagtacgacgttctggacaaaaggaggggacgagatcccgagatgggcggaaagcctcagcgaaggaagaatccgcaagaggggctttataacgaactccagaaagataaaatggcagaagcctatagtgagattgggatgaagggagaaaggaggaggggtaaaggtcacgatgggttgtaccaaggattgagcacagccactaaagatacctatgatgcgctccacatgcaggccctgccgccaaga

SEQ ID NO: 2677 - DNA, 3261 bp, Artificial Sequence
  Synthetic Polynucloetide
atggccttaccagtgaccgccttgctcctgccgctggccttgctgctccacgccgccaggccggaagtgcagctggttgaatctggcggaggactggttcagcctggcggatctctgagactgtcttgtgccgccagcggcttcagcttcagcgacttttggatgagctgggtccgacaggcccctggcaaaggacttgaatgggtcgccacaatcagccaggccggcagcgagaaggactacgtggactctgtgaagggcagattcaccatcagccgggacaacgccaagaagtccctgtacctccagatgaacagcctgagagccgaggacaccgccgtgtactattgtgcctctggcgtgtacagcttcgactacagaggccagggcaccctggtcacagtctcttctggtaccggcggaggcggatctggcggcggaggtagcggtggcggaggatctgaattcgactacatccacgtgacacagagccctagcagcctgtccgtgtccatcggcgatagagtgaccatcaactgccagacctctcaaggcgtgggcagcgacctgcactggtatcagcacaaacctggcagagcccctaagctgctgatccaccatgccagctctgtggaagatggcgtgcccagcagattttccggcaccggatttcacaccagcttcaacctgacaatcaacgacctccaggccgacgacatcggcacctactactgtcaagtgctccagagcttcggcagaggcagcagactggatacaaaactcgaggacctgaagaacgtgttcccacctgaggtggccgtgttcgagcctagcgaggccgagatcagccacacccagaaagccaccctcgtgtgcctggctaccggcttctaccccgaccatgtggaactgtcttggtgggtcaacggcaaagaggtgcacagcggcgtgtctaccgacccccagccactgaaagaacagcccgccctgaacgacagccggtactgcctgagcagcagactgagagtgtccgccaccttctggcagaacccccggaaccacttcagatgccaggtgcagttctacggcctgagcgagaacgacgagtggacccaggacagagccaagcccgtgacccagatcgtgtctgccgaagcctggggcagagccgattgcggatcccagagcttcggcctgctggaccccaagctgtgctacctgctggatggcatcctgttcatctacggcgtgatcctgaccgccctgttcctgagagtgaagttcagcagaagcgccgacgcccctgcctaccagcagggacagaaccaactgtacaacgagctgaacctgggcagacgggaagagtacgacgtgctggacaagcggagaggcagggaccctgagatgggcggaaagccccagcggagaaagaacccccaggaaggactgtataacgaactccagaaagacaagatggccgaagcctacagcgagatcggcatgaagggcgagcggagaagaggcaagggccacgatggcctgtaccagggcctgagcaccgccaccaaggacacctatgacgccctgcacatgcaggccctgcctccaagaagggccaagcgatctggatctggagcaacaaacttctcactactcaaacaagcaggtgacgtggaggagaatcccgggcctactagtatggactggatttggcgcatccttttccttgtcggcgctgctaccggcgcgcattccgggccccagctccagctgcaagagtctggacctggcctggtcaagcctagcgagacactgagcctgacctgtaccgtgtccggcgatagcatcagcagcggcgattactactggggctggatcagacagcctcctggcaaaggactggaatggatcggccacatctactacagcggcgtgacctactacaaccccagcctgaagtccagagtgaccatcagcgtggacaccagccggaaccagttctccctgaagctgtctagcgtgacagccgccgataccgccgtgtactactgcaccagagaggacagcagcaactggcggagtagaggccagggaacactggtcacagttagctctggatccggcggaggcggaagtggaggcggaggatctggcggcggaggctctttcgaaagggcacacctggtgcagtctggcaccgccatgaagaaacctggcgcttccgtcagagtgtcctgtcagacaagcggctacaccttcacagcccacatcctgttctggttcagacaggccccaggcagaggactggaatgggtcggatggatcaagccccagtacggggccgtgaatttcggcggaggcttcagagacagagtgaccctgaccagggacgtgtaccgggaaatcgcctacatggacatccggggcctgaagcctgatgacaccgccgtgtactactgcgccagggatagaagctacggcgacagctcttgggctctcgatgcttggggacagggcacaacagtggtggtgtctgctacgcgtatccagaaccctgatcctgccgtgtaccagctgcgggatagcaagagcagcgacaagagcgtgtgtctgttcaccgacttcgacagccagaccaacgtgtcccagagcaaggactccgacgtgtacatcaccgataagaccgtgctggacatgcggagcatggacttcaagagcaactccgccgtggcctggtccaacaagtccgatttcgcctgcgccaacgccttcaacaacagcattatccccgaggacacattcttcccaagccccgagagcagctgcggtacccagagttttgggttgttggaccctaaattgtgctatctgttggacggaatcctgttcatttacggagtgatcctgaccgcattgttcctgcgggttaagttttccagatccgcagacgcacccgcttaccaacaagggcagaaccaactctacaatgaacttaatttggggcggagggaagagtacgacgttctggacaaaaggaggggacgagatcccgagatgggcggaaagcctcagcgaaggaagaatccgcaagaggggctttataacgaactccagaaagataaaatggcagaagcctatagtgagattgggatgaagggagaaaggaggaggggtaaaggtcacgatgggttgtaccaaggattgagcacagccactaaagatacctatgatgcgctccacatgcaggccctgccgccaaga

SEQ ID NO: 2678 - DNA, 3291 bp, Artificial Sequence
  Synthetic Polynucloetide
atggccttaccagtgaccgccttgctcctgccgctggccttgctgctccacgccgccaggccggaagtgcagctggttgaatctggcggaggactggttcagcctggcggatctctgagactgtcttgtgccgccagcggcttcagcttcagcgacttttggatgagctgggtccgacaggcccctggcaaaggacttgaatgggtcgccacaatcagccaggccggcagcgagaaggactacgtggactctgtgaagggcagattcaccatcagccgggacaacgccaagaagtccctgtacctccagatgaacagcctgagagccgaggacaccgccgtgtactattgtgcctctggcgtgtacagcttcgactacagaggccagggcaccctggtcacagtctcttctggtaccggcggaggcggatctggcggcggaggtagcggtggcggaggatctgaattcgacgtgcagatgatccagacccccgatagcctggccgtgtccctgggacagagagccaccatctcttgcagagccagcgagagcgtggacaactacggcatcagcttcatgcactggtatcagcagaagcccggccagagccccaagctgctgatctacagagcctccaacctggaaagcggcatccccgccagattttccggcagcggcagcagaaccgacttcaccctgaccatcaaccccgtggaaaccgacgacgtggcaacctactactgccagcagaacaacaaggacccccccacctttggcggaggcaccaagctggaaatcaagctcgaggacctgaagaacgtgttcccacctgaggtggccgtgttcgagcctagcgaggccgagatcagccacacccagaaagccaccctcgtgtgcctggctaccggcttctaccccgaccatgtggaactgtcttggtgggtcaacggcaaagaggtgcacagcggcgtgtctaccgacccccagccactgaaagaacagcccgccctgaacgacagccggtactgcctgagcagcagactgagagtgtccgccaccttctggcagaacccccggaaccacttcagatgccaggtgcagttctacggcctgagcgagaacgacgagtggacccaggacagagccaagcccgtgacccagatcgtgtctgccgaagcctggggcagagccgattgcggatcccagagcttcggcctgctggaccccaagctgtgctacctgctggatggcatcctgttcatctacggcgtgatcctgaccgccctgttcctgagagtgaagttcagcagaagcgccgacgcccctgcctaccagcagggacagaaccaactgtacaacgagctgaacctgggcagacgggaagagtacgacgtgctggacaagcggagaggcagggaccctgagatgggcggaaagccccagcggagaaagaacccccaggaaggactgtataacgaactccagaaagacaagatggccgaagcctacagcgagatcggcatgaagggcgagcggagaagaggcaagggccacgatggcctgtaccagggcctgagcaccgccaccaaggacacctatgacgccctgcacatgcaggccctgcctccaagaagggccaagcgatctggatctggagcaacaaacttctcactactcaaacaagcaggtgacgtggaggagaatcccgggcctactagtatggactggatttggcgcatccttttccttgtcggcgctgctaccggcgcgcattccgggccccagctccagctgcaagagtctggacctggcctggtcaagcctagcgagacactgagcctgacctgtaccgtgtccggcgatagcatcagcagcggcgattactactggggctggatcagacagcctcctggcaaaggactggaatggatcggccacatctactacagcggcgtgacctactacaaccccagcctgaagtccagagtgaccatcagcgtggacaccagccggaaccagttctccctgaagctgtctagcgtgacagccgccgataccgccgtgtactactgcaccagagaggacagcagcaactggcggagtagaggccagggaacactggtcacagttagctctggatccggcggaggcggaagtggaggcggaggatctggcggcggaggctctttcgaagggggaggcggctctcaggtgcaactccagcagtctggcgctgagcttgtgaagcctggggccagcgtgaagattagctgcaaggccagcggctacgccttcagcagctactggatgaactgggtcaagcagcggcctggcaagggcctggaatggatcggccaaatctaccccggcgacggcgacaccacctacaacggcaagttcaagggcaaggccaccctgacagccgacaagagcagcagcaccgtgtacatgcaactgaacagcctgaccagcgaggacagcgccgtgtacttctgcgtgcggtactactacggcagctccggctacttcgactattggggccagggcaccacactgaccgtgtcctctacgcgtatccagaaccctgatcctgccgtgtaccagctgcgggatagcaagagcagcgacaagagcgtgtgtctgttcaccgacttcgacagccagaccaacgtgtcccagagcaaggactccgacgtgtacatcaccgataagaccgtgctggacatgcggagcatggacttcaagagcaactccgccgtggcctggtccaacaagtccgatttcgcctgcgccaacgccttcaacaacagcattatccccgaggacacattcttcccaagccccgagagcagctgcggtacccagagttttgggttgttggaccctaaattgtgctatctgttggacggaatcctgttcatttacggagtgatcctgaccgcattgttcctgcgggttaagttttccagatccgcagacgcacccgcttaccaacaagggcagaaccaactctacaatgaacttaatttggggcggagggaagagtacgacgttctggacaaaaggaggggacgagatcccgagatgggcggaaagcctcagcgaaggaagaatccgcaagaggggctttataacgaactccagaaagataaaatggcagaagcctatagtgagattgggatgaagggagaaaggaggaggggtaaaggtcacgatgggttgtaccaaggattgagcacagccactaaagatacctatgatgcgctccacatgcaggccctgccgccaaga

SEQ ID NO: 2679 - DNA, 3264 bp, Artificial Sequence
  Synthetic Polynucloetide
atggccttaccagtgaccgccttgctcctgccgctggccttgctgctccacgccgccaggccggaagtgcagctggttgaatctggcggaggactggttcagcctggcggatctctgagactgtcttgtgccgccagcggcttcagcttcagcgacttttggatgagctgggtccgacaggcccctggcaaaggacttgaatgggtcgccacaatcagccaggccggcagcgagaaggactacgtggactctgtgaagggcagattcaccatcagccgggacaacgccaagaagtccctgtacctccagatgaacagcctgagagccgaggacaccgccgtgtactattgtgcctctggcgtgtacagcttcgactacagaggccagggcaccctggtcacagtctcttctggtaccggcggaggcggatctggcggcggaggtagcggtggcggaggatctgaattcgacgtgcagatgatccagacccccagcagcctgtctgccagcctgggcgatagagtgaccatcagctgtcgggccagccaggacatcggcaactacctgaactggtatcagcagaaacccgacggcaccgtgaagctgctgatctactacaccagcagactgcacagcggcgtgcccagcagattttctggcagcggctctggcaccgagtacagcctgaccatctccaacctggaacaggaagatattgctacctacttctgtcagcaaggcagcgccctgccccctacatttggcggcggaacaaagctggaaatcaacctcgaggacctgaagaacgtgttcccacctgaggtggccgtgttcgagcctagcgaggccgagatcagccacacccagaaagccaccctcgtgtgcctggctaccggcttctaccccgaccatgtggaactgtcttggtgggtcaacggcaaagaggtgcacagcggcgtgtctaccgacccccagccactgaaagaacagcccgccctgaacgacagccggtactgcctgagcagcagactgagagtgtccgccaccttctggcagaacccccggaaccacttcagatgccaggtgcagttctacggcctgagcgagaacgacgagtggacccaggacagagccaagcccgtgacccagatcgtgtctgccgaagcctggggcagagccgattgcggatcccagagcttcggcctgctggaccccaagctgtgctacctgctggatggcatcctgttcatctacggcgtgatcctgaccgccctgttcctgagagtgaagttcagcagaagcgccgacgcccctgcctaccagcagggacagaaccaactgtacaacgagctgaacctgggcagacgggaagagtacgacgtgctggacaagcggagaggcagggaccctgagatgggcggaaagccccagcggagaaagaacccccaggaaggactgtataacgaactccagaaagacaagatggccgaagcctacagcgagatcggcatgaagggcgagcggagaagaggcaagggccacgatggcctgtaccagggcctgagcaccgccaccaaggacacctatgacgccctgcacatgcaggccctgcctccaagaagggccaagcgatctggatctggagcaacaaacttctcactactcaaacaagcaggtgacgtggaggagaatcccgggcctactagtatggactggatttggcgcatccttttccttgtcggcgctgctaccggcgcgcattccgggccccagctccagctgcaagagtctggacctggcctggtcaagcctagcgagacactgagcctgacctgtaccgtgtccggcgatagcatcagcagcggcgattactactggggctggatcagacagcctcctggcaaaggactggaatggatcggccacatctactacagcggcgtgacctactacaaccccagcctgaagtccagagtgaccatcagcgtggacaccagccggaaccagttctccctgaagctgtctagcgtgacagccgccgataccgccgtgtactactgcaccagagaggacagcagcaactggcggagtagaggccagggaacactggtcacagttagctctggatccggcggaggcggaagtggaggcggaggatctggcggcggaggctctttcgaagctctccagctccagcagtctggcgcagaactcgtgcggcctggcgcttctgtgaccctgagctgtaaagccagcggctacaccttcaccgactacgagatgcactgggtcaagcagacccctgtgcacggcctggaatggatcggagccatcgaccctgagacaggcggcaccgcctacaaccagaagttcgagggcaaggccatcctgaccgccgacaagagcagcagcacagcctacatggaactgcggagcctgacctccgaggacagccccgtgtactactgtgccagacggcggtactacggcagcagctccttcgactattggggccagggcaccaccctgaccgtgtctagtacgcgtatccagaaccctgatcctgccgtgtaccagctgcgggatagcaagagcagcgacaagagcgtgtgtctgttcaccgacttcgacagccagaccaacgtgtcccagagcaaggactccgacgtgtacatcaccgataagaccgtgctggacatgcggagcatggacttcaagagcaactccgccgtggcctggtccaacaagtccgatttcgcctgcgccaacgccttcaacaacagcattatccccgaggacacattcttcccaagccccgagagcagctgcggtacccagagttttgggttgttggaccctaaattgtgctatctgttggacggaatcctgttcatttacggagtgatcctgaccgcattgttcctgcgggttaagttttccagatccgcagacgcacccgcttaccaacaagggcagaaccaactctacaatgaacttaatttggggcggagggaagagtacgacgttctggacaaaaggaggggacgagatcccgagatgggcggaaagcctcagcgaaggaagaatccgcaagaggggctttataacgaactccagaaagataaaatggcagaagcctatagtgagattgggatgaagggagaaaggaggaggggtaaaggtcacgatgggttgtaccaaggattgagcacagccactaaagatacctatgatgcgctccacatgcaggccctgccgccaaga

SEQ ID NO: 2680 - DNA, 3276 bp, Artificial Sequence
  Synthetic Polynucloetide
atggccttaccagtgaccgccttgctcctgccgctggccttgctgctccacgccgccaggccggaagtgcagctggttgaatctggcggaggactggttcagcctggcggatctctgagactgtcttgtgccgccagcggcttcagcttcagcgacttttggatgagctgggtccgacaggcccctggcaaaggacttgaatgggtcgccacaatcagccaggccggcagcgagaaggactacgtggactctgtgaagggcagattcaccatcagccgggacaacgccaagaagtccctgtacctccagatgaacagcctgagagccgaggacaccgccgtgtactattgtgcctctggcgtgtacagcttcgactacagaggccagggcaccctggtcacagtctcttctggtaccggcggaggcggatctggcggcggaggtagcggtggcggaggatctgaattcgacatcgtcctgacccagtccccagccagcctggcggtgtccctgggtcaacgagctaccatttcctgcagagcctctaagtccgtatccacttccggctatagttacctgcattggtaccaacagaaaccagggcagccacccaagctgctcatctatctggcctcaaacctggagtccggcgtgcccgccagattctccggaagtgggagcggcaccgactttacattgaacatccacccagtcgaagaggaagatgctgccacttattactgtcagcactccagggagctgccatttacatttggctctggcacaaaactggagatcaaactcgaggacctgaagaacgtgttcccacctgaggtggccgtgttcgagcctagcgaggccgagatcagccacacccagaaagccaccctcgtgtgcctggctaccggcttctaccccgaccatgtggaactgtcttggtgggtcaacggcaaagaggtgcacagcggcgtgtctaccgacccccagccactgaaagaacagcccgccctgaacgacagccggtactgcctgagcagcagactgagagtgtccgccaccttctggcagaacccccggaaccacttcagatgccaggtgcagttctacggcctgagcgagaacgacgagtggacccaggacagagccaagcccgtgacccagatcgtgtctgccgaagcctggggcagagccgattgcggatcccagagcttcggcctgctggaccccaagctgtgctacctgctggatggcatcctgttcatctacggcgtgatcctgaccgccctgttcctgagagtgaagttcagcagaagcgccgacgcccctgcctaccagcagggacagaaccaactgtacaacgagctgaacctgggcagacgggaagagtacgacgtgctggacaagcggagaggcagggaccctgagatgggcggaaagccccagcggagaaagaacccccaggaaggactgtataacgaactccagaaagacaagatggccgaagcctacagcgagatcggcatgaagggcgagcggagaagaggcaagggccacgatggcctgtaccagggcctgagcaccgccaccaaggacacctatgacgccctgcacatgcaggccctgcctccaagaagggccaagcgatctggatctggagcaacaaacttctcactactcaaacaagcaggtgacgtggaggagaatcccgggcctactagtatggactggatttggcgcatccttttccttgtcggcgctgctaccggcgcgcattccgggccccagctccagctgcaagagtctggacctggcctggtcaagcctagcgagacactgagcctgacctgtaccgtgtccggcgatagcatcagcagcggcgattactactggggctggatcagacagcctcctggcaaaggactggaatggatcggccacatctactacagcggcgtgacctactacaaccccagcctgaagtccagagtgaccatcagcgtggacaccagccggaaccagttctccctgaagctgtctagcgtgacagccgccgataccgccgtgtactactgcaccagagaggacagcagcaactggcggagtagaggccagggaacactggtcacagttagctctggatccggcggaggcggaagtggaggcggaggatctggcggcggaggctctttcgaacaggttcagctggtcgagtccgggggaggtctggtacagccgggtggcagcctcaagctgtcatgtgccgcatctggttttgactttagcaggtattggatgagctgggtccgccaggccccgggcaagggacttgagtggattggagaaataaaccctacttccagcacaatcaacttcacaccttctttgaaagataaggtttttatctctcgggataacgctaaaaacacactgtacttgcagatgtctaaggtgcgaagcgaagacaccgccctctattattgcgcccggggtaattactaccgctatggggatgcgatggactattgggggcaaggtacctccgtcacggtctcaacgcgtatccagaaccctgatcctgccgtgtaccagctgcgggatagcaagagcagcgacaagagcgtgtgtctgttcaccgacttcgacagccagaccaacgtgtcccagagcaaggactccgacgtgtacatcaccgataagaccgtgctggacatgcggagcatggacttcaagagcaactccgccgtggcctggtccaacaagtccgatttcgcctgcgccaacgccttcaacaacagcattatccccgaggacacattcttcccaagccccgagagcagctgcggtacccagagttttgggttgttggaccctaaattgtgctatctgttggacggaatcctgttcatttacggagtgatcctgaccgcattgttcctgcgggttaagttttccagatccgcagacgcacccgcttaccaacaagggcagaaccaactctacaatgaacttaatttggggcggagggaagagtacgacgttctggacaaaaggaggggacgagatcccgagatgggcggaaagcctcagcgaaggaagaatccgcaagaggggctttataacgaactccagaaagataaaatggcagaagcctatagtgagattgggatgaagggagaaaggaggaggggtaaaggtcacgatgggttgtaccaaggattgagcacagccactaaagatacctatgatgcgctccacatgcaggccctgccgccaaga

SEQ ID NO: 2681 - DNA, 3270 bp, Artificial Sequence
  Synthetic Polynucloetide
atggccttaccagtgaccgccttgctcctgccgctggccttgctgctccacgccgccaggccggaagtgcagctggttgaatctggcggaggactggttcagcctggcggatctctgagactgtcttgtgccgccagcggcttcagcttcagcgacttttggatgagctgggtccgacaggcccctggcaaaggacttgaatgggtcgccacaatcagccaggccggcagcgagaaggactacgtggactctgtgaagggcagattcaccatcagccgggacaacgccaagaagtccctgtacctccagatgaacagcctgagagccgaggacaccgccgtgtactattgtgcctctggcgtgtacagcttcgactacagaggccagggcaccctggtcacagtctcttctggtaccggcggaggcggatctggcggcggaggtagcggtggcggaggatctgaattcgacatccagatgacccagagccctagctcactgagcgccagcgtgggcgacagggtgaccattacctgctccgccagccaggacatcagcaactacctgaactggtaccagcagaagcccggcaaggcccccaagctgctgatctactacacctccaacctgcactccggcgtgcccagcaggttcagcggaagcggcagcggcaccgatttcaccctgaccatctccagcctgcagcccgaggacttcgccacctactactgccagcagtacaggaagctcccctggactttcggccagggcaccaaactggagatcaagcgtctcgaggacctgaagaacgtgttcccacctgaggtggccgtgttcgagcctagcgaggccgagatcagccacacccagaaagccaccctcgtgtgcctggctaccggcttctaccccgaccatgtggaactgtcttggtgggtcaacggcaaagaggtgcacagcggcgtgtctaccgacccccagccactgaaagaacagcccgccctgaacgacagccggtactgcctgagcagcagactgagagtgtccgccaccttctggcagaacccccggaaccacttcagatgccaggtgcagttctacggcctgagcgagaacgacgagtggacccaggacagagccaagcccgtgacccagatcgtgtctgccgaagcctggggcagagccgattgcggatcccagagcttcggcctgctggaccccaagctgtgctacctgctggatggcatcctgttcatctacggcgtgatcctgaccgccctgttcctgagagtgaagttcagcagaagcgccgacgcccctgcctaccagcagggacagaaccaactgtacaacgagctgaacctgggcagacgggaagagtacgacgtgctggacaagcggagaggcagggaccctgagatgggcggaaagccccagcggagaaagaacccccaggaaggactgtataacgaactccagaaagacaagatggccgaagcctacagcgagatcggcatgaagggcgagcggagaagaggcaagggccacgatggcctgtaccagggcctgagcaccgccaccaaggacacctatgacgccctgcacatgcaggccctgcctccaagaagggccaagcgatctggatctggagcaacaaacttctcactactcaaacaagcaggtgacgtggaggagaatcccgggcctactagtatggactggatttggcgcatccttttccttgtcggcgctgctaccggcgcgcattccgggccccagctccagctgcaagagtctggacctggcctggtcaagcctagcgagacactgagcctgacctgtaccgtgtccggcgatagcatcagcagcggcgattactactggggctggatcagacagcctcctggcaaaggactggaatggatcggccacatctactacagcggcgtgacctactacaaccccagcctgaagtccagagtgaccatcagcgtggacaccagccggaaccagttctccctgaagctgtctagcgtgacagccgccgataccgccgtgtactactgcaccagagaggacagcagcaactggcggagtagaggccagggaacactggtcacagttagctctggatccggcggaggcggaagtggaggcggaggatctggcggcggaggctctttcgaacaggtgcagctggtccagagcggcgccgaagtgaagaagcccggcagctccgtgaaagtgagctgcaaggccagcggcggcaccttcagcaactactggatgcactgggtgaggcaggcccccggacagggcctggagtggatgggcgccacctacaggggccacagcgacacctactacaaccagaagttcaagggccgggtgaccatcaccgccgacaagagcaccagcaccgcctacatggaactgagcagcctcaggagcgaggacaccgctgtgtattactgcgccaggggcgccatctacgacggctacgacgtgctggacaactggggccagggcacactggtgaccgtgtccagcacgcgtatccagaaccctgatcctgccgtgtaccagctgcgggatagcaagagcagcgacaagagcgtgtgtctgttcaccgacttcgacagccagaccaacgtgtcccagagcaaggactccgacgtgtacatcaccgataagaccgtgctggacatgcggagcatggacttcaagagcaactccgccgtggcctggtccaacaagtccgatttcgcctgcgccaacgccttcaacaacagcattatccccgaggacacattcttcccaagccccgagagcagctgcggtacccagagttttgggttgttggaccctaaattgtgctatctgttggacggaatcctgttcatttacggagtgatcctgaccgcattgttcctgcgggttaagttttccagatccgcagacgcacccgcttaccaacaagggcagaaccaactctacaatgaacttaatttggggcggagggaagagtacgacgttctggacaaaaggaggggacgagatcccgagatgggcggaaagcctcagcgaaggaagaatccgcaagaggggctttataacgaactccagaaagataaaatggcagaagcctatagtgagattgggatgaagggagaaaggaggaggggtaaaggtcacgatgggttgtaccaaggattgagcacagccactaaagatacctatgatgcgctccacatgcaggccctgccgccaaga

SEQ ID NO: 2682 - DNA, 3270 bp, Artificial Sequence
  Synthetic Polynucloetide
atggccttaccagtgaccgccttgctcctgccgctggccttgctgctccacgccgccaggccggaagtgcagctggttgaatctggcggaggactggttcagcctggcggatctctgagactgtcttgtgccgccagcggcttcagcttcagcgacttttggatgagctgggtccgacaggcccctggcaaaggacttgaatgggtcgccacaatcagccaggccggcagcgagaaggactacgtggactctgtgaagggcagattcaccatcagccgggacaacgccaagaagtccctgtacctccagatgaacagcctgagagccgaggacaccgccgtgtactattgtgcctctggcgtgtacagcttcgactacagaggccagggcaccctggtcacagtctcttctggtaccggcggaggcggatctggcggcggaggtagcggtggcggaggatctgaattcgacatcgtgctgacacagagccctgccaccctgtctctgagccctggcgatagagccaccatcagctgtagagccagcgagagcgtgaccatcctgggcagccacctgatctactggtatcagcagaagcccggccagccccccagactgctgattcagctggcctccaatgtgcagaccggcgtgccagccagattttccggcagcggcagcagaaccgacttcaccctgaccatcagcagcgtggaacccgaggacttcgccgtgtactactgcctccagagccggaccatccccagaacattcggccagggcaccaagctggaaatcaagagactcgaggacctgaagaacgtgttcccacctgaggtggccgtgttcgagcctagcgaggccgagatcagccacacccagaaagccaccctcgtgtgcctggctaccggcttctaccccgaccatgtggaactgtcttggtgggtcaacggcaaagaggtgcacagcggcgtgtctaccgacccccagccactgaaagaacagcccgccctgaacgacagccggtactgcctgagcagcagactgagagtgtccgccaccttctggcagaacccccggaaccacttcagatgccaggtgcagttctacggcctgagcgagaacgacgagtggacccaggacagagccaagcccgtgacccagatcgtgtctgccgaagcctggggcagagccgattgcggatcccagagcttcggcctgctggaccccaagctgtgctacctgctggatggcatcctgttcatctacggcgtgatcctgaccgccctgttcctgagagtgaagttcagcagaagcgccgacgcccctgcctaccagcagggacagaaccaactgtacaacgagctgaacctgggcagacgggaagagtacgacgtgctggacaagcggagaggcagggaccctgagatgggcggaaagccccagcggagaaagaacccccaggaaggactgtataacgaactccagaaagacaagatggccgaagcctacagcgagatcggcatgaagggcgagcggagaagaggcaagggccacgatggcctgtaccagggcctgagcaccgccaccaaggacacctatgacgccctgcacatgcaggccctgcctccaagaagggccaagcgatctggatctggagcaacaaacttctcactactcaaacaagcaggtgacgtggaggagaatcccgggcctactagtatggactggatttggcgcatccttttccttgtcggcgctgctaccggcgcgcattccgggccccagctccagctgcaagagtctggacctggcctggtcaagcctagcgagacactgagcctgacctgtaccgtgtccggcgatagcatcagcagcggcgattactactggggctggatcagacagcctcctggcaaaggactggaatggatcggccacatctactacagcggcgtgacctactacaaccccagcctgaagtccagagtgaccatcagcgtggacaccagccggaaccagttctccctgaagctgtctagcgtgacagccgccgataccgccgtgtactactgcaccagagaggacagcagcaactggcggagtagaggccagggaacactggtcacagttagctctggatccggcggaggcggaagtggaggcggaggatctggcggcggaggctctttcgaacaggtgcagctggtgcagtctggccccgaagtgaagaaacccggcgagtccgtgaagatcagctgcaaggccagcggctacaccttccggcactacagcatgaactgggtcaagcaggccccaggccagggcctgaagtggatgggcagaatcaacaccgagagcggcgtgcccatctacgccgacgacttcaagggccggttcagcttcaccgtggacaccagcgccagcaccgcctacctggaaatctccagcctgaccagcgaggataccgccgtgtatttctgctccaacgactacctgtacagcctggatttctggggccagggaaccaccctgacagtgtcctctacgcgtatccagaaccctgatcctgccgtgtaccagctgcgggatagcaagagcagcgacaagagcgtgtgtctgttcaccgacttcgacagccagaccaacgtgtcccagagcaaggactccgacgtgtacatcaccgataagaccgtgctggacatgcggagcatggacttcaagagcaactccgccgtggcctggtccaacaagtccgatttcgcctgcgccaacgccttcaacaacagcattatccccgaggacacattcttcccaagccccgagagcagctgcggtacccagagttttgggttgttggaccctaaattgtgctatctgttggacggaatcctgttcatttacggagtgatcctgaccgcattgttcctgcgggttaagttttccagatccgcagacgcacccgcttaccaacaagggcagaaccaactctacaatgaacttaatttggggcggagggaagagtacgacgttctggacaaaaggaggggacgagatcccgagatgggcggaaagcctcagcgaaggaagaatccgcaagaggggctttataacgaactccagaaagataaaatggcagaagcctatagtgagattgggatgaagggagaaaggaggaggggtaaaggtcacgatgggttgtaccaaggattgagcacagccactaaagatacctatgatgcgctccacatgcaggccctgccgccaaga

SEQ ID NO: 2683 - DNA, 3273 bp, Artificial Sequence
  Synthetic Polynucloetide
atggccttaccagtgaccgccttgctcctgccgctggccttgctgctccacgccgccaggccggaagtgcagctggttgaatctggcggaggactggttcagcctggcggatctctgagactgtcttgtgccgccagcggcttcagcttcagcgacttttggatgagctgggtccgacaggcccctggcaaaggacttgaatgggtcgccacaatcagccaggccggcagcgagaaggactacgtggactctgtgaagggcagattcaccatcagccgggacaacgccaagaagtccctgtacctccagatgaacagcctgagagccgaggacaccgccgtgtactattgtgcctctggcgtgtacagcttcgactacagaggccagggcaccctggtcacagtctcttctggtaccggcggaggcggatctggcggcggaggtagcggtggcggaggatctgaattccagtctgtgctgacacagcctcctagtgtgtctggcgctcctggacagagagtgaccatcagctgtacaggcagcagcagcaatatcggagccggctttgacgtgcactggtatcagcagctgcctggcacagcccctaaactgctgatctacggcaacagcaacagacccagcggcgtgcccgatagattttccggctctaagagcggcacaagcgccagcctggctattactggactccaggccgaggacgaggccgactactactgtcagagctacgacagcagcctgagcggctacgttttcggcaccggcaccaaagtgacagtgcttggtctcgaggacctgaagaacgtgttcccacctgaggtggccgtgttcgagcctagcgaggccgagatcagccacacccagaaagccaccctcgtgtgcctggctaccggcttctaccccgaccatgtggaactgtcttggtgggtcaacggcaaagaggtgcacagcggcgtgtctaccgacccccagccactgaaagaacagcccgccctgaacgacagccggtactgcctgagcagcagactgagagtgtccgccaccttctggcagaacccccggaaccacttcagatgccaggtgcagttctacggcctgagcgagaacgacgagtggacccaggacagagccaagcccgtgacccagatcgtgtctgccgaagcctggggcagagccgattgcggatcccagagcttcggcctgctggaccccaagctgtgctacctgctggatggcatcctgttcatctacggcgtgatcctgaccgccctgttcctgagagtgaagttcagcagaagcgccgacgcccctgcctaccagcagggacagaaccaactgtacaacgagctgaacctgggcagacgggaagagtacgacgtgctggacaagcggagaggcagggaccctgagatgggcggaaagccccagcggagaaagaacccccaggaaggactgtataacgaactccagaaagacaagatggccgaagcctacagcgagatcggcatgaagggcgagcggagaagaggcaagggccacgatggcctgtaccagggcctgagcaccgccaccaaggacacctatgacgccctgcacatgcaggccctgcctccaagaagggccaagcgatctggatctggagcaacaaacttctcactactcaaacaagcaggtgacgtggaggagaatcccgggcctactagtatggactggatttggcgcatccttttccttgtcggcgctgctaccggcgcgcattccgggccccagctccagctgcaagagtctggacctggcctggtcaagcctagcgagacactgagcctgacctgtaccgtgtccggcgatagcatcagcagcggcgattactactggggctggatcagacagcctcctggcaaaggactggaatggatcggccacatctactacagcggcgtgacctactacaaccccagcctgaagtccagagtgaccatcagcgtggacaccagccggaaccagttctccctgaagctgtctagcgtgacagccgccgataccgccgtgtactactgcaccagagaggacagcagcaactggcggagtagaggccagggaacactggtcacagttagctctggatccggcggaggcggaagtggaggcggaggatctggcggcggaggctctttcgaacaagttcagctggttcagagcggagccgaagtgaagaaacctggggcctctgtgaaggtgtcctgcaaggcttccggctacacctttaccgattactacatgcactgggtccgacaggctcccggccaaagacttgaatggatgggctggatcaaccccaacagcggcggcacaaattacgcccagaagttccaggaccggatcaccgtgaccagagacaccagctccaacaccggctacatggaactgacccggctgagatccgatgacaccgccgtgtactactgcgctagaagcccttactccggcgtgctggataagtggggacagggcacactggtcaccgtgtcatctacgcgtatccagaaccctgatcctgccgtgtaccagctgcgggatagcaagagcagcgacaagagcgtgtgtctgttcaccgacttcgacagccagaccaacgtgtcccagagcaaggactccgacgtgtacatcaccgataagaccgtgctggacatgcggagcatggacttcaagagcaactccgccgtggcctggtccaacaagtccgatttcgcctgcgccaacgccttcaacaacagcattatccccgaggacacattcttcccaagccccgagagcagctgcggtacccagagttttgggttgttggaccctaaattgtgctatctgttggacggaatcctgttcatttacggagtgatcctgaccgcattgttcctgcgggttaagttttccagatccgcagacgcacccgcttaccaacaagggcagaaccaactctacaatgaacttaatttggggcggagggaagagtacgacgttctggacaaaaggaggggacgagatcccgagatgggcggaaagcctcagcgaaggaagaatccgcaagaggggctttataacgaactccagaaagataaaatggcagaagcctatagtgagattgggatgaagggagaaaggaggaggggtaaaggtcacgatgggttgtaccaaggattgagcacagccactaaagatacctatgatgcgctccacatgcaggccctgccgccaaga

SEQ ID NO: 2684 - DNA, 3264 bp, Artificial Sequence
  Synthetic Polynucloetide
atggccttaccagtgaccgccttgctcctgccgctggccttgctgctccacgccgccaggccggaagtgcagctggttgaatctggcggaggactggttcagcctggcggatctctgagactgtcttgtgccgccagcggcttcagcttcagcgacttttggatgagctgggtccgacaggcccctggcaaaggacttgaatgggtcgccacaatcagccaggccggcagcgagaaggactacgtggactctgtgaagggcagattcaccatcagccgggacaacgccaagaagtccctgtacctccagatgaacagcctgagagccgaggacaccgccgtgtactattgtgcctctggcgtgtacagcttcgactacagaggccagggcaccctggtcacagtctcttctggtaccggcggaggcggatctggcggcggaggtagcggtggcggaggatctgaattccaggctgttctgacacagcctccatctgcctctggcacacctggacagagagtgaccatctcctgtagcggcagcagcagcaacatcggcagctacaccgtgtcctggtatcagcagctccctggaacagcccctaagttcctgatctacagcaacaaccagcggcctagcggcgtgcccgatagattttctggcagcaagagcggcacaagcgccagcctggctatttctggactccagtctgaggacgaggccgactactattgtgccgcctgggacgatagcctgaacggctatgtgtttggcaccggcaccaaagtgacagtgcttggtctcgaggacctgaagaacgtgttcccacctgaggtggccgtgttcgagcctagcgaggccgagatcagccacacccagaaagccaccctcgtgtgcctggctaccggcttctaccccgaccatgtggaactgtcttggtgggtcaacggcaaagaggtgcacagcggcgtgtctaccgacccccagccactgaaagaacagcccgccctgaacgacagccggtactgcctgagcagcagactgagagtgtccgccaccttctggcagaacccccggaaccacttcagatgccaggtgcagttctacggcctgagcgagaacgacgagtggacccaggacagagccaagcccgtgacccagatcgtgtctgccgaagcctggggcagagccgattgcggatcccagagcttcggcctgctggaccccaagctgtgctacctgctggatggcatcctgttcatctacggcgtgatcctgaccgccctgttcctgagagtgaagttcagcagaagcgccgacgcccctgcctaccagcagggacagaaccaactgtacaacgagctgaacctgggcagacgggaagagtacgacgtgctggacaagcggagaggcagggaccctgagatgggcggaaagccccagcggagaaagaacccccaggaaggactgtataacgaactccagaaagacaagatggccgaagcctacagcgagatcggcatgaagggcgagcggagaagaggcaagggccacgatggcctgtaccagggcctgagcaccgccaccaaggacacctatgacgccctgcacatgcaggccctgcctccaagaagggccaagcgatctggatctggagcaacaaacttctcactactcaaacaagcaggtgacgtggaggagaatcccgggcctactagtatggactggatttggcgcatccttttccttgtcggcgctgctaccggcgcgcattccgggccccagctccagctgcaagagtctggacctggcctggtcaagcctagcgagacactgagcctgacctgtaccgtgtccggcgatagcatcagcagcggcgattactactggggctggatcagacagcctcctggcaaaggactggaatggatcggccacatctactacagcggcgtgacctactacaaccccagcctgaagtccagagtgaccatcagcgtggacaccagccggaaccagttctccctgaagctgtctagcgtgacagccgccgataccgccgtgtactactgcaccagagaggacagcagcaactggcggagtagaggccagggaacactggtcacagttagctctggatccggcggaggcggaagtggaggcggaggatctggcggcggaggctctttcgaagttcaactggttcagagcggagccgaagtgaagaagcctggcgagagcctgaagattagctgcaaaggcagcggctacgacttcaccacctactggatcggctgggtccgacagatgcctggcaaaggactggaatggatgggcatcatctaccccggcgacagcgacaccagatacagccctagcgttagaggccgcgtgaccatcagcgccgacaagtctatcaacaccgcctacctccagtggtccagcctggaagcctctgacaccgccatgtactactgcgccagaatgtggaccttcagccaggatggatggggccagggaacactggtcacagtgtcatctacgcgtatccagaaccctgatcctgccgtgtaccagctgcgggatagcaagagcagcgacaagagcgtgtgtctgttcaccgacttcgacagccagaccaacgtgtcccagagcaaggactccgacgtgtacatcaccgataagaccgtgctggacatgcggagcatggacttcaagagcaactccgccgtggcctggtccaacaagtccgatttcgcctgcgccaacgccttcaacaacagcattatccccgaggacacattcttcccaagccccgagagcagctgcggtacccagagttttgggttgttggaccctaaattgtgctatctgttggacggaatcctgttcatttacggagtgatcctgaccgcattgttcctgcgggttaagttttccagatccgcagacgcacccgcttaccaacaagggcagaaccaactctacaatgaacttaatttggggcggagggaagagtacgacgttctggacaaaaggaggggacgagatcccgagatgggcggaaagcctcagcgaaggaagaatccgcaagaggggctttataacgaactccagaaagataaaatggcagaagcctatagtgagattgggatgaagggagaaaggaggaggggtaaaggtcacgatgggttgtaccaaggattgagcacagccactaaagatacctatgatgcgctccacatgcaggccctgccgccaaga

SEQ ID NO: 2685 - DNA, 3273 bp, Artificial Sequence
  Synthetic Polynucloetide
atggccttaccagtgaccgccttgctcctgccgctggccttgctgctccacgccgccaggccggaagtgcagctggttgaatctggcggaggactggttcagcctggcggatctctgagactgtcttgtgccgccagcggcttcagcttcagcgacttttggatgagctgggtccgacaggcccctggcaaaggacttgaatgggtcgccacaatcagccaggccggcagcgagaaggactacgtggactctgtgaagggcagattcaccatcagccgggacaacgccaagaagtccctgtacctccagatgaacagcctgagagccgaggacaccgccgtgtactattgtgcctctggcgtgtacagcttcgactacagaggccagggcaccctggtcacagtctcttctggtaccggcggaggcggatctggcggcggaggtagcggtggcggaggatctgaattcgacatcgtgatgacccagagccccgatagcctggccgtgtctctgggagagagagccaccatcaactgcaagagcagccagagcatcctgtacagcagcaaccagaagaactacctggcctggtatcagcagaagcccggccagagccctaagctgctgatctactgggccagcaccagagaaagcggcgtgcccgatagattcagcggcagcggctctggcaccgacttcaccctgaccatcagttctcttcaggccgaggacgtggccgtgtactactgccaccagtacatcagctcctacaccttcggccagggcaccaagctggaaatcaagctcgaggacctgaagaacgtgttcccacctgaggtggccgtgttcgagcctagcgaggccgagatcagccacacccagaaagccaccctcgtgtgcctggctaccggcttctaccccgaccatgtggaactgtcttggtgggtcaacggcaaagaggtgcacagcggcgtgtctaccgacccccagccactgaaagaacagcccgccctgaacgacagccggtactgcctgagcagcagactgagagtgtccgccaccttctggcagaacccccggaaccacttcagatgccaggtgcagttctacggcctgagcgagaacgacgagtggacccaggacagagccaagcccgtgacccagatcgtgtctgccgaagcctggggcagagccgattgcggatcccagagcttcggcctgctggaccccaagctgtgctacctgctggatggcatcctgttcatctacggcgtgatcctgaccgccctgttcctgagagtgaagttcagcagaagcgccgacgcccctgcctaccagcagggacagaaccaactgtacaacgagctgaacctgggcagacgggaagagtacgacgtgctggacaagcggagaggcagggaccctgagatgggcggaaagccccagcggagaaagaacccccaggaaggactgtataacgaactccagaaagacaagatggccgaagcctacagcgagatcggcatgaagggcgagcggagaagaggcaagggccacgatggcctgtaccagggcctgagcaccgccaccaaggacacctatgacgccctgcacatgcaggccctgcctccaagaagggccaagcgatctggatctggagcaacaaacttctcactactcaaacaagcaggtgacgtggaggagaatcccgggcctactagtatggactggatttggcgcatccttttccttgtcggcgctgctaccggcgcgcattccgggccccagctccagctgcaagagtctggacctggcctggtcaagcctagcgagacactgagcctgacctgtaccgtgtccggcgatagcatcagcagcggcgattactactggggctggatcagacagcctcctggcaaaggactggaatggatcggccacatctactacagcggcgtgacctactacaaccccagcctgaagtccagagtgaccatcagcgtggacaccagccggaaccagttctccctgaagctgtctagcgtgacagccgccgataccgccgtgtactactgcaccagagaggacagcagcaactggcggagtagaggccagggaacactggtcacagttagctctggatccggcggaggcggaagtggaggcggaggatctggcggcggaggctctttcgaacaggtgcagctggtgcagtctggcgctgaagtgaagaaacctggggccagcgtgaaggtgtcctgcaaggccagcggctacacctttgccagccagtggatgcactggatgagacaggcccctggacagggcctggaatggatcggctggatcaaccccggcaacgtgaacaccaagtacaacgagaagttcaagggcagagccaccctgacagtggacaccagcaccaacaccgcctacatggaactgagcagcctgcggagcgaggacaccgccgtgtattattgcgccagaagcacctggtacagacccctggattattggggccagggaacccttgtgaccgtgtcctctacgcgtatccagaaccctgatcctgccgtgtaccagctgcgggatagcaagagcagcgacaagagcgtgtgtctgttcaccgacttcgacagccagaccaacgtgtcccagagcaaggactccgacgtgtacatcaccgataagaccgtgctggacatgcggagcatggacttcaagagcaactccgccgtggcctggtccaacaagtccgatttcgcctgcgccaacgccttcaacaacagcattatccccgaggacacattcttcccaagccccgagagcagctgcggtacccagagttttgggttgttggaccctaaattgtgctatctgttggacggaatcctgttcatttacggagtgatcctgaccgcattgttcctgcgggttaagttttccagatccgcagacgcacccgcttaccaacaagggcagaaccaactctacaatgaacttaatttggggcggagggaagagtacgacgttctggacaaaaggaggggacgagatcccgagatgggcggaaagcctcagcgaaggaagaatccgcaagaggggctttataacgaactccagaaagataaaatggcagaagcctatagtgagattgggatgaagggagaaaggaggaggggtaaaggtcacgatgggttgtaccaaggattgagcacagccactaaagatacctatgatgcgctccacatgcaggccctgccgccaaga

SEQ ID NO: 2686 - DNA, 3273 bp, Artificial Sequence
  Synthetic Polynucloetide
atggccttaccagtgaccgccttgctcctgccgctggccttgctgctccacgccgccaggccggaagtgcagctggttgaatctggcggaggactggttcagcctggcggatctctgagactgtcttgtgccgccagcggcttcagcttcagcgacttttggatgagctgggtccgacaggcccctggcaaaggacttgaatgggtcgccacaatcagccaggccggcagcgagaaggactacgtggactctgtgaagggcagattcaccatcagccgggacaacgccaagaagtccctgtacctccagatgaacagcctgagagccgaggacaccgccgtgtactattgtgcctctggcgtgtacagcttcgactacagaggccagggcaccctggtcacagtctcttctggtaccggcggaggcggatctggcggcggaggtagcggtggcggaggatctgaattcgaccacatcgtgctgacccagagccctagcagcctgtctgccagcctgggcgacagagtgaccatcagctgtagagccagccaggacatcagcacctacctgaactggtatcagcagaaacccgacggcaccgtgaagctgctgatcttctacaccagcagactgcacgccggggtgcccagcagattttctggcagcggctctggcacccaccacagcctgaccatctccaacctggaacaggaagatattgctacctacttctgtcagcaaggcaacagcctgcccttcaccttcggcagcggcaccaagctggaaatcaagagactcgaggacctgaagaacgtgttcccacctgaggtggccgtgttcgagcctagcgaggccgagatcagccacacccagaaagccaccctcgtgtgcctggctaccggcttctaccccgaccatgtggaactgtcttggtgggtcaacggcaaagaggtgcacagcggcgtgtctaccgacccccagccactgaaagaacagcccgccctgaacgacagccggtactgcctgagcagcagactgagagtgtccgccaccttctggcagaacccccggaaccacttcagatgccaggtgcagttctacggcctgagcgagaacgacgagtggacccaggacagagccaagcccgtgacccagatcgtgtctgccgaagcctggggcagagccgattgcggatcccagagcttcggcctgctggaccccaagctgtgctacctgctggatggcatcctgttcatctacggcgtgatcctgaccgccctgttcctgagagtgaagttcagcagaagcgccgacgcccctgcctaccagcagggacagaaccaactgtacaacgagctgaacctgggcagacgggaagagtacgacgtgctggacaagcggagaggcagggaccctgagatgggcggaaagccccagcggagaaagaacccccaggaaggactgtataacgaactccagaaagacaagatggccgaagcctacagcgagatcggcatgaagggcgagcggagaagaggcaagggccacgatggcctgtaccagggcctgagcaccgccaccaaggacacctatgacgccctgcacatgcaggccctgcctccaagaagggccaagcgatctggatctggagcaacaaacttctcactactcaaacaagcaggtgacgtggaggagaatcccgggcctactagtatggactggatttggcgcatccttttccttgtcggcgctgctaccggcgcgcattccgggccccagctccagctgcaagagtctggacctggcctggtcaagcctagcgagacactgagcctgacctgtaccgtgtccggcgatagcatcagcagcggcgattactactggggctggatcagacagcctcctggcaaaggactggaatggatcggccacatctactacagcggcgtgacctactacaaccccagcctgaagtccagagtgaccatcagcgtggacaccagccggaaccagttctccctgaagctgtctagcgtgacagccgccgataccgccgtgtactactgcaccagagaggacagcagcaactggcggagtagaggccagggaacactggtcacagttagctctggatccggcggaggcggaagtggaggcggaggatctggcggcggaggctctttcgaacaggtgcagctgaaagagagcggccctgagctggaaaagcctggggccagcgtgaagattagctgcaaggccagcggctacagcttcaccgcctacagcatgaactgggtcaagcagaacaacggcatgagcctggaatggatcggcagcatcgacccctactacggcgacaccaaatacgcccagaagttcaagggcaaggccaccctgaccgtggataaggccagcagcaccgcctacctccagctgaagtctctgaccagcgaggacagcgccgtgtactactgcgccagacggatgattaccaccggcgactggtacttcgacgtgtggggagccggaaccaccgtgacagtgtctagcacgcgtatccagaaccctgatcctgccgtgtaccagctgcgggatagcaagagcagcgacaagagcgtgtgtctgttcaccgacttcgacagccagaccaacgtgtcccagagcaaggactccgacgtgtacatcaccgataagaccgtgctggacatgcggagcatggacttcaagagcaactccgccgtggcctggtccaacaagtccgatttcgcctgcgccaacgccttcaacaacagcattatccccgaggacacattcttcccaagccccgagagcagctgcggtacccagagttttgggttgttggaccctaaattgtgctatctgttggacggaatcctgttcatttacggagtgatcctgaccgcattgttcctgcgggttaagttttccagatccgcagacgcacccgcttaccaacaagggcagaaccaactctacaatgaacttaatttggggcggagggaagagtacgacgttctggacaaaaggaggggacgagatcccgagatgggcggaaagcctcagcgaaggaagaatccgcaagaggggctttataacgaactccagaaagataaaatggcagaagcctatagtgagattgggatgaagggagaaaggaggaggggtaaaggtcacgatgggttgtaccaaggattgagcacagccactaaagatacctatgatgcgctccacatgcaggccctgccgccaaga

SEQ ID NO: 2687 - DNA, 3273 bp, Artificial Sequence; identical to SEQ ID NO: 2686
  Synthetic Polynucloetide

SEQ ID NO: 2688 - DNA, 3273 bp, Artificial Sequence
  Synthetic Polynucloetide
atggccttaccagtgaccgccttgctcctgccgctggccttgctgctccacgccgccaggccggaagtgcagctggttgaatctggcggaggactggttcagcctggcggatctctgagactgtcttgtgccgccagcggcttcagcttcagcgacttttggatgagctgggtccgacaggcccctggcaaaggacttgaatgggtcgccacaatcagccaggccggcagcgagaaggactacgtggactctgtgaagggcagattcaccatcagccgggacaacgccaagaagtccctgtacctccagatgaacagcctgagagccgaggacaccgccgtgtactattgtgcctctggcgtgtacagcttcgactacagaggccagggcaccctggtcacagtctcttctggtaccggcggaggcggatctggcggcggaggtagcggtggcggaggatctgaattcgacgagatcgtgctgacacagagccctgccaccctgtctctgagccctggcgaaagagccaccctgagctgtagagccagccagagcgtgtccagctacctggcctggtatcagcagaagcccggccaggctccccggctgctgatctacgatgccagcaatagagccaccggcatccccgccagattttccggctctggcagcggcaccgacttcaccctgaccatcagctccctggaacccgaggacttcgccgtgtactactgccagcagcggagcaactggcccatcacattcggccagggcacccggctggaaatcaaactcgaggacctgaagaacgtgttcccacctgaggtggccgtgttcgagcctagcgaggccgagatcagccacacccagaaagccaccctcgtgtgcctggctaccggcttctaccccgaccatgtggaactgtcttggtgggtcaacggcaaagaggtgcacagcggcgtgtctaccgacccccagccactgaaagaacagcccgccctgaacgacagccggtactgcctgagcagcagactgagagtgtccgccaccttctggcagaacccccggaaccacttcagatgccaggtgcagttctacggcctgagcgagaacgacgagtggacccaggacagagccaagcccgtgacccagatcgtgtctgccgaagcctggggcagagccgattgcggatcccagagcttcggcctgctggaccccaagctgtgctacctgctggatggcatcctgttcatctacggcgtgatcctgaccgccctgttcctgagagtgaagttcagcagaagcgccgacgcccctgcctaccagcagggacagaaccaactgtacaacgagctgaacctgggcagacgggaagagtacgacgtgctggacaagcggagaggcagggaccctgagatgggcggaaagccccagcggagaaagaacccccaggaaggactgtataacgaactccagaaagacaagatggccgaagcctacagcgagatcggcatgaagggcgagcggagaagaggcaagggccacgatggcctgtaccagggcctgagcaccgccaccaaggacacctatgacgccctgcacatgcaggccctgcctccaagaagggccaagcgatctggatctggagcaacaaacttctcactactcaaacaagcaggtgacgtggaggagaatcccgggcctactagtatggactggatttggcgcatccttttccttgtcggcgctgctaccggcgcgcattccgggccccagctccagctgcaagagtctggacctggcctggtcaagcctagcgagacactgagcctgacctgtaccgtgtccggcgatagcatcagcagcggcgattactactggggctggatcagacagcctcctggcaaaggactggaatggatcggccacatctactacagcggcgtgacctactacaaccccagcctgaagtccagagtgaccatcagcgtggacaccagccggaaccagttctccctgaagctgtctagcgtgacagccgccgataccgccgtgtactactgcaccagagaggacagcagcaactggcggagtagaggccagggaacactggtcacagttagctctggatccggcggaggcggaagtggaggcggaggatctggcggcggaggctctttcgaagaagtgcagctggtggaatcaggcggcggactggtgcagcctggcagaagcctgagactgagctgtgccgccagcggcttcaccttcaacgactacgccatgcactgggtgcgccaggcccctggaaaaggactggaatgggtgtccacaatcagctggaacagcggcagcatcggctacgccgatagcgtgaagggccggttcaccatcagccgggacaacgccaagaagtccctgtacctccagatgaacagcctgcgggccgaggacacagccctgtactattgcgccaaggacatccagtacggcaactactactacggcatggacgtgtggggccagggaaccaccgtgaccgtgtcatctacgcgtatccagaaccctgatcctgccgtgtaccagctgcgggatagcaagagcagcgacaagagcgtgtgtctgttcaccgacttcgacagccagaccaacgtgtcccagagcaaggactccgacgtgtacatcaccgataagaccgtgctggacatgcggagcatggacttcaagagcaactccgccgtggcctggtccaacaagtccgatttcgcctgcgccaacgccttcaacaacagcattatccccgaggacacattcttcccaagccccgagagcagctgcggtacccagagttttgggttgttggaccctaaattgtgctatctgttggacggaatcctgttcatttacggagtgatcctgaccgcattgttcctgcgggttaagttttccagatccgcagacgcacccgcttaccaacaagggcagaaccaactctacaatgaacttaatttggggcggagggaagagtacgacgttctggacaaaaggaggggacgagatcccgagatgggcggaaagcctcagcgaaggaagaatccgcaagaggggctttataacgaactccagaaagataaaatggcagaagcctatagtgagattgggatgaagggagaaaggaggaggggtaaaggtcacgatgggttgtaccaaggattgagcacagccactaaagatacctatgatgcgctccacatgcaggccctgccgccaaga

SEQ ID NO: 2689 - DNA, 3279 bp, Artificial Sequence
  Synthetic Polynucloetide
atggccttaccagtgaccgccttgctcctgccgctggccttgctgctccacgccgccaggccggaagtgcagctggttgaatctggcggaggactggttcagcctggcggatctctgagactgtcttgtgccgccagcggcttcagcttcagcgacttttggatgagctgggtccgacaggcccctggcaaaggacttgaatgggtcgccacaatcagccaggccggcagcgagaaggactacgtggactctgtgaagggcagattcaccatcagccgggacaacgccaagaagtccctgtacctccagatgaacagcctgagagccgaggacaccgccgtgtactattgtgcctctggcgtgtacagcttcgactacagaggccagggcaccctggtcacagtctcttctggtaccggcggaggcggatctggcggcggaggtagcggtggcggaggatctgaattcgacatcgtgatgacccagacccccctgagcctgcctgtgacacctggcgagcctgccagcatctcctgcagaagcagcaagagcctgctgcacagcaacggcatcacctacctgtactggtatctgcagaaacccggccagagcccccaactgctgatctaccagatgagcaacctggtgtccggcgtgcccgacagattttctggcagcggctccggcaccgacttcaccctgaagatcagccgggtggaagccgaggacgtgggcgtgtactactgcgcccagaacctggaactgccctacacctttggcggcggaacaaaggtggaaatcaagcggctcgaggacctgaagaacgtgttcccacctgaggtggccgtgttcgagcctagcgaggccgagatcagccacacccagaaagccaccctcgtgtgcctggctaccggcttctaccccgaccatgtggaactgtcttggtgggtcaacggcaaagaggtgcacagcggcgtgtctaccgacccccagccactgaaagaacagcccgccctgaacgacagccggtactgcctgagcagcagactgagagtgtccgccaccttctggcagaacccccggaaccacttcagatgccaggtgcagttctacggcctgagcgagaacgacgagtggacccaggacagagccaagcccgtgacccagatcgtgtctgccgaagcctggggcagagccgattgcggatcccagagcttcggcctgctggaccccaagctgtgctacctgctggatggcatcctgttcatctacggcgtgatcctgaccgccctgttcctgagagtgaagttcagcagaagcgccgacgcccctgcctaccagcagggacagaaccaactgtacaacgagctgaacctgggcagacgggaagagtacgacgtgctggacaagcggagaggcagggaccctgagatgggcggaaagccccagcggagaaagaacccccaggaaggactgtataacgaactccagaaagacaagatggccgaagcctacagcgagatcggcatgaagggcgagcggagaagaggcaagggccacgatggcctgtaccagggcctgagcaccgccaccaaggacacctatgacgccctgcacatgcaggccctgcctccaagaagggccaagcgatctggatctggagcaacaaacttctcactactcaaacaagcaggtgacgtggaggagaatcccgggcctactagtatggactggatttggcgcatccttttccttgtcggcgctgctaccggcgcgcattccgggccccagctccagctgcaagagtctggacctggcctggtcaagcctagcgagacactgagcctgacctgtaccgtgtccggcgatagcatcagcagcggcgattactactggggctggatcagacagcctcctggcaaaggactggaatggatcggccacatctactacagcggcgtgacctactacaaccccagcctgaagtccagagtgaccatcagcgtggacaccagccggaaccagttctccctgaagctgtctagcgtgacagccgccgataccgccgtgtactactgcaccagagaggacagcagcaactggcggagtagaggccagggaacactggtcacagttagctctggatccggcggaggcggaagtggaggcggaggatctggcggcggaggctctttcgaacaggtgcaactggtgcagagcggagccgaagtgaaaaagcccggcagcagcgtgaaggtgtcctgcaaggccagcggctacgccttcagctactcctggatcaactgggtgcgccaggcccctggacagggcctggaatggatgggcagaatcttccccggcgacggcgacaccgactacaacggcaagttcaagggcagagtgaccatcaccgccgacaagagcaccagcaccgcctacatggaactgagcagcctgcggagcgaggataccgccgtgtactattgtgccagaaacgtgttcgacggctactggctggtgtactggggccagggaacacttgtgaccgtgtccagcacgcgtatccagaaccctgatcctgccgtgtaccagctgcgggatagcaagagcagcgacaagagcgtgtgtctgttcaccgacttcgacagccagaccaacgtgtcccagagcaaggactccgacgtgtacatcaccgataagaccgtgctggacatgcggagcatggacttcaagagcaactccgccgtggcctggtccaacaagtccgatttcgcctgcgccaacgccttcaacaacagcattatccccgaggacacattcttcccaagccccgagagcagctgcggtacccagagttttgggttgttggaccctaaattgtgctatctgttggacggaatcctgttcatttacggagtgatcctgaccgcattgttcctgcgggttaagttttccagatccgcagacgcacccgcttaccaacaagggcagaaccaactctacaatgaacttaatttggggcggagggaagagtacgacgttctggacaaaaggaggggacgagatcccgagatgggcggaaagcctcagcgaaggaagaatccgcaagaggggctttataacgaactccagaaagataaaatggcagaagcctatagtgagattgggatgaagggagaaaggaggaggggtaaaggtcacgatgggttgtaccaaggattgagcacagccactaaagatacctatgatgcgctccacatgcaggccctgccgccaaga

SEQ ID NO: 2690 - DNA, 3282 bp, Artificial Sequence
  Synthetic Polynucloetide
atggccttaccagtgaccgccttgctcctgccgctggccttgctgctccacgccgccaggccggaagtgcagctggttgaatctggcggaggactggttcagcctggcggatctctgagactgtcttgtgccgccagcggcttcagcttcagcgacttttggatgagctgggtccgacaggcccctggcaaaggacttgaatgggtcgccacaatcagccaggccggcagcgagaaggactacgtggactctgtgaagggcagattcaccatcagccgggacaacgccaagaagtccctgtacctccagatgaacagcctgagagccgaggacaccgccgtgtactattgtgcctctggcgtgtacagcttcgactacagaggccagggcaccctggtcacagtctcttctggtaccggcggaggcggatctggcggcggaggtagcggtggcggaggatctgaattcgacatccagatgacccagagccccagcagcctgtctgccagcgtgggcgacagagtgaccatcacctgtcggagcagccagagcatcgtgcactccgtgggcaacaccttcctggaatggtatcagcagaagcccggcaaggcccccaagctgctgatctacaaggtgtccaacagattcagcggcgtgcccagcaggtttagcggctctggcagcggcaccgacttcaccctgaccatctctagcctccagcccgaggacttcgccacctactactgttttcaaggcagccagttcccctacaccttcggccagggaacaaaggtggaaatcaagcggctcgaggacctgaagaacgtgttcccacctgaggtggccgtgttcgagcctagcgaggccgagatcagccacacccagaaagccaccctcgtgtgcctggctaccggcttctaccccgaccatgtggaactgtcttggtgggtcaacggcaaagaggtgcacagcggcgtgtctaccgacccccagccactgaaagaacagcccgccctgaacgacagccggtactgcctgagcagcagactgagagtgtccgccaccttctggcagaacccccggaaccacttcagatgccaggtgcagttctacggcctgagcgagaacgacgagtggacccaggacagagccaagcccgtgacccagatcgtgtctgccgaagcctggggcagagccgattgcggatcccagagcttcggcctgctggaccccaagctgtgctacctgctggatggcatcctgttcatctacggcgtgatcctgaccgccctgttcctgagagtgaagttcagcagaagcgccgacgcccctgcctaccagcagggacagaaccaactgtacaacgagctgaacctgggcagacgggaagagtacgacgtgctggacaagcggagaggcagggaccctgagatgggcggaaagccccagcggagaaagaacccccaggaaggactgtataacgaactccagaaagacaagatggccgaagcctacagcgagatcggcatgaagggcgagcggagaagaggcaagggccacgatggcctgtaccagggcctgagcaccgccaccaaggacacctatgacgccctgcacatgcaggccctgcctccaagaagggccaagcgatctggatctggagcaacaaacttctcactactcaaacaagcaggtgacgtggaggagaatcccgggcctactagtatggactggatttggcgcatccttttccttgtcggcgctgctaccggcgcgcattccgggccccagctccagctgcaagagtctggacctggcctggtcaagcctagcgagacactgagcctgacctgtaccgtgtccggcgatagcatcagcagcggcgattactactggggctggatcagacagcctcctggcaaaggactggaatggatcggccacatctactacagcggcgtgacctactacaaccccagcctgaagtccagagtgaccatcagcgtggacaccagccggaaccagttctccctgaagctgtctagcgtgacagccgccgataccgccgtgtactactgcaccagagaggacagcagcaactggcggagtagaggccagggaacactggtcacagttagctctggatccggcggaggcggaagtggaggcggaggatctggcggcggaggctctttcgaagaagtgcaactggtggaaagcggaggcggcctggtgcagcctggcggatctctgagactgagctgtgccgccagcggctacgagttcagccggtcctggatgaactgggtgcgccaggcccctggcaagggactggaatgggtgggaagaatctaccccggcgacggcgacaccaactacagcggcaagttcaagggccggttcaccatcagcgccgacaccagcaagaacaccgcctacctccagatgaacagcctgcgggccgaggataccgccgtgtactactgtgccagagatggcagctcctgggactggtacttcgacgtgtggggacagggaacccttgtgaccgtgtccagcacgcgtatccagaaccctgatcctgccgtgtaccagctgcgggatagcaagagcagcgacaagagcgtgtgtctgttcaccgacttcgacagccagaccaacgtgtcccagagcaaggactccgacgtgtacatcaccgataagaccgtgctggacatgcggagcatggacttcaagagcaactccgccgtggcctggtccaacaagtccgatttcgcctgcgccaacgccttcaacaacagcattatccccgaggacacattcttcccaagccccgagagcagctgcggtacccagagttttgggttgttggaccctaaattgtgctatctgttggacggaatcctgttcatttacggagtgatcctgaccgcattgttcctgcgggttaagttttccagatccgcagacgcacccgcttaccaacaagggcagaaccaactctacaatgaacttaatttggggcggagggaagagtacgacgttctggacaaaaggaggggacgagatcccgagatgggcggaaagcctcagcgaaggaagaatccgcaagaggggctttataacgaactccagaaagataaaatggcagaagcctatagtgagattgggatgaagggagaaaggaggaggggtaaaggtcacgatgggttgtaccaaggattgagcacagccactaaagatacctatgatgcgctccacatgcaggccctgccgccaaga

SEQ ID NO: 2691 - DNA, 3276 bp, Artificial Sequence
  Synthetic Polynucloetide
atggccttaccagtgaccgccttgctcctgccgctggccttgctgctccacgccgccaggccggaagtgcagctggttgaatctggcggaggactggttcagcctggcggatctctgagactgtcttgtgccgccagcggcttcagcttcagcgacttttggatgagctgggtccgacaggcccctggcaaaggacttgaatgggtcgccacaatcagccaggccggcagcgagaaggactacgtggactctgtgaagggcagattcaccatcagccgggacaacgccaagaagtccctgtacctccagatgaacagcctgagagccgaggacaccgccgtgtactattgtgcctctggcgtgtacagcttcgactacagaggccagggcaccctggtcacagtctcttctggtaccggcggaggcggatctggcggcggaggtagcggtggcggaggatctgaattcgacatccagatgacccagagccccagcagcctgtctgccagcgtgggcgacagagtgaccatcacctgtagagccagccagaccatctggtcctacctgaactggtatcagcagaggcccggcaaggcccccaacctgctgatctatgccgccagctctctccagagcggcgtgcccagcagattttccggcagaggcagcggcaccgacttcaccctgaccatcagttccttgcaggccgaggacttcgccacctactactgccagcagagctacagcatcccccagattttcggccagggcaccaagctggaaatcaagctcgaggacctgaagaacgtgttcccacctgaggtggccgtgttcgagcctagcgaggccgagatcagccacacccagaaagccaccctcgtgtgcctggctaccggcttctaccccgaccatgtggaactgtcttggtgggtcaacggcaaagaggtgcacagcggcgtgtctaccgacccccagccactgaaagaacagcccgccctgaacgacagccggtactgcctgagcagcagactgagagtgtccgccaccttctggcagaacccccggaaccacttcagatgccaggtgcagttctacggcctgagcgagaacgacgagtggacccaggacagagccaagcccgtgacccagatcgtgtctgccgaagcctggggcagagccgattgcggatcccagagcttcggcctgctggaccccaagctgtgctacctgctggatggcatcctgttcatctacggcgtgatcctgaccgccctgttcctgagagtgaagttcagcagaagcgccgacgcccctgcctaccagcagggacagaaccaactgtacaacgagctgaacctgggcagacgggaagagtacgacgtgctggacaagcggagaggcagggaccctgagatgggcggaaagccccagcggagaaagaacccccaggaaggactgtataacgaactccagaaagacaagatggccgaagcctacagcgagatcggcatgaagggcgagcggagaagaggcaagggccacgatggcctgtaccagggcctgagcaccgccaccaaggacacctatgacgccctgcacatgcaggccctgcctccaagaagggccaagcgatctggatctggagcaacaaacttctcactactcaaacaagcaggtgacgtggaggagaatcccgggcctactagtatggactggatttggcgcatccttttccttgtcggcgctgctaccggcgcgcattccgggccccagctccagctgcaagagtctggacctggcctggtcaagcctagcgagacactgagcctgacctgtaccgtgtccggcgatagcatcagcagcggcgattactactggggctggatcagacagcctcctggcaaaggactggaatggatcggccacatctactacagcggcgtgacctactacaaccccagcctgaagtccagagtgaccatcagcgtggacaccagccggaaccagttctccctgaagctgtctagcgtgacagccgccgataccgccgtgtactactgcaccagagaggacagcagcaactggcggagtagaggccagggaacactggtcacagttagctctggatccggcggaggcggaagtggaggcggaggatctggcggcggaggctctttcgaacaggtgcagctccagcagtctggacccggcctcgtgaagcctagccagacactgagcctgacctgcgccatcagcggcgatagcgtgtccagcaatagcgccgcctggaactggatcagacagtccccctctcggggcctggaatggctgggccggacctactaccgcagcaagtggtacaacgactacgccgtgtccgtgaagtcccggatcaccatcaaccccgacaccagcaagaaccagttctccttgcaactgaacagcgtgacccccgaggacaccgccgtgtactactgcgccagagaagtgaccggcgacctggaagatgccttcgacatctggggccagggaacaatggtcacagtgtccagcacgcgtatccagaaccctgatcctgccgtgtaccagctgcgggatagcaagagcagcgacaagagcgtgtgtctgttcaccgacttcgacagccagaccaacgtgtcccagagcaaggactccgacgtgtacatcaccgataagaccgtgctggacatgcggagcatggacttcaagagcaactccgccgtggcctggtccaacaagtccgatttcgcctgcgccaacgccttcaacaacagcattatccccgaggacacattcttcccaagccccgagagcagctgcggtacccagagttttgggttgttggaccctaaattgtgctatctgttggacggaatcctgttcatttacggagtgatcctgaccgcattgttcctgcgggttaagttttccagatccgcagacgcacccgcttaccaacaagggcagaaccaactctacaatgaacttaatttggggcggagggaagagtacgacgttctggacaaaaggaggggacgagatcccgagatgggcggaaagcctcagcgaaggaagaatccgcaagaggggctttataacgaactccagaaagataaaatggcagaagcctatagtgagattgggatgaagggagaaaggaggaggggtaaaggtcacgatgggttgtaccaaggattgagcacagccactaaagatacctatgatgcgctccacatgcaggccctgccgccaaga

SEQ ID NO: 2692 - DNA, 3255 bp, Artificial Sequence
  Synthetic Polynucloetide
atggccttaccagtgaccgccttgctcctgccgctggccttgctgctccacgccgccaggccggaagtgcagctggttgaatctggcggaggactggttcagcctggcggatctctgagactgtcttgtgccgccagcggcttcagcttcagcgacttttggatgagctgggtccgacaggcccctggcaaaggacttgaatgggtcgccacaatcagccaggccggcagcgagaaggactacgtggactctgtgaagggcagattcaccatcagccgggacaacgccaagaagtccctgtacctccagatgaacagcctgagagccgaggacaccgccgtgtactattgtgcctctggcgtgtacagcttcgactacagaggccagggcaccctggtcacagtctcttctggtaccggcggaggcggatctggcggcggaggtagcggtggcggaggatctgaattcgacatccagatgacccagagccccgccaccatcgagaacacaagcctgtctgccagcgtgggcgacagagtgaccatcacctgtagagccagccagggcatcagctcttggctgacctggtatcagcagaagcccgagaaggcccccaagagcctgatctacgccgccagctctctgcagtctggcgtgcccagcagattttccggcagcggctctggcaccgacttcaccctgacaatcagcagcctgcagcccgaggacttcgccacctactactgccagcagtacgacagctaccccatcaccttcggccagggcacccggctggaaatcaagctcgaggacctgaagaacgtgttcccacctgaggtggccgtgttcgagcctagcgaggccgagatcagccacacccagaaagccaccctcgtgtgcctggctaccggcttctaccccgaccatgtggaactgtcttggtgggtcaacggcaaagaggtgcacagcggcgtgtctaccgacccccagccactgaaagaacagcccgccctgaacgacagccggtactgcctgagcagcagactgagagtgtccgccaccttctggcagaacccccggaaccacttcagatgccaggtgcagttctacggcctgagcgagaacgacgagtggacccaggacagagccaagcccgtgacccagatcgtgtctgccgaagcctggggcagagccgattgcggatcccagagcttcggcctgctggaccccaagctgtgctacctgctggatggcatcctgttcatctacggcgtgatcctgaccgccctgttcctgagagtgaagttcagcagaagcgccgacgcccctgcctaccagcagggacagaaccaactgtacaacgagctgaacctgggcagacgggaagagtacgacgtgctggacaagcggagaggcagggaccctgagatgggcggaaagccccagcggagaaagaacccccaggaaggactgtataacgaactccagaaagacaagatggccgaagcctacagcgagatcggcatgaagggcgagcggagaagaggcaagggccacgatggcctgtaccagggcctgagcaccgccaccaaggacacctatgacgccctgcacatgcaggccctgcctccaagaagggccaagcgatctggatctggagcaacaaacttctcactactcaaacaagcaggtgacgtggaggagaatcccgggcctactagtatggactggatttggcgcatccttttccttgtcggcgctgctaccggcgcgcattccgggccccagctccagctgcaagagtctggacctggcctggtcaagcctagcgagacactgagcctgacctgtaccgtgtccggcgatagcatcagcagcggcgattactactggggctggatcagacagcctcctggcaaaggactggaatggatcggccacatctactacagcggcgtgacctactacaaccccagcctgaagtccagagtgaccatcagcgtggacaccagccggaaccagttctccctgaagctgtctagcgtgacagccgccgataccgccgtgtactactgcaccagagaggacagcagcaactggcggagtagaggccagggaacactggtcacagttagctctggatccggcggaggcggaagtggaggcggaggatctggcggcggaggctctttcgaacaggtgcaactgcagcagtggggagccggactgctgaagcctagcgagacactgagcctgacctgcgccgtgtacggcggcagcttcagcgcctactattggagctggatcagacagccccctggcaagggcctggaatggatcggcgacatcaatcacggcggaggcaccaactacaaccccagcctgaagtcccgcgtgaccatctccgtggacaccagcaagaaccagttctccctgaagctgaacagcgtgacagccgccgacacagccgtgtactactgtgccagcctgaccgcctattggggccagggatctcttgtgaccgtgtccagcacgcgtatccagaaccctgatcctgccgtgtaccagctgcgggatagcaagagcagcgacaagagcgtgtgtctgttcaccgacttcgacagccagaccaacgtgtcccagagcaaggactccgacgtgtacatcaccgataagaccgtgctggacatgcggagcatggacttcaagagcaactccgccgtggcctggtccaacaagtccgatttcgcctgcgccaacgccttcaacaacagcattatccccgaggacacattcttcccaagccccgagagcagctgcggtacccagagttttgggttgttggaccctaaattgtgctatctgttggacggaatcctgttcatttacggagtgatcctgaccgcattgttcctgcgggttaagttttccagatccgcagacgcacccgcttaccaacaagggcagaaccaactctacaatgaacttaatttggggcggagggaagagtacgacgttctggacaaaaggaggggacgagatcccgagatgggcggaaagcctcagcgaaggaagaatccgcaagaggggctttataacgaactccagaaagataaaatggcagaagcctatagtgagattgggatgaagggagaaaggaggaggggtaaaggtcacgatgggttgtaccaaggattgagcacagccactaaagatacctatgatgcgctccacatgcaggccctgccgccaaga

SEQ ID NO: 2693 - DNA, 3270 bp, Artificial Sequence
  Synthetic Polynucloetide
atggccttaccagtgaccgccttgctcctgccgctggccttgctgctccacgccgccaggccggaagtgcagctggttgaatctggcggaggactggttcagcctggcggatctctgagactgtcttgtgccgccagcggcttcagcttcagcgacttttggatgagctgggtccgacaggcccctggcaaaggacttgaatgggtcgccacaatcagccaggccggcagcgagaaggactacgtggactctgtgaagggcagattcaccatcagccgggacaacgccaagaagtccctgtacctccagatgaacagcctgagagccgaggacaccgccgtgtactattgtgcctctggcgtgtacagcttcgactacagaggccagggcaccctggtcacagtctcttctggtaccggcggaggcggatctggcggcggaggtagcggtggcggaggatctgaattcgacgagatcgtgctgacccagagccctgatagcctggccgtgtctctgggcgagagagccaccatcaactgcaaggccagccagagcgtggacttcgacggcgacagctacctgaactggtatcagcagaagcccggccagccccccaaggtgctgatctatgccgccagcacactgcagagcggcgtgcccagcagattttctggcagcggctccggcaccgacttcaccctgaccatcaacagcctggaagccgaggacgccgccacctactactgccagcagagcaacgaggacccctggacctttggcggcggaacaaaggtggaaatcaagctcgaggacctgaagaacgtgttcccacctgaggtggccgtgttcgagcctagcgaggccgagatcagccacacccagaaagccaccctcgtgtgcctggctaccggcttctaccccgaccatgtggaactgtcttggtgggtcaacggcaaagaggtgcacagcggcgtgtctaccgacccccagccactgaaagaacagcccgccctgaacgacagccggtactgcctgagcagcagactgagagtgtccgccaccttctggcagaacccccggaaccacttcagatgccaggtgcagttctacggcctgagcgagaacgacgagtggacccaggacagagccaagcccgtgacccagatcgtgtctgccgaagcctggggcagagccgattgcggatcccagagcttcggcctgctggaccccaagctgtgctacctgctggatggcatcctgttcatctacggcgtgatcctgaccgccctgttcctgagagtgaagttcagcagaagcgccgacgcccctgcctaccagcagggacagaaccaactgtacaacgagctgaacctgggcagacgggaagagtacgacgtgctggacaagcggagaggcagggaccctgagatgggcggaaagccccagcggagaaagaacccccaggaaggactgtataacgaactccagaaagacaagatggccgaagcctacagcgagatcggcatgaagggcgagcggagaagaggcaagggccacgatggcctgtaccagggcctgagcaccgccaccaaggacacctatgacgccctgcacatgcaggccctgcctccaagaagggccaagcgatctggatctggagcaacaaacttctcactactcaaacaagcaggtgacgtggaggagaatcccgggcctactagtatggactggatttggcgcatccttttccttgtcggcgctgctaccggcgcgcattccgggccccagctccagctgcaagagtctggacctggcctggtcaagcctagcgagacactgagcctgacctgtaccgtgtccggcgatagcatcagcagcggcgattactactggggctggatcagacagcctcctggcaaaggactggaatggatcggccacatctactacagcggcgtgacctactacaaccccagcctgaagtccagagtgaccatcagcgtggacaccagccggaaccagttctccctgaagctgtctagcgtgacagccgccgataccgccgtgtactactgcaccagagaggacagcagcaactggcggagtagaggccagggaacactggtcacagttagctctggatccggcggaggcggaagtggaggcggaggatctggcggcggaggctctttcgaacaggtgcaactggtgcagtccggcgctgaagtgaagaaacctggggccagcgtgaaggtgtcctgcaaggtgtccggctacacctttaccgactactacattacctgggtgcgccaggcccctggacaggccctggaatggatgggctggatctaccccggcagcggcaacaccaagtacagccagaagttccagggcagattcgtgttcagcgtggacaccagcgccagcaccgcctacctgcaactgtctagcctgaaggccgaagataccgccgtgtactactgcgccaactacggcaactattggttcgcctattggggccagggaacccttgtgaccgtgtcctctacgcgtatccagaaccctgatcctgccgtgtaccagctgcgggatagcaagagcagcgacaagagcgtgtgtctgttcaccgacttcgacagccagaccaacgtgtcccagagcaaggactccgacgtgtacatcaccgataagaccgtgctggacatgcggagcatggacttcaagagcaactccgccgtggcctggtccaacaagtccgatttcgcctgcgccaacgccttcaacaacagcattatccccgaggacacattcttcccaagccccgagagcagctgcggtacccagagttttgggttgttggaccctaaattgtgctatctgttggacggaatcctgttcatttacggagtgatcctgaccgcattgttcctgcgggttaagttttccagatccgcagacgcacccgcttaccaacaagggcagaaccaactctacaatgaacttaatttggggcggagggaagagtacgacgttctggacaaaaggaggggacgagatcccgagatgggcggaaagcctcagcgaaggaagaatccgcaagaggggctttataacgaactccagaaagataaaatggcagaagcctatagtgagattgggatgaagggagaaaggaggaggggtaaaggtcacgatgggttgtaccaaggattgagcacagccactaaagatacctatgatgcgctccacatgcaggccctgccgccaaga

SEQ ID NO: 2694 - DNA, 3261 bp, Artificial Sequence
  Synthetic Polynucloetide
atggccttaccagtgaccgccttgctcctgccgctggccttgctgctccacgccgccaggccggaagtgcagctggttgaatctggcggaggactggttcagcctggcggatctctgagactgtcttgtgccgccagcggcttcagcttcagcgacttttggatgagctgggtccgacaggcccctggcaaaggacttgaatgggtcgccacaatcagccaggccggcagcgagaaggactacgtggactctgtgaagggcagattcaccatcagccgggacaacgccaagaagtccctgtacctccagatgaacagcctgagagccgaggacaccgccgtgtactattgtgcctctggcgtgtacagcttcgactacagaggccagggcaccctggtcacagtctcttctggtaccggcggaggcggatctggcggcggaggtagcggtggcggaggatctgaattcgacatccagatgacccagagccccagcagcctgtctgccagcgtgggcgacagagtgaccatcacctgtagagccagccagggcatcagctcttggctggcctggtatcagcagaagcccgagaaggcccccaagagcctgatctacgccgcctctagtctccagagcggcgtgcccagcagattttctggcagcggctccggcaccgacttcaccctgacaatcagctccctccagcccgaggacttcgccacctactactgccagcagtacaacagctaccctcccacctttggcggaggcaccaaggtggaaatcaagctcgaggacctgaagaacgtgttcccacctgaggtggccgtgttcgagcctagcgaggccgagatcagccacacccagaaagccaccctcgtgtgcctggctaccggcttctaccccgaccatgtggaactgtcttggtgggtcaacggcaaagaggtgcacagcggcgtgtctaccgacccccagccactgaaagaacagcccgccctgaacgacagccggtactgcctgagcagcagactgagagtgtccgccaccttctggcagaacccccggaaccacttcagatgccaggtgcagttctacggcctgagcgagaacgacgagtggacccaggacagagccaagcccgtgacccagatcgtgtctgccgaagcctggggcagagccgattgcggatcccagagcttcggcctgctggaccccaagctgtgctacctgctggatggcatcctgttcatctacggcgtgatcctgaccgccctgttcctgagagtgaagttcagcagaagcgccgacgcccctgcctaccagcagggacagaaccaactgtacaacgagctgaacctgggcagacgggaagagtacgacgtgctggacaagcggagaggcagggaccctgagatgggcggaaagccccagcggagaaagaacccccaggaaggactgtataacgaactccagaaagacaagatggccgaagcctacagcgagatcggcatgaagggcgagcggagaagaggcaagggccacgatggcctgtaccagggcctgagcaccgccaccaaggacacctatgacgccctgcacatgcaggccctgcctccaagaagggccaagcgatctggatctggagcaacaaacttctcactactcaaacaagcaggtgacgtggaggagaatcccgggcctactagtatggactggatttggcgcatccttttccttgtcggcgctgctaccggcgcgcattccgggccccagctccagctgcaagagtctggacctggcctggtcaagcctagcgagacactgagcctgacctgtaccgtgtccggcgatagcatcagcagcggcgattactactggggctggatcagacagcctcctggcaaaggactggaatggatcggccacatctactacagcggcgtgacctactacaaccccagcctgaagtccagagtgaccatcagcgtggacaccagccggaaccagttctccctgaagctgtctagcgtgacagccgccgataccgccgtgtactactgcaccagagaggacagcagcaactggcggagtagaggccagggaacactggtcacagttagctctggatccggcggaggcggaagtggaggcggaggatctggcggcggaggctctttcgaagaagtgcaactggtgcagtctggcggagggctggtgcatcctgggggaagcctgagactgagctgtgccggctctggcttcgccttcagcagcagcaccatgcactggatcagacaggcccctggcaagggcctggaatggatcagcctgatcggaagcggagggggcatctactacggcgacagcgtgaagggccggttcaccatcagccgggacaacgccaagaacagcctgtacctccagatgaactccctgcgggccgaggacatggccgtgtactattgtgtgcggggctacttcgactgggtggactacttcgattactggggccagggcaccctcgtgaccgtgtcatctacgcgtatccagaaccctgatcctgccgtgtaccagctgcgggatagcaagagcagcgacaagagcgtgtgtctgttcaccgacttcgacagccagaccaacgtgtcccagagcaaggactccgacgtgtacatcaccgataagaccgtgctggacatgcggagcatggacttcaagagcaactccgccgtggcctggtccaacaagtccgatttcgcctgcgccaacgccttcaacaacagcattatccccgaggacacattcttcccaagccccgagagcagctgcggtacccagagttttgggttgttggaccctaaattgtgctatctgttggacggaatcctgttcatttacggagtgatcctgaccgcattgttcctgcgggttaagttttccagatccgcagacgcacccgcttaccaacaagggcagaaccaactctacaatgaacttaatttggggcggagggaagagtacgacgttctggacaaaaggaggggacgagatcccgagatgggcggaaagcctcagcgaaggaagaatccgcaagaggggctttataacgaactccagaaagataaaatggcagaagcctatagtgagattgggatgaagggagaaaggaggaggggtaaaggtcacgatgggttgtaccaaggattgagcacagccactaaagatacctatgatgcgctccacatgcaggccctgccgccaaga

SEQ ID NO: 2695 - DNA, 3291 bp, Artificial Sequence
  Synthetic Polynucloetide
atggccttaccagtgaccgccttgctcctgccgctggccttgctgctccacgccgccaggccggaagtgcagctggttgaatctggcggaggactggttcagcctggcggatctctgagactgtcttgtgccgccagcggcttcagcttcagcgacttttggatgagctgggtccgacaggcccctggcaaaggacttgaatgggtcgccacaatcagccaggccggcagcgagaaggactacgtggactctgtgaagggcagattcaccatcagccgggacaacgccaagaagtccctgtacctccagatgaacagcctgagagccgaggacaccgccgtgtactattgtgcctctggcgtgtacagcttcgactacagaggccagggcaccctggtcacagtctcttctggtaccggcggaggcggatctggcggcggaggtagcggtggcggaggatctgaattcgacgacatcgtgatgacacagtcaccagatagcctcaccgtctccctgggggagcggaccaccattaattgtaaatccagccaaagcgtgctggactcaagcaagaacaagaatagcctcgcctggtatcagcagaagcccggtcagcctccaaagctgctgctttcttgggcctccaccagagagtccgggattcctgataggtttagtggttcaggctccggcacagattttactctgaccattgattctctccagccagaggattctgcaacttattactgccagcaaagcgcccactttcctataacttttggccagggaacccgacttgaaatcaagctcgaggacctgaagaacgtgttcccacctgaggtggccgtgttcgagcctagcgaggccgagatcagccacacccagaaagccaccctcgtgtgcctggctaccggcttctaccccgaccatgtggaactgtcttggtgggtcaacggcaaagaggtgcacagcggcgtgtctaccgacccccagccactgaaagaacagcccgccctgaacgacagccggtactgcctgagcagcagactgagagtgtccgccaccttctggcagaacccccggaaccacttcagatgccaggtgcagttctacggcctgagcgagaacgacgagtggacccaggacagagccaagcccgtgacccagatcgtgtctgccgaagcctggggcagagccgattgcggatcccagagcttcggcctgctggaccccaagctgtgctacctgctggatggcatcctgttcatctacggcgtgatcctgaccgccctgttcctgagagtgaagttcagcagaagcgccgacgcccctgcctaccagcagggacagaaccaactgtacaacgagctgaacctgggcagacgggaagagtacgacgtgctggacaagcggagaggcagggaccctgagatgggcggaaagccccagcggagaaagaacccccaggaaggactgtataacgaactccagaaagacaagatggccgaagcctacagcgagatcggcatgaagggcgagcggagaagaggcaagggccacgatggcctgtaccagggcctgagcaccgccaccaaggacacctatgacgccctgcacatgcaggccctgcctccaagaagggccaagcgatctggatctggagcaacaaacttctcactactcaaacaagcaggtgacgtggaggagaatcccgggcctactagtatggactggatttggcgcatccttttccttgtcggcgctgctaccggcgcgcattccgggccccagctccagctgcaagagtctggacctggcctggtcaagcctagcgagacactgagcctgacctgtaccgtgtccggcgatagcatcagcagcggcgattactactggggctggatcagacagcctcctggcaaaggactggaatggatcggccacatctactacagcggcgtgacctactacaaccccagcctgaagtccagagtgaccatcagcgtggacaccagccggaaccagttctccctgaagctgtctagcgtgacagccgccgataccgccgtgtactactgcaccagagaggacagcagcaactggcggagtagaggccagggaacactggtcacagttagctctggatccggcggaggcggaagtggaggcggaggatctggcggcggaggctctttcgaacaggtgcagctggtgcagagcggtgccgaagtgaagaaaccaggtgcatccgttaaagtttcatgtaaggctagtggatataccttcaccaattacggaatgaactgggtgaaacaggcccctggccagggactgaagtggatggggtggattaacacctacaccggggagccgacttatgcagacgactttaaggggcgggtcacgatgacctccgacacctccaccagtaccgcctacctggagctgcacaaccttaggtcagacgataccgccgtgtattactgtgcccgatggtcttggtccgacggatactatgtctacttcgactattggggccaggggaccacagttaccgtgtcctctacgcgtatccagaaccctgatcctgccgtgtaccagctgcgggatagcaagagcagcgacaagagcgtgtgtctgttcaccgacttcgacagccagaccaacgtgtcccagagcaaggactccgacgtgtacatcaccgataagaccgtgctggacatgcggagcatggacttcaagagcaactccgccgtggcctggtccaacaagtccgatttcgcctgcgccaacgccttcaacaacagcattatccccgaggacacattcttcccaagccccgagagcagctgcggtacccagagttttgggttgttggaccctaaattgtgctatctgttggacggaatcctgttcatttacggagtgatcctgaccgcattgttcctgcgggttaagttttccagatccgcagacgcacccgcttaccaacaagggcagaaccaactctacaatgaacttaatttggggcggagggaagagtacgacgttctggacaaaaggaggggacgagatcccgagatgggcggaaagcctcagcgaaggaagaatccgcaagaggggctttataacgaactccagaaagataaaatggcagaagcctatagtgagattgggatgaagggagaaaggaggaggggtaaaggtcacgatgggttgtaccaaggattgagcacagccactaaagatacctatgatgcgctccacatgcaggccctgccgccaaga

SEQ ID NO: 2696 - DNA, 3279 bp, Artificial Sequence
  Synthetic Polynucloetide
atggccttaccagtgaccgccttgctcctgccgctggccttgctgctccacgccgccaggccggaagtgcagctggttgaatctggcggaggactggttcagcctggcggatctctgagactgtcttgtgccgccagcggcttcagcttcagcgacttttggatgagctgggtccgacaggcccctggcaaaggacttgaatgggtcgccacaatcagccaggccggcagcgagaaggactacgtggactctgtgaagggcagattcaccatcagccgggacaacgccaagaagtccctgtacctccagatgaacagcctgagagccgaggacaccgccgtgtactattgtgcctctggcgtgtacagcttcgactacagaggccagggcaccctggtcacagtctcttctggtaccggcggaggcggatctggcggcggaggtagcggtggcggaggatctgaattcgacgagatcgtgctgacacagagccctggaagcctggccgtgtctcctggcgagcgcgtgacaatgagctgcaagagcagccagagcgtgttcttcagcagctcccagaagaactacctggcctggtatcagcagatccccggccagagccccagactgctgatctactgggccagcaccagagaaagcggcgtgcccgatagattcaccggcagcggctctggcaccgacttcaccctgacaatcagcagcgtgcagcccgaggacctggctatctactactgccaccagtacctgagcagccggaccttcggccagggcaccaagctggaaatcaagagactcgaggacctgaagaacgtgttcccacctgaggtggccgtgttcgagcctagcgaggccgagatcagccacacccagaaagccaccctcgtgtgcctggctaccggcttctaccccgaccatgtggaactgtcttggtgggtcaacggcaaagaggtgcacagcggcgtgtctaccgacccccagccactgaaagaacagcccgccctgaacgacagccggtactgcctgagcagcagactgagagtgtccgccaccttctggcagaacccccggaaccacttcagatgccaggtgcagttctacggcctgagcgagaacgacgagtggacccaggacagagccaagcccgtgacccagatcgtgtctgccgaagcctggggcagagccgattgcggatcccagagcttcggcctgctggaccccaagctgtgctacctgctggatggcatcctgttcatctacggcgtgatcctgaccgccctgttcctgagagtgaagttcagcagaagcgccgacgcccctgcctaccagcagggacagaaccaactgtacaacgagctgaacctgggcagacgggaagagtacgacgtgctggacaagcggagaggcagggaccctgagatgggcggaaagccccagcggagaaagaacccccaggaaggactgtataacgaactccagaaagacaagatggccgaagcctacagcgagatcggcatgaagggcgagcggagaagaggcaagggccacgatggcctgtaccagggcctgagcaccgccaccaaggacacctatgacgccctgcacatgcaggccctgcctccaagaagggccaagcgatctggatctggagcaacaaacttctcactactcaaacaagcaggtgacgtggaggagaatcccgggcctactagtatggactggatttggcgcatccttttccttgtcggcgctgctaccggcgcgcattccgggccccagctccagctgcaagagtctggacctggcctggtcaagcctagcgagacactgagcctgacctgtaccgtgtccggcgatagcatcagcagcggcgattactactggggctggatcagacagcctcctggcaaaggactggaatggatcggccacatctactacagcggcgtgacctactacaaccccagcctgaagtccagagtgaccatcagcgtggacaccagccggaaccagttctccctgaagctgtctagcgtgacagccgccgataccgccgtgtactactgcaccagagaggacagcagcaactggcggagtagaggccagggaacactggtcacagttagctctggatccggcggaggcggaagtggaggcggaggatctggcggcggaggctctttcgaacaggtgcaactgcagcagcctggcgctgaggtcgtgaagccaggcgcttccgtgaagatgtcctgcaaggccagcggctacaccttcaccagctactacatccactggatcaagcagacccctggacagggcctggaatgggtgggagtgatctaccccggcaacgacgacatcagctacaaccagaagttccagggcaaggccaccctgaccgccgacaagtctagcaccaccgcctacatgcaactgtccagcctgaccagcgaggacagcgccgtgtactactgcgccagagaagtgcggctgcggtacttcgatgtgtggggccagggaaccaccgtgaccgtgtcatctacgcgtatccagaaccctgatcctgccgtgtaccagctgcgggatagcaagagcagcgacaagagcgtgtgtctgttcaccgacttcgacagccagaccaacgtgtcccagagcaaggactccgacgtgtacatcaccgataagaccgtgctggacatgcggagcatggacttcaagagcaactccgccgtggcctggtccaacaagtccgatttcgcctgcgccaacgccttcaacaacagcattatccccgaggacacattcttcccaagccccgagagcagctgcggtacccagagttttgggttgttggaccctaaattgtgctatctgttggacggaatcctgttcatttacggagtgatcctgaccgcattgttcctgcgggttaagttttccagatccgcagacgcacccgcttaccaacaagggcagaaccaactctacaatgaacttaatttggggcggagggaagagtacgacgttctggacaaaaggaggggacgagatcccgagatgggcggaaagcctcagcgaaggaagaatccgcaagaggggctttataacgaactccagaaagataaaatggcagaagcctatagtgagattgggatgaagggagaaaggaggaggggtaaaggtcacgatgggttgtaccaaggattgagcacagccactaaagatacctatgatgcgctccacatgcaggccctgccgccaaga

SEQ ID NO: 2697 - DNA, 3291 bp, Artificial Sequence
  Synthetic Polynucloetide
atggccttaccagtgaccgccttgctcctgccgctggccttgctgctccacgccgccaggccggaagtgcagctggttgaatctggcggaggactggttcagcctggcggatctctgagactgtcttgtgccgccagcggcttcagcttcagcgacttttggatgagctgggtccgacaggcccctggcaaaggacttgaatgggtcgccacaatcagccaggccggcagcgagaaggactacgtggactctgtgaagggcagattcaccatcagccgggacaacgccaagaagtccctgtacctccagatgaacagcctgagagccgaggacaccgccgtgtactattgtgcctctggcgtgtacagcttcgactacagaggccagggcaccctggtcacagtctcttctggtaccggcggaggcggatctggcggcggaggtagcggtggcggaggatctgaattcgatgtgctgctgacccagagccctctgagcctgcctgtgacactgggacagcctgccagcatctcctgtcggagcagccagaccatcgtgcacagcaacggcaacacctacctggaatggttccagcagcggccaggccagagccccagactgctgatctaccaggtgtccaacagattcagcggcgtgcccgacagattctccggcagcggctctggcaccgacttcaccctgaagatcagccgggtggaagccgaggacgtgggcgtgtactactgttttcaaggcagccacgtgccccggacctttggcggaggaacaaaggtggaaatcaagagagccctcgaggacctgaagaacgtgttcccacctgaggtggccgtgttcgagcctagcgaggccgagatcagccacacccagaaagccaccctcgtgtgcctggctaccggcttctaccccgaccatgtggaactgtcttggtgggtcaacggcaaagaggtgcacagcggcgtgtctaccgacccccagccactgaaagaacagcccgccctgaacgacagccggtactgcctgagcagcagactgagagtgtccgccaccttctggcagaacccccggaaccacttcagatgccaggtgcagttctacggcctgagcgagaacgacgagtggacccaggacagagccaagcccgtgacccagatcgtgtctgccgaagcctggggcagagccgattgcggatcccagagcttcggcctgctggaccccaagctgtgctacctgctggatggcatcctgttcatctacggcgtgatcctgaccgccctgttcctgagagtgaagttcagcagaagcgccgacgcccctgcctaccagcagggacagaaccaactgtacaacgagctgaacctgggcagacgggaagagtacgacgtgctggacaagcggagaggcagggaccctgagatgggcggaaagccccagcggagaaagaacccccaggaaggactgtataacgaactccagaaagacaagatggccgaagcctacagcgagatcggcatgaagggcgagcggagaagaggcaagggccacgatggcctgtaccagggcctgagcaccgccaccaaggacacctatgacgccctgcacatgcaggccctgcctccaagaagggccaagcgatctggatctggagcaacaaacttctcactactcaaacaagcaggtgacgtggaggagaatcccgggcctactagtatggactggatttggcgcatccttttccttgtcggcgctgctaccggcgcgcattccgggccccagctccagctgcaagagtctggacctggcctggtcaagcctagcgagacactgagcctgacctgtaccgtgtccggcgatagcatcagcagcggcgattactactggggctggatcagacagcctcctggcaaaggactggaatggatcggccacatctactacagcggcgtgacctactacaaccccagcctgaagtccagagtgaccatcagcgtggacaccagccggaaccagttctccctgaagctgtctagcgtgacagccgccgataccgccgtgtactactgcaccagagaggacagcagcaactggcggagtagaggccagggaacactggtcacagttagctctggatccggcggaggcggaagtggaggcggaggatctggcggcggaggctctttcgaacagatccaactggtgcagagcggcagcgagctgaagaaacctggggccagcgtgaaggtgtcctgcaaggccagcggctacacctttaccaactacggcatgaactgggtgcgccaggcccctggacagggcctgaaatggatgggctggatcaacaccaacaccggcgagcctaagtacgccgaagagttcaagggcagattcgccctgagcctggacaccagcgtgtccacagcctacctccagatcaacagcctgaaggccgaggataccgccgtgtacttctgcgccagaggctacggcaactacgccagaggggcttggctggcctattggggccagggaacactcgtgaccgtgtcctctacgcgtatccagaaccctgatcctgccgtgtaccagctgcgggatagcaagagcagcgacaagagcgtgtgtctgttcaccgacttcgacagccagaccaacgtgtcccagagcaaggactccgacgtgtacatcaccgataagaccgtgctggacatgcggagcatggacttcaagagcaactccgccgtggcctggtccaacaagtccgatttcgcctgcgccaacgccttcaacaacagcattatccccgaggacacattcttcccaagccccgagagcagctgcggtacccagagttttgggttgttggaccctaaattgtgctatctgttggacggaatcctgttcatttacggagtgatcctgaccgcattgttcctgcgggttaagttttccagatccgcagacgcacccgcttaccaacaagggcagaaccaactctacaatgaacttaatttggggcggagggaagagtacgacgttctggacaaaaggaggggacgagatcccgagatgggcggaaagcctcagcgaaggaagaatccgcaagaggggctttataacgaactccagaaagataaaatggcagaagcctatagtgagattgggatgaagggagaaaggaggaggggtaaaggtcacgatgggttgtaccaaggattgagcacagccactaaagatacctatgatgcgctccacatgcaggccctgccgccaaga

SEQ ID NO: 2698 - DNA, 3246 bp, Artificial Sequence
  Synthetic Polynucloetide
atggccttaccagtgaccgccttgctcctgccgctggccttgctgctccacgccgccaggccggaagtgcagctggttgaatctggcggaggactggttcagcctggcggatctctgagactgtcttgtgccgccagcggcttcagcttcagcgacttttggatgagctgggtccgacaggcccctggcaaaggacttgaatgggtcgccacaatcagccaggccggcagcgagaaggactacgtggactctgtgaagggcagattcaccatcagccgggacaacgccaagaagtccctgtacctccagatgaacagcctgagagccgaggacaccgccgtgtactattgtgcctctggcgtgtacagcttcgactacagaggccagggcaccctggtcacagtctcttctggtaccggcggaggcggatctggcggcggaggtagcggtggcggaggatctgaattcgacgagatcgtgctgacacagagccctgccacactctctctgagccctggcgaaagagccaccctgagctgtagcgccagcagcagcatcaactacatctactggctccagcagaagcccggccaggcccccagaatcctgatctacctgaccagcaacctggcctccggcgtgccagccagattttctggcagcggctccggcaccgacttcaccctgacaatcagcagcctggaacccgaggacttcgccgtgtactactgcctccagtggtccagcaaccccctgacctttggcggaggcaccaaggtggaaatcaagctcgaggacctgaagaacgtgttcccacctgaggtggccgtgttcgagcctagcgaggccgagatcagccacacccagaaagccaccctcgtgtgcctggctaccggcttctaccccgaccatgtggaactgtcttggtgggtcaacggcaaagaggtgcacagcggcgtgtctaccgacccccagccactgaaagaacagcccgccctgaacgacagccggtactgcctgagcagcagactgagagtgtccgccaccttctggcagaacccccggaaccacttcagatgccaggtgcagttctacggcctgagcgagaacgacgagtggacccaggacagagccaagcccgtgacccagatcgtgtctgccgaagcctggggcagagccgattgcggatcccagagcttcggcctgctggaccccaagctgtgctacctgctggatggcatcctgttcatctacggcgtgatcctgaccgccctgttcctgagagtgaagttcagcagaagcgccgacgcccctgcctaccagcagggacagaaccaactgtacaacgagctgaacctgggcagacgggaagagtacgacgtgctggacaagcggagaggcagggaccctgagatgggcggaaagccccagcggagaaagaacccccaggaaggactgtataacgaactccagaaagacaagatggccgaagcctacagcgagatcggcatgaagggcgagcggagaagaggcaagggccacgatggcctgtaccagggcctgagcaccgccaccaaggacacctatgacgccctgcacatgcaggccctgcctccaagaagggccaagcgatctggatctggagcaacaaacttctcactactcaaacaagcaggtgacgtggaggagaatcccgggcctactagtatggactggatttggcgcatccttttccttgtcggcgctgctaccggcgcgcattccgggccccagctccagctgcaagagtctggacctggcctggtcaagcctagcgagacactgagcctgacctgtaccgtgtccggcgatagcatcagcagcggcgattactactggggctggatcagacagcctcctggcaaaggactggaatggatcggccacatctactacagcggcgtgacctactacaaccccagcctgaagtccagagtgaccatcagcgtggacaccagccggaaccagttctccctgaagctgtctagcgtgacagccgccgataccgccgtgtactactgcaccagagaggacagcagcaactggcggagtagaggccagggaacactggtcacagttagctctggatccggcggaggcggaagtggaggcggaggatctggcggcggaggctctttcgaagaagtgcaactggtggaaagcgggggaggacttgtgaagcctggcggctctctgagactgagctgtgccgcctctggcttcaccttcagcagctacgacatgagctgggtgcgccaggctcctggcaagggactggaatgggtgtccaccatcagcagcggcggcagctacacctactacctggacagcatcaagggccggttcaccatctccagagacaacgccaagaacagcctgtacctccagatgaactccctgcgggccgaggacacagccgtgtattattgcgccagacagggcctggattactggggcagaggcacccttgtgaccgtgtcctctacgcgtatccagaaccctgatcctgccgtgtaccagctgcgggatagcaagagcagcgacaagagcgtgtgtctgttcaccgacttcgacagccagaccaacgtgtcccagagcaaggactccgacgtgtacatcaccgataagaccgtgctggacatgcggagcatggacttcaagagcaactccgccgtggcctggtccaacaagtccgatttcgcctgcgccaacgccttcaacaacagcattatccccgaggacacattcttcccaagccccgagagcagctgcggtacccagagttttgggttgttggaccctaaattgtgctatctgttggacggaatcctgttcatttacggagtgatcctgaccgcattgttcctgcgggttaagttttccagatccgcagacgcacccgcttaccaacaagggcagaaccaactctacaatgaacttaatttggggcggagggaagagtacgacgttctggacaaaaggaggggacgagatcccgagatgggcggaaagcctcagcgaaggaagaatccgcaagaggggctttataacgaactccagaaagataaaatggcagaagcctatagtgagattgggatgaagggagaaaggaggaggggtaaaggtcacgatgggttgtaccaaggattgagcacagccactaaagatacctatgatgcgctccacatgcaggccctgccgccaaga

SEQ ID NO: 2699 - DNA, 3273 bp, Artificial Sequence
  Synthetic Polynucloetide
atggccttaccagtgaccgccttgctcctgccgctggccttgctgctccacgccgccaggccggaagtgcagctggttgaatctggcggaggactggttcagcctggcggatctctgagactgtcttgtgccgccagcggcttcagcttcagcgacttttggatgagctgggtccgacaggcccctggcaaaggacttgaatgggtcgccacaatcagccaggccggcagcgagaaggactacgtggactctgtgaagggcagattcaccatcagccgggacaacgccaagaagtccctgtacctccagatgaacagcctgagagccgaggacaccgccgtgtactattgtgcctctggcgtgtacagcttcgactacagaggccagggcaccctggtcacagtctcttctggtaccggcggaggcggatctggcggcggaggtagcggtggcggaggatctgaattcgacatcgtgatgacccagagccccgatagcctggccgtgtctctgggagagagagccaccatcaactgccgggccagcaagagcgtgtccaccagcggctacagcttcatgcactggtatcagcagaagcccggccagccccccaagctgctgatctacctggcctccaacctggaaagcggcgtgcccgatagattcagcggcagcggctctggcaccgacttcaccctgaccatcagttctcttcaggccgaggacgtggccgtgtactactgccagcacagcagagaggtgccctggacattcggccagggcacaaaggtggaaatcaagcggctcgaggacctgaagaacgtgttcccacctgaggtggccgtgttcgagcctagcgaggccgagatcagccacacccagaaagccaccctcgtgtgcctggctaccggcttctaccccgaccatgtggaactgtcttggtgggtcaacggcaaagaggtgcacagcggcgtgtctaccgacccccagccactgaaagaacagcccgccctgaacgacagccggtactgcctgagcagcagactgagagtgtccgccaccttctggcagaacccccggaaccacttcagatgccaggtgcagttctacggcctgagcgagaacgacgagtggacccaggacagagccaagcccgtgacccagatcgtgtctgccgaagcctggggcagagccgattgcggatcccagagcttcggcctgctggaccccaagctgtgctacctgctggatggcatcctgttcatctacggcgtgatcctgaccgccctgttcctgagagtgaagttcagcagaagcgccgacgcccctgcctaccagcagggacagaaccaactgtacaacgagctgaacctgggcagacgggaagagtacgacgtgctggacaagcggagaggcagggaccctgagatgggcggaaagccccagcggagaaagaacccccaggaaggactgtataacgaactccagaaagacaagatggccgaagcctacagcgagatcggcatgaagggcgagcggagaagaggcaagggccacgatggcctgtaccagggcctgagcaccgccaccaaggacacctatgacgccctgcacatgcaggccctgcctccaagaagggccaagcgatctggatctggagcaacaaacttctcactactcaaacaagcaggtgacgtggaggagaatcccgggcctactagtatggactggatttggcgcatccttttccttgtcggcgctgctaccggcgcgcattccgggccccagctccagctgcaagagtctggacctggcctggtcaagcctagcgagacactgagcctgacctgtaccgtgtccggcgatagcatcagcagcggcgattactactggggctggatcagacagcctcctggcaaaggactggaatggatcggccacatctactacagcggcgtgacctactacaaccccagcctgaagtccagagtgaccatcagcgtggacaccagccggaaccagttctccctgaagctgtctagcgtgacagccgccgataccgccgtgtactactgcaccagagaggacagcagcaactggcggagtagaggccagggaacactggtcacagttagctctggatccggcggaggcggaagtggaggcggaggatctggcggcggaggctctttcgaacaggtgcagctggtgcagtctggggccgaagtgaagaaacctggggccagcgtgaaggtgtcctgcaaggccagcggatacacctttaccaactacggcatgaactgggtgcgccaggcccctggacagggcctggaatggatgggctggatcaacacctacaccggcgagcccacatacgccgacgccttcaagggcagattcgccttcagcctggacaccagcacctccaccgcctacctccagatcaacagcctgcggagcgacgacaccgccgtgtattattgcgccagagattacggcgactacgggatggactattggggccagggaaccaccgtgaccgtgtcctctacgcgtatccagaaccctgatcctgccgtgtaccagctgcgggatagcaagagcagcgacaagagcgtgtgtctgttcaccgacttcgacagccagaccaacgtgtcccagagcaaggactccgacgtgtacatcaccgataagaccgtgctggacatgcggagcatggacttcaagagcaactccgccgtggcctggtccaacaagtccgatttcgcctgcgccaacgccttcaacaacagcattatccccgaggacacattcttcccaagccccgagagcagctgcggtacccagagttttgggttgttggaccctaaattgtgctatctgttggacggaatcctgttcatttacggagtgatcctgaccgcattgttcctgcgggttaagttttccagatccgcagacgcacccgcttaccaacaagggcagaaccaactctacaatgaacttaatttggggcggagggaagagtacgacgttctggacaaaaggaggggacgagatcccgagatgggcggaaagcctcagcgaaggaagaatccgcaagaggggctttataacgaactccagaaagataaaatggcagaagcctatagtgagattgggatgaagggagaaaggaggaggggtaaaggtcacgatgggttgtaccaaggattgagcacagccactaaagatacctatgatgcgctccacatgcaggccctgccgccaaga

SEQ ID NO: 2700 - DNA, 3261 bp, Artificial Sequence
  Synthetic Polynucloetide
atggccttaccagtgaccgccttgctcctgccgctggccttgctgctccacgccgccaggccggaagtgcagctggttgaatctggcggaggactggttcagcctggcggatctctgagactgtcttgtgccgccagcggcttcagcttcagcgacttttggatgagctgggtccgacaggcccctggcaaaggacttgaatgggtcgccacaatcagccaggccggcagcgagaaggactacgtggactctgtgaagggcagattcaccatcagccgggacaacgccaagaagtccctgtacctccagatgaacagcctgagagccgaggacaccgccgtgtactattgtgcctctggcgtgtacagcttcgactacagaggccagggcaccctggtcacagtctcttctggtaccggcggaggcggatctggcggcggaggtagcggtggcggaggatctgaattcgacatcgtgatgacccagacccccctgaccctgagcgtgacaatcggacagcctgccagcatctcctgcaagagcagccagagcctgctggacagcgacggcaagacctacctgaactggctgctgcagaggccaggccagagccccgagagactgatctacctggtgtccaagctggactccggcgtgcccgatagattcacaggcagcggctccggcaccgacttcaccctgaagatcagccgggtggaagccgaggacctgggcgtgtactgttgttggcagggcacccacttcccttacaccttcggcggagggaccaaggtggaaatcaagggcctcgaggacctgaagaacgtgttcccacctgaggtggccgtgttcgagcctagcgaggccgagatcagccacacccagaaagccaccctcgtgtgcctggctaccggcttctaccccgaccatgtggaactgtcttggtgggtcaacggcaaagaggtgcacagcggcgtgtctaccgacccccagccactgaaagaacagcccgccctgaacgacagccggtactgcctgagcagcagactgagagtgtccgccaccttctggcagaacccccggaaccacttcagatgccaggtgcagttctacggcctgagcgagaacgacgagtggacccaggacagagccaagcccgtgacccagatcgtgtctgccgaagcctggggcagagccgattgcggatcccagagcttcggcctgctggaccccaagctgtgctacctgctggatggcatcctgttcatctacggcgtgatcctgaccgccctgttcctgagagtgaagttcagcagaagcgccgacgcccctgcctaccagcagggacagaaccaactgtacaacgagctgaacctgggcagacgggaagagtacgacgtgctggacaagcggagaggcagggaccctgagatgggcggaaagccccagcggagaaagaacccccaggaaggactgtataacgaactccagaaagacaagatggccgaagcctacagcgagatcggcatgaagggcgagcggagaagaggcaagggccacgatggcctgtaccagggcctgagcaccgccaccaaggacacctatgacgccctgcacatgcaggccctgcctccaagaagggccaagcgatctggatctggagcaacaaacttctcactactcaaacaagcaggtgacgtggaggagaatcccgggcctactagtatggactggatttggcgcatccttttccttgtcggcgctgctaccggcgcgcattccgggccccagctccagctgcaagagtctggacctggcctggtcaagcctagcgagacactgagcctgacctgtaccgtgtccggcgatagcatcagcagcggcgattactactggggctggatcagacagcctcctggcaaaggactggaatggatcggccacatctactacagcggcgtgacctactacaaccccagcctgaagtccagagtgaccatcagcgtggacaccagccggaaccagttctccctgaagctgtctagcgtgacagccgccgataccgccgtgtactactgcaccagagaggacagcagcaactggcggagtagaggccagggaacactggtcacagttagctctggatccggcggaggcggaagtggaggcggaggatctggcggcggaggctctttcgaacaggtgcaactgcagcagcctggcgctgaacttgtgcggccaggcgcctctgtgaagctgagctgtaaagccagcggctacaccttcaccagctactggatgaactgggtcaagcagcgcccaggccagggcctggaatggatcggaatgatcgaccccagcgacagcgagacacactacaaccacatcttcaaggacaaggccaccctgaccgtggacaagtccagcagcacagcctacctgcaactgtccagcctgaccagcgaggacagcgccgtgtactactgcgcccggaacctgtatctgtggggccagggaacaagcgtgaccgtgtctagcacgcgtatccagaaccctgatcctgccgtgtaccagctgcgggatagcaagagcagcgacaagagcgtgtgtctgttcaccgacttcgacagccagaccaacgtgtcccagagcaaggactccgacgtgtacatcaccgataagaccgtgctggacatgcggagcatggacttcaagagcaactccgccgtggcctggtccaacaagtccgatttcgcctgcgccaacgccttcaacaacagcattatccccgaggacacattcttcccaagccccgagagcagctgcggtacccagagttttgggttgttggaccctaaattgtgctatctgttggacggaatcctgttcatttacggagtgatcctgaccgcattgttcctgcgggttaagttttccagatccgcagacgcacccgcttaccaacaagggcagaaccaactctacaatgaacttaatttggggcggagggaagagtacgacgttctggacaaaaggaggggacgagatcccgagatgggcggaaagcctcagcgaaggaagaatccgcaagaggggctttataacgaactccagaaagataaaatggcagaagcctatagtgagattgggatgaagggagaaaggaggaggggtaaaggtcacgatgggttgtaccaaggattgagcacagccactaaagatacctatgatgcgctccacatgcaggccctgccgccaaga

SEQ ID NO: 2701 - DNA, 3285 bp, Artificial Sequence
  Synthetic Polynucloetide
atggccttaccagtgaccgccttgctcctgccgctggccttgctgctccacgccgccaggccggaagtgcagctggttgaatctggcggaggactggttcagcctggcggatctctgagactgtcttgtgccgccagcggcttcagcttcagcgacttttggatgagctgggtccgacaggcccctggcaaaggacttgaatgggtcgccacaatcagccaggccggcagcgagaaggactacgtggactctgtgaagggcagattcaccatcagccgggacaacgccaagaagtccctgtacctccagatgaacagcctgagagccgaggacaccgccgtgtactattgtgcctctggcgtgtacagcttcgactacagaggccagggcaccctggtcacagtctcttctggtaccggcggaggcggatctggcggcggaggtagcggtggcggaggatctgaattcgacatcgtgatgacccagagccccgatagcctggccgtgtctctgggagagagagccaccatcaactgcgagagcagccagagcctgctgaacagcggcaaccagaagaactacctgacctggtatcagcagaagcccggccagccccccaagcccctgatctattgggccagcaccagagaaagcggcgtgcccgatagattcagcggcagcggaagcggcaccgacttcaccctgaccatcagttctcttcaggccgaggacgtggccgtgtactactgccagaacgactacagctacccctacaccttcggccagggcaccaagctggaaatcaagagactcgaggacctgaagaacgtgttcccacctgaggtggccgtgttcgagcctagcgaggccgagatcagccacacccagaaagccaccctcgtgtgcctggctaccggcttctaccccgaccatgtggaactgtcttggtgggtcaacggcaaagaggtgcacagcggcgtgtctaccgacccccagccactgaaagaacagcccgccctgaacgacagccggtactgcctgagcagcagactgagagtgtccgccaccttctggcagaacccccggaaccacttcagatgccaggtgcagttctacggcctgagcgagaacgacgagtggacccaggacagagccaagcccgtgacccagatcgtgtctgccgaagcctggggcagagccgattgcggatcccagagcttcggcctgctggaccccaagctgtgctacctgctggatggcatcctgttcatctacggcgtgatcctgaccgccctgttcctgagagtgaagttcagcagaagcgccgacgcccctgcctaccagcagggacagaaccaactgtacaacgagctgaacctgggcagacgggaagagtacgacgtgctggacaagcggagaggcagggaccctgagatgggcggaaagccccagcggagaaagaacccccaggaaggactgtataacgaactccagaaagacaagatggccgaagcctacagcgagatcggcatgaagggcgagcggagaagaggcaagggccacgatggcctgtaccagggcctgagcaccgccaccaaggacacctatgacgccctgcacatgcaggccctgcctccaagaagggccaagcgatctggatctggagcaacaaacttctcactactcaaacaagcaggtgacgtggaggagaatcccgggcctactagtatggactggatttggcgcatccttttccttgtcggcgctgctaccggcgcgcattccgggccccagctccagctgcaagagtctggacctggcctggtcaagcctagcgagacactgagcctgacctgtaccgtgtccggcgatagcatcagcagcggcgattactactggggctggatcagacagcctcctggcaaaggactggaatggatcggccacatctactacagcggcgtgacctactacaaccccagcctgaagtccagagtgaccatcagcgtggacaccagccggaaccagttctccctgaagctgtctagcgtgacagccgccgataccgccgtgtactactgcaccagagaggacagcagcaactggcggagtagaggccagggaacactggtcacagttagctctggatccggcggaggcggaagtggaggcggaggatctggcggcggaggctctttcgaagaagtgcagctggtgcagtctggggccgaagtgaagaagcctggcgagagcctgaagatcagctgcaagggcagcggctacagcttcaccgactactacatgaagtgggccagacagatgcccggcaagggcctggaatggatgggcgacatcatccccagcaacggggccaccttctacaaccagaaattcaagggccaagtgaccatctccgccgacaagagcatcagcaccacctacctccagtggtccagcctgaaggccagcgacaccgccatgtactattgcgccagaagccatctgctgcgggccagttggttcgcctattggggccagggaacaatggtcacagtgtccagcacgcgtatccagaaccctgatcctgccgtgtaccagctgcgggatagcaagagcagcgacaagagcgtgtgtctgttcaccgacttcgacagccagaccaacgtgtcccagagcaaggactccgacgtgtacatcaccgataagaccgtgctggacatgcggagcatggacttcaagagcaactccgccgtggcctggtccaacaagtccgatttcgcctgcgccaacgccttcaacaacagcattatccccgaggacacattcttcccaagccccgagagcagctgcggtacccagagttttgggttgttggaccctaaattgtgctatctgttggacggaatcctgttcatttacggagtgatcctgaccgcattgttcctgcgggttaagttttccagatccgcagacgcacccgcttaccaacaagggcagaaccaactctacaatgaacttaatttggggcggagggaagagtacgacgttctggacaaaaggaggggacgagatcccgagatgggcggaaagcctcagcgaaggaagaatccgcaagaggggctttataacgaactccagaaagataaaatggcagaagcctatagtgagattgggatgaagggagaaaggaggaggggtaaaggtcacgatgggttgtaccaaggattgagcacagccactaaagatacctatgatgcgctccacatgcaggccctgccgccaaga

SEQ ID NO: 2702 - DNA, 3270 bp, Artificial Sequence
  Synthetic Polynucloetide
atggccttaccagtgaccgccttgctcctgccgctggccttgctgctccacgccgccaggccggaagtgcagctggttgaatctggcggaggactggttcagcctggcggatctctgagactgtcttgtgccgccagcggcttcagcttcagcgacttttggatgagctgggtccgacaggcccctggcaaaggacttgaatgggtcgccacaatcagccaggccggcagcgagaaggactacgtggactctgtgaagggcagattcaccatcagccgggacaacgccaagaagtccctgtacctccagatgaacagcctgagagccgaggacaccgccgtgtactattgtgcctctggcgtgtacagcttcgactacagaggccagggcaccctggtcacagtctcttctggtaccggcggaggcggatctggcggcggaggtagcggtggcggaggatctgaattcgacatccagatgacccagtctaccagttccctgagtgcatccctcggagacagggtgacgatcagttgcagcgcaagccaagggatcaataactatctgaactggtatcagcagaaaccggacggaacagtcgaactcctgatttattacaccagcacccttcagagtggcgtcccttcccggttcagtggctccggaagcgggaccgattactccctgaccatttctaatctggagccagaggacataggaacgtattattgccagcagtatagtaaactgccacgaacttttggaggggggacgaaactggagatcaaactcgaggacctgaagaacgtgttcccacctgaggtggccgtgttcgagcctagcgaggccgagatcagccacacccagaaagccaccctcgtgtgcctggctaccggcttctaccccgaccatgtggaactgtcttggtgggtcaacggcaaagaggtgcacagcggcgtgtctaccgacccccagccactgaaagaacagcccgccctgaacgacagccggtactgcctgagcagcagactgagagtgtccgccaccttctggcagaacccccggaaccacttcagatgccaggtgcagttctacggcctgagcgagaacgacgagtggacccaggacagagccaagcccgtgacccagatcgtgtctgccgaagcctggggcagagccgattgcggatcccagagcttcggcctgctggaccccaagctgtgctacctgctggatggcatcctgttcatctacggcgtgatcctgaccgccctgttcctgagagtgaagttcagcagaagcgccgacgcccctgcctaccagcagggacagaaccaactgtacaacgagctgaacctgggcagacgggaagagtacgacgtgctggacaagcggagaggcagggaccctgagatgggcggaaagccccagcggagaaagaacccccaggaaggactgtataacgaactccagaaagacaagatggccgaagcctacagcgagatcggcatgaagggcgagcggagaagaggcaagggccacgatggcctgtaccagggcctgagcaccgccaccaaggacacctatgacgccctgcacatgcaggccctgcctccaagaagggccaagcgatctggatctggagcaacaaacttctcactactcaaacaagcaggtgacgtggaggagaatcccgggcctactagtatggactggatttggcgcatccttttccttgtcggcgctgctaccggcgcgcattccgggccccagctccagctgcaagagtctggacctggcctggtcaagcctagcgagacactgagcctgacctgtaccgtgtccggcgatagcatcagcagcggcgattactactggggctggatcagacagcctcctggcaaaggactggaatggatcggccacatctactacagcggcgtgacctactacaaccccagcctgaagtccagagtgaccatcagcgtggacaccagccggaaccagttctccctgaagctgtctagcgtgacagccgccgataccgccgtgtactactgcaccagagaggacagcagcaactggcggagtagaggccagggaacactggtcacagttagctctggatccggcggaggcggaagtggaggcggaggatctggcggcggaggctctttcgaacaggtgcaactccagcagtccggaagcgagcttatgatgccaggggcatcagtgaagatcagctgcaaggctactggctacaccttctctaattactggatagagtgggttaaacaaaggccagggcacggcctggaatggatcggcgagatcctgcctgggacaggccgaaccatttataacgagaagttcaaaggcaaggctactttcaccgcagatataagctctaatacagtgcaaatgcagctctcttccctgacaagtgaggatagtgccgtgtattattgcgcacgaagagattactatggaaatttttattacgctatggattattggggtcaaggaacaagtgtgaccgttagcagcacgcgtatccagaaccctgatcctgccgtgtaccagctgcgggatagcaagagcagcgacaagagcgtgtgtctgttcaccgacttcgacagccagaccaacgtgtcccagagcaaggactccgacgtgtacatcaccgataagaccgtgctggacatgcggagcatggacttcaagagcaactccgccgtggcctggtccaacaagtccgatttcgcctgcgccaacgccttcaacaacagcattatccccgaggacacattcttcccaagccccgagagcagctgcggtacccagagttttgggttgttggaccctaaattgtgctatctgttggacggaatcctgttcatttacggagtgatcctgaccgcattgttcctgcgggttaagttttccagatccgcagacgcacccgcttaccaacaagggcagaaccaactctacaatgaacttaatttggggcggagggaagagtacgacgttctggacaaaaggaggggacgagatcccgagatgggcggaaagcctcagcgaaggaagaatccgcaagaggggctttataacgaactccagaaagataaaatggcagaagcctatagtgagattgggatgaagggagaaaggaggaggggtaaaggtcacgatgggttgtaccaaggattgagcacagccactaaagatacctatgatgcgctccacatgcaggccctgccgccaaga

SEQ ID NO: 2703 - DNA, 3255 bp, Artificial Sequence
  Synthetic Polynucloetide
atggccttaccagtgaccgccttgctcctgccgctggccttgctgctccacgccgccaggccggaagtgcagctggttgaatctggcggaggactggttcagcctggcggatctctgagactgtcttgtgccgccagcggcttcagcttcagcgacttttggatgagctgggtccgacaggcccctggcaaaggacttgaatgggtcgccacaatcagccaggccggcagcgagaaggactacgtggactctgtgaagggcagattcaccatcagccgggacaacgccaagaagtccctgtacctccagatgaacagcctgagagccgaggacaccgccgtgtactattgtgcctctggcgtgtacagcttcgactacagaggccagggcaccctggtcacagtctcttctggtaccggcggaggcggatctggcggcggaggtagcggtggcggaggatctgaattcgacatccagatgacccagagccctgccagcctgtccgtgtctgtgggcgagacagtgaccatcacctgtcgggccagcgagaacatctacagcaacctggcctggtatcagcagaagcagggcaagagcccccaactgctggtgtacgccgccaccaatctggccgatggcgtgcccagcagattttccggctctggcagcggcacccagtacagcctgaagatcaacagcctccagagcgaggacttcggcagctactactgccagcacttctggggcacctggacctttggaggaggcaccaccctggaaatcaagctcgaggacctgaagaacgtgttcccacctgaggtggccgtgttcgagcctagcgaggccgagatcagccacacccagaaagccaccctcgtgtgcctggctaccggcttctaccccgaccatgtggaactgtcttggtgggtcaacggcaaagaggtgcacagcggcgtgtctaccgacccccagccactgaaagaacagcccgccctgaacgacagccggtactgcctgagcagcagactgagagtgtccgccaccttctggcagaacccccggaaccacttcagatgccaggtgcagttctacggcctgagcgagaacgacgagtggacccaggacagagccaagcccgtgacccagatcgtgtctgccgaagcctggggcagagccgattgcggatcccagagcttcggcctgctggaccccaagctgtgctacctgctggatggcatcctgttcatctacggcgtgatcctgaccgccctgttcctgagagtgaagttcagcagaagcgccgacgcccctgcctaccagcagggacagaaccaactgtacaacgagctgaacctgggcagacgggaagagtacgacgtgctggacaagcggagaggcagggaccctgagatgggcggaaagccccagcggagaaagaacccccaggaaggactgtataacgaactccagaaagacaagatggccgaagcctacagcgagatcggcatgaagggcgagcggagaagaggcaagggccacgatggcctgtaccagggcctgagcaccgccaccaaggacacctatgacgccctgcacatgcaggccctgcctccaagaagggccaagcgatctggatctggagcaacaaacttctcactactcaaacaagcaggtgacgtggaggagaatcccgggcctactagtatggactggatttggcgcatccttttccttgtcggcgctgctaccggcgcgcattccgggccccagctccagctgcaagagtctggacctggcctggtcaagcctagcgagacactgagcctgacctgtaccgtgtccggcgatagcatcagcagcggcgattactactggggctggatcagacagcctcctggcaaaggactggaatggatcggccacatctactacagcggcgtgacctactacaaccccagcctgaagtccagagtgaccatcagcgtggacaccagccggaaccagttctccctgaagctgtctagcgtgacagccgccgataccgccgtgtactactgcaccagagaggacagcagcaactggcggagtagaggccagggaacactggtcacagttagctctggatccggcggaggcggaagtggaggcggaggatctggcggcggaggctctttcgaagaagtgcaactccagcagagcggccctgagcttgtgaagcctggcgcttccgtgaagatgagctgcaaggccagcggctacaccttcaccgactactacatgaagtggatgaagcagagccacggcaagtccctggaatggatcggcgacatcaaccccaacaacggcggcaccacctacaaccagaagttcaagggcaaggccaccctgaccgtggacaagagcagcagcaccgcctacatgcaactgaacagcctgaccagcgaggacagcgccgtgtactactgcgccagagactacggctacggctatttcgactactggggccagggcacaaccctgacagtgtcctctacgcgtatccagaaccctgatcctgccgtgtaccagctgcgggatagcaagagcagcgacaagagcgtgtgtctgttcaccgacttcgacagccagaccaacgtgtcccagagcaaggactccgacgtgtacatcaccgataagaccgtgctggacatgcggagcatggacttcaagagcaactccgccgtggcctggtccaacaagtccgatttcgcctgcgccaacgccttcaacaacagcattatccccgaggacacattcttcccaagccccgagagcagctgcggtacccagagttttgggttgttggaccctaaattgtgctatctgttggacggaatcctgttcatttacggagtgatcctgaccgcattgttcctgcgggttaagttttccagatccgcagacgcacccgcttaccaacaagggcagaaccaactctacaatgaacttaatttggggcggagggaagagtacgacgttctggacaaaaggaggggacgagatcccgagatgggcggaaagcctcagcgaaggaagaatccgcaagaggggctttataacgaactccagaaagataaaatggcagaagcctatagtgagattgggatgaagggagaaaggaggaggggtaaaggtcacgatgggttgtaccaaggattgagcacagccactaaagatacctatgatgcgctccacatgcaggccctgccgccaaga

SEQ ID NO: 2704 - DNA, 3264 bp, Artificial Sequence
  Synthetic Polynucloetide
atggccttaccagtgaccgccttgctcctgccgctggccttgctgctccacgccgccaggccggaagtgcagctggttgaatctggcggaggactggttcagcctggcggatctctgagactgtcttgtgccgccagcggcttcagcttcagcgacttttggatgagctgggtccgacaggcccctggcaaaggacttgaatgggtcgccacaatcagccaggccggcagcgagaaggactacgtggactctgtgaagggcagattcaccatcagccgggacaacgccaagaagtccctgtacctccagatgaacagcctgagagccgaggacaccgccgtgtactattgtgcctctggcgtgtacagcttcgactacagaggccagggcaccctggtcacagtctcttctggtaccggcggaggcggatctggcggcggaggtagcggtggcggaggatctgaattcgagatcgtgctgacacagagccctggcaccctgagcctgtctccaggcgaaagagccacactgagctgtcgggcctctcagagcgtgggaggctacctggcttggtatcagcagaagccaggccaggcccccagactgctgatctacgacgccagcaatcgggccacaggcatccccgccagattttctggcagcggctccggcaccgacttcaccctgacaatcagcagcctggaacccgaggacttcgccgtgtactactgccagcagcggaacaactggccccccatgtacacattcggccagggcaccaagctggaaatcaagagactcgaggacctgaagaacgtgttcccacctgaggtggccgtgttcgagcctagcgaggccgagatcagccacacccagaaagccaccctcgtgtgcctggctaccggcttctaccccgaccatgtggaactgtcttggtgggtcaacggcaaagaggtgcacagcggcgtgtctaccgacccccagccactgaaagaacagcccgccctgaacgacagccggtactgcctgagcagcagactgagagtgtccgccaccttctggcagaacccccggaaccacttcagatgccaggtgcagttctacggcctgagcgagaacgacgagtggacccaggacagagccaagcccgtgacccagatcgtgtctgccgaagcctggggcagagccgattgcggatcccagagcttcggcctgctggaccccaagctgtgctacctgctggatggcatcctgttcatctacggcgtgatcctgaccgccctgttcctgagagtgaagttcagcagaagcgccgacgcccctgcctaccagcagggacagaaccaactgtacaacgagctgaacctgggcagacgggaagagtacgacgtgctggacaagcggagaggcagggaccctgagatgggcggaaagccccagcggagaaagaacccccaggaaggactgtataacgaactccagaaagacaagatggccgaagcctacagcgagatcggcatgaagggcgagcggagaagaggcaagggccacgatggcctgtaccagggcctgagcaccgccaccaaggacacctatgacgccctgcacatgcaggccctgcctccaagaagggccaagcgatctggatctggagcaacaaacttctcactactcaaacaagcaggtgacgtggaggagaatcccgggcctactagtatggactggatttggcgcatccttttccttgtcggcgctgctaccggcgcgcattccgggccccagctccagctgcaagagtctggacctggcctggtcaagcctagcgagacactgagcctgacctgtaccgtgtccggcgatagcatcagcagcggcgattactactggggctggatcagacagcctcctggcaaaggactggaatggatcggccacatctactacagcggcgtgacctactacaaccccagcctgaagtccagagtgaccatcagcgtggacaccagccggaaccagttctccctgaagctgtctagcgtgacagccgccgataccgccgtgtactactgcaccagagaggacagcagcaactggcggagtagaggccagggaacactggtcacagttagctctggatccggcggaggcggaagtggaggcggaggatctggcggcggaggctctttcgaacaggtgcaactggtgcagagcggagccgaagtgaagaaacccggcagcagcgtgaaggtgtcctgcaaggcttccggcggcaccttcagcagctacgccatttcttgggtgcgccaggctcctggacagggcctggaatggatgggcggcatcatccctatcctgggcaccgccaactacgcccagaaattccagggcagagtgaccatcaccgccgacgagagcaccagcaccgcctacatggaactgagcagcctgcggagcgaggacacagccgtgtattattgcgccagatggggcggaggggccttcgacatttggggccagggaacaatggtcaccgtgtccagcacgcgtatccagaaccctgatcctgccgtgtaccagctgcgggatagcaagagcagcgacaagagcgtgtgtctgttcaccgacttcgacagccagaccaacgtgtcccagagcaaggactccgacgtgtacatcaccgataagaccgtgctggacatgcggagcatggacttcaagagcaactccgccgtggcctggtccaacaagtccgatttcgcctgcgccaacgccttcaacaacagcattatccccgaggacacattcttcccaagccccgagagcagctgcggtacccagagttttgggttgttggaccctaaattgtgctatctgttggacggaatcctgttcatttacggagtgatcctgaccgcattgttcctgcgggttaagttttccagatccgcagacgcacccgcttaccaacaagggcagaaccaactctacaatgaacttaatttggggcggagggaagagtacgacgttctggacaaaaggaggggacgagatcccgagatgggcggaaagcctcagcgaaggaagaatccgcaagaggggctttataacgaactccagaaagataaaatggcagaagcctatagtgagattgggatgaagggagaaaggaggaggggtaaaggtcacgatgggttgtaccaaggattgagcacagccactaaagatacctatgatgcgctccacatgcaggccctgccgccaaga

SEQ ID NO: 2705 - DNA, 3249 bp, Artificial Sequence
  Synthetic Polynucloetide
atggccttaccagtgaccgccttgctcctgccgctggccttgctgctccacgccgccaggccggaagtgcagctggttgaatctggcggaggactggttcagcctggcggatctctgagactgtcttgtgccgccagcggcttcagcttcagcgacttttggatgagctgggtccgacaggcccctggcaaaggacttgaatgggtcgccacaatcagccaggccggcagcgagaaggactacgtggactctgtgaagggcagattcaccatcagccgggacaacgccaagaagtccctgtacctccagatgaacagcctgagagccgaggacaccgccgtgtactattgtgcctctggcgtgtacagcttcgactacagaggccagggcaccctggtcacagtctcttctggtaccggcggaggcggatctggcggcggaggtagcggtggcggaggatctgaattccagatcgtgctgacacagagccctgccctgatgagcgccagccctggcgagaaagtgaccatgacctgtagcgccagcagcagcgtgcgctacatgtactggtatcagcagaagcccagaagcagccccaagccctggattcacctgaccagcaatctggcctctggcgtgcccgctagattttccggctctggcagcggcaccagctacagcctgaccatcagcagcatggaagccgaggacgccgccacctactactgccagcagtggtccagccaccccttcacatttggctccggcaccaagctggaaatcaagctcgaggacctgaagaacgtgttcccacctgaggtggccgtgttcgagcctagcgaggccgagatcagccacacccagaaagccaccctcgtgtgcctggctaccggcttctaccccgaccatgtggaactgtcttggtgggtcaacggcaaagaggtgcacagcggcgtgtctaccgacccccagccactgaaagaacagcccgccctgaacgacagccggtactgcctgagcagcagactgagagtgtccgccaccttctggcagaacccccggaaccacttcagatgccaggtgcagttctacggcctgagcgagaacgacgagtggacccaggacagagccaagcccgtgacccagatcgtgtctgccgaagcctggggcagagccgattgcggatcccagagcttcggcctgctggaccccaagctgtgctacctgctggatggcatcctgttcatctacggcgtgatcctgaccgccctgttcctgagagtgaagttcagcagaagcgccgacgcccctgcctaccagcagggacagaaccaactgtacaacgagctgaacctgggcagacgggaagagtacgacgtgctggacaagcggagaggcagggaccctgagatgggcggaaagccccagcggagaaagaacccccaggaaggactgtataacgaactccagaaagacaagatggccgaagcctacagcgagatcggcatgaagggcgagcggagaagaggcaagggccacgatggcctgtaccagggcctgagcaccgccaccaaggacacctatgacgccctgcacatgcaggccctgcctccaagaagggccaagcgatctggatctggagcaacaaacttctcactactcaaacaagcaggtgacgtggaggagaatcccgggcctactagtatggactggatttggcgcatccttttccttgtcggcgctgctaccggcgcgcattccgggccccagctccagctgcaagagtctggacctggcctggtcaagcctagcgagacactgagcctgacctgtaccgtgtccggcgatagcatcagcagcggcgattactactggggctggatcagacagcctcctggcaaaggactggaatggatcggccacatctactacagcggcgtgacctactacaaccccagcctgaagtccagagtgaccatcagcgtggacaccagccggaaccagttctccctgaagctgtctagcgtgacagccgccgataccgccgtgtactactgcaccagagaggacagcagcaactggcggagtagaggccagggaacactggtcacagttagctctggatccggcggaggcggaagtggaggcggaggatctggcggcggaggctctttcgaagatgtgcaactccaggaaagcggccctggccttgtgaagcctagccagagcctgtccctgacctgtaccgtgaccggcttcagcatcaccagcgactactcttggaactggatcagacagttccctggcaacaaactggaatggatgggctacatcagctactccggccacacctcctacaaccccagcctggaaagccggatctccatcaccagagacaccagcaagaaccagttcttcttgcaactgaacagcgtgaccaccgaggataccgccacatattactgtaccagaggcaactgggacgtggtgtactggggccagggcacacttgtgaccgtgtctgctacgcgtatccagaaccctgatcctgccgtgtaccagctgcgggatagcaagagcagcgacaagagcgtgtgtctgttcaccgacttcgacagccagaccaacgtgtcccagagcaaggactccgacgtgtacatcaccgataagaccgtgctggacatgcggagcatggacttcaagagcaactccgccgtggcctggtccaacaagtccgatttcgcctgcgccaacgccttcaacaacagcattatccccgaggacacattcttcccaagccccgagagcagctgcggtacccagagttttgggttgttggaccctaaattgtgctatctgttggacggaatcctgttcatttacggagtgatcctgaccgcattgttcctgcgggttaagttttccagatccgcagacgcacccgcttaccaacaagggcagaaccaactctacaatgaacttaatttggggcggagggaagagtacgacgttctggacaaaaggaggggacgagatcccgagatgggcggaaagcctcagcgaaggaagaatccgcaagaggggctttataacgaactccagaaagataaaatggcagaagcctatagtgagattgggatgaagggagaaaggaggaggggtaaaggtcacgatgggttgtaccaaggattgagcacagccactaaagatacctatgatgcgctccacatgcaggccctgccgccaaga

SEQ ID NO: 2706 - DNA, 3279 bp, Artificial Sequence
  Synthetic Polynucloetide
atggccttaccagtgaccgccttgctcctgccgctggccttgctgctccacgccgccaggccggaagtgcagctggttgaatctggcggaggactggttcagcctggcggatctctgagactgtcttgtgccgccagcggcttcagcttcagcgacttttggatgagctgggtccgacaggcccctggcaaaggacttgaatgggtcgccacaatcagccaggccggcagcgagaaggactacgtggactctgtgaagggcagattcaccatcagccgggacaacgccaagaagtccctgtacctccagatgaacagcctgagagccgaggacaccgccgtgtactattgtgcctctggcgtgtacagcttcgactacagaggccagggcaccctggtcacagtctcttctggtaccggcggaggcggatctggcggcggaggtagcggtggcggaggatctgaattcgacgtcgtgatgacccagagccctctgagcctgcctgtgacactgggacagcctgccagcatctcctgtcggagcagccagagcatcgtgcacagcgacggcaacacctacctggaatggtatcagcagcggccaggccagagccccagacggctgatctacaaggtgtccaacagattcagcggcgtgcccgacagattctccggcagcggctctggcaccgacttcaccctgaagatcagcagagtggaagccgaggacgtgggcgtgtactactgttttcaaggcagccacgccccctggacctttggcggaggaacaaaggtggaaatcaagctcgaggacctgaagaacgtgttcccacctgaggtggccgtgttcgagcctagcgaggccgagatcagccacacccagaaagccaccctcgtgtgcctggctaccggcttctaccccgaccatgtggaactgtcttggtgggtcaacggcaaagaggtgcacagcggcgtgtctaccgacccccagccactgaaagaacagcccgccctgaacgacagccggtactgcctgagcagcagactgagagtgtccgccaccttctggcagaacccccggaaccacttcagatgccaggtgcagttctacggcctgagcgagaacgacgagtggacccaggacagagccaagcccgtgacccagatcgtgtctgccgaagcctggggcagagccgattgcggatcccagagcttcggcctgctggaccccaagctgtgctacctgctggatggcatcctgttcatctacggcgtgatcctgaccgccctgttcctgagagtgaagttcagcagaagcgccgacgcccctgcctaccagcagggacagaaccaactgtacaacgagctgaacctgggcagacgggaagagtacgacgtgctggacaagcggagaggcagggaccctgagatgggcggaaagccccagcggagaaagaacccccaggaaggactgtataacgaactccagaaagacaagatggccgaagcctacagcgagatcggcatgaagggcgagcggagaagaggcaagggccacgatggcctgtaccagggcctgagcaccgccaccaaggacacctatgacgccctgcacatgcaggccctgcctccaagaagggccaagcgatctggatctggagcaacaaacttctcactactcaaacaagcaggtgacgtggaggagaatcccgggcctactagtatggactggatttggcgcatccttttccttgtcggcgctgctaccggcgcgcattccgggccccagctccagctgcaagagtctggacctggcctggtcaagcctagcgagacactgagcctgacctgtaccgtgtccggcgatagcatcagcagcggcgattactactggggctggatcagacagcctcctggcaaaggactggaatggatcggccacatctactacagcggcgtgacctactacaaccccagcctgaagtccagagtgaccatcagcgtggacaccagccggaaccagttctccctgaagctgtctagcgtgacagccgccgataccgccgtgtactactgcaccagagaggacagcagcaactggcggagtagaggccagggaacactggtcacagttagctctggatccggcggaggcggaagtggaggcggaggatctggcggcggaggctctttcgaagaagtgcaactggtggaatcaggcggcggactggtgcagcctggcggatctctgagactgagctgtgccgccagcggcttcaccttcagcagctacggaatgcactgggtgcgccaggcccctggcaaaggactggaatgggtggcctacatcaccaccagaagcagcaccatctactacgccgacagcgtgaagggccggttcaccatctccagagacaacgccaagaacagcctgtacctccagatgaactccctgcgggccgaggacaccgccgtgtactattgcaccagagagcccctgaccggctactacgctatggactattggggccagggcaccagcgtgaccgtgtctagtacgcgtatccagaaccctgatcctgccgtgtaccagctgcgggatagcaagagcagcgacaagagcgtgtgtctgttcaccgacttcgacagccagaccaacgtgtcccagagcaaggactccgacgtgtacatcaccgataagaccgtgctggacatgcggagcatggacttcaagagcaactccgccgtggcctggtccaacaagtccgatttcgcctgcgccaacgccttcaacaacagcattatccccgaggacacattcttcccaagccccgagagcagctgcggtacccagagttttgggttgttggaccctaaattgtgctatctgttggacggaatcctgttcatttacggagtgatcctgaccgcattgttcctgcgggttaagttttccagatccgcagacgcacccgcttaccaacaagggcagaaccaactctacaatgaacttaatttggggcggagggaagagtacgacgttctggacaaaaggaggggacgagatcccgagatgggcggaaagcctcagcgaaggaagaatccgcaagaggggctttataacgaactccagaaagataaaatggcagaagcctatagtgagattgggatgaagggagaaaggaggaggggtaaaggtcacgatgggttgtaccaaggattgagcacagccactaaagatacctatgatgcgctccacatgcaggccctgccgccaaga

SEQ ID NO: 2707 - DNA, 3255 bp, Artificial Sequence
  Synthetic Polynucloetide
atggccttaccagtgaccgccttgctcctgccgctggccttgctgctccacgccgccaggccggaagtgcagctggttgaatctggcggaggactggttcagcctggcggatctctgagactgtcttgtgccgccagcggcttcagcttcagcgacttttggatgagctgggtccgacaggcccctggcaaaggacttgaatgggtcgccacaatcagccaggccggcagcgagaaggactacgtggactctgtgaagggcagattcaccatcagccgggacaacgccaagaagtccctgtacctccagatgaacagcctgagagccgaggacaccgccgtgtactattgtgcctctggcgtgtacagcttcgactacagaggccagggcaccctggtcacagtctcttctggtaccggcggaggcggatctggcggcggaggtagcggtggcggaggatctgaattcgacatccagatgacccagagccccagcagcctgtctgccagcgtgggcgacagagtgaccatcacctgtagagccagccagagcatcagcctgtggctgaactggtatcagcagaagcccggcaaggcccccaagctgctgatctacgccgccagcacactccagagcggcgtgccaagcagattttccggcagcggctccggcaccgacttcaccctgacaatcagctccctccagcccgaggacttcgccacctactactgccagcagtactacaccagcccctacaccttcggccagggcaccaaggtggaaatcaagagactcgaggacctgaagaacgtgttcccacctgaggtggccgtgttcgagcctagcgaggccgagatcagccacacccagaaagccaccctcgtgtgcctggctaccggcttctaccccgaccatgtggaactgtcttggtgggtcaacggcaaagaggtgcacagcggcgtgtctaccgacccccagccactgaaagaacagcccgccctgaacgacagccggtactgcctgagcagcagactgagagtgtccgccaccttctggcagaacccccggaaccacttcagatgccaggtgcagttctacggcctgagcgagaacgacgagtggacccaggacagagccaagcccgtgacccagatcgtgtctgccgaagcctggggcagagccgattgcggatcccagagcttcggcctgctggaccccaagctgtgctacctgctggatggcatcctgttcatctacggcgtgatcctgaccgccctgttcctgagagtgaagttcagcagaagcgccgacgcccctgcctaccagcagggacagaaccaactgtacaacgagctgaacctgggcagacgggaagagtacgacgtgctggacaagcggagaggcagggaccctgagatgggcggaaagccccagcggagaaagaacccccaggaaggactgtataacgaactccagaaagacaagatggccgaagcctacagcgagatcggcatgaagggcgagcggagaagaggcaagggccacgatggcctgtaccagggcctgagcaccgccaccaaggacacctatgacgccctgcacatgcaggccctgcctccaagaagggccaagcgatctggatctggagcaacaaacttctcactactcaaacaagcaggtgacgtggaggagaatcccgggcctactagtatggactggatttggcgcatccttttccttgtcggcgctgctaccggcgcgcattccgggccccagctccagctgcaagagtctggacctggcctggtcaagcctagcgagacactgagcctgacctgtaccgtgtccggcgatagcatcagcagcggcgattactactggggctggatcagacagcctcctggcaaaggactggaatggatcggccacatctactacagcggcgtgacctactacaaccccagcctgaagtccagagtgaccatcagcgtggacaccagccggaaccagttctccctgaagctgtctagcgtgacagccgccgataccgccgtgtactactgcaccagagaggacagcagcaactggcggagtagaggccagggaacactggtcacagttagctctggatccggcggaggcggaagtggaggcggaggatctggcggcggaggctctttcgaacaggtgcaactgctggaatctggcggcggactggtgcagcctggcggatctctgagactgagctgtgccgccagcggcttcaccttcagcagctacgccatgagctgggtgcgccaggcccctggaaaaggactggaatgggtgtccgtgatccggtccagcggcagcagcacctattacgccgatagcgtgaagggccggttcaccatcagccgggacaacagcaagaacaccctgtacctccagatgaacagcctgcgggccgaggacaccgccgtgtactattgtgctaggggaggcggctacttcgactactggggccagggaacactcgtgaccgtgtcctctacgcgtatccagaaccctgatcctgccgtgtaccagctgcgggatagcaagagcagcgacaagagcgtgtgtctgttcaccgacttcgacagccagaccaacgtgtcccagagcaaggactccgacgtgtacatcaccgataagaccgtgctggacatgcggagcatggacttcaagagcaactccgccgtggcctggtccaacaagtccgatttcgcctgcgccaacgccttcaacaacagcattatccccgaggacacattcttcccaagccccgagagcagctgcggtacccagagttttgggttgttggaccctaaattgtgctatctgttggacggaatcctgttcatttacggagtgatcctgaccgcattgttcctgcgggttaagttttccagatccgcagacgcacccgcttaccaacaagggcagaaccaactctacaatgaacttaatttggggcggagggaagagtacgacgttctggacaaaaggaggggacgagatcccgagatgggcggaaagcctcagcgaaggaagaatccgcaagaggggctttataacgaactccagaaagataaaatggcagaagcctatagtgagattgggatgaagggagaaaggaggaggggtaaaggtcacgatgggttgtaccaaggattgagcacagccactaaagatacctatgatgcgctccacatgcaggccctgccgccaaga

SEQ ID NO: 2708 - DNA, 3264 bp, Artificial Sequence
  Synthetic Polynucloetide
atggccttaccagtgaccgccttgctcctgccgctggccttgctgctccacgccgccaggccggaagtgcagctggttgaatctggcggaggactggttcagcctggcggatctctgagactgtcttgtgccgccagcggcttcagcttcagcgacttttggatgagctgggtccgacaggcccctggcaaaggacttgaatgggtcgccacaatcagccaggccggcagcgagaaggactacgtggactctgtgaagggcagattcaccatcagccgggacaacgccaagaagtccctgtacctccagatgaacagcctgagagccgaggacaccgccgtgtactattgtgcctctggcgtgtacagcttcgactacagaggccagggcaccctggtcacagtctcttctggtaccggcggaggcggatctggcggcggaggtagcggtggcggaggatctgaattcgacatccagatgacccagagccccagcagcctgtctgccagcgtgggcgacagagtgaccatcacctgtagagccagccagagcatcagcagctacctgaactggtatcagcagaagcccggcaaggcccccaaactgctgatctacgccgtgtccacactccagagcggcgtgcccagcagattttctggcagcggctccggcaccgacttcaccctgacaatcagctccctccagcccgaggacttcgccacctactactgtcagcagagcggcaccttccctcccaccacatttggacagggcaccaaggtggaaatcaagagactcgaggacctgaagaacgtgttcccacctgaggtggccgtgttcgagcctagcgaggccgagatcagccacacccagaaagccaccctcgtgtgcctggctaccggcttctaccccgaccatgtggaactgtcttggtgggtcaacggcaaagaggtgcacagcggcgtgtctaccgacccccagccactgaaagaacagcccgccctgaacgacagccggtactgcctgagcagcagactgagagtgtccgccaccttctggcagaacccccggaaccacttcagatgccaggtgcagttctacggcctgagcgagaacgacgagtggacccaggacagagccaagcccgtgacccagatcgtgtctgccgaagcctggggcagagccgattgcggatcccagagcttcggcctgctggaccccaagctgtgctacctgctggatggcatcctgttcatctacggcgtgatcctgaccgccctgttcctgagagtgaagttcagcagaagcgccgacgcccctgcctaccagcagggacagaaccaactgtacaacgagctgaacctgggcagacgggaagagtacgacgtgctggacaagcggagaggcagggaccctgagatgggcggaaagccccagcggagaaagaacccccaggaaggactgtataacgaactccagaaagacaagatggccgaagcctacagcgagatcggcatgaagggcgagcggagaagaggcaagggccacgatggcctgtaccagggcctgagcaccgccaccaaggacacctatgacgccctgcacatgcaggccctgcctccaagaagggccaagcgatctggatctggagcaacaaacttctcactactcaaacaagcaggtgacgtggaggagaatcccgggcctactagtatggactggatttggcgcatccttttccttgtcggcgctgctaccggcgcgcattccgggccccagctccagctgcaagagtctggacctggcctggtcaagcctagcgagacactgagcctgacctgtaccgtgtccggcgatagcatcagcagcggcgattactactggggctggatcagacagcctcctggcaaaggactggaatggatcggccacatctactacagcggcgtgacctactacaaccccagcctgaagtccagagtgaccatcagcgtggacaccagccggaaccagttctccctgaagctgtctagcgtgacagccgccgataccgccgtgtactactgcaccagagaggacagcagcaactggcggagtagaggccagggaacactggtcacagttagctctggatccggcggaggcggaagtggaggcggaggatctggcggcggaggctctttcgaacaggtgcaactgctggaatctggcggcggactggtgcagcctggcggatctctgagactgagctgtgccgccagcggcttcaccttcagcagccacggaatgcactgggtgcgccaggcccctggaaagggactggaatgggtgtccgtgatctccggcagcggcagcaataccggctacgccgatagcgtgaagggccggttcaccatcagccgggacaacagcaagaacaccctgtacctccagatgaacagcctgcgggccgaggacaccgccgtgtactattgtgccagacagtggggcagctacgccttcgattcttggggccagggcaccctcgtgaccgtgtcatctacgcgtatccagaaccctgatcctgccgtgtaccagctgcgggatagcaagagcagcgacaagagcgtgtgtctgttcaccgacttcgacagccagaccaacgtgtcccagagcaaggactccgacgtgtacatcaccgataagaccgtgctggacatgcggagcatggacttcaagagcaactccgccgtggcctggtccaacaagtccgatttcgcctgcgccaacgccttcaacaacagcattatccccgaggacacattcttcccaagccccgagagcagctgcggtacccagagttttgggttgttggaccctaaattgtgctatctgttggacggaatcctgttcatttacggagtgatcctgaccgcattgttcctgcgggttaagttttccagatccgcagacgcacccgcttaccaacaagggcagaaccaactctacaatgaacttaatttggggcggagggaagagtacgacgttctggacaaaaggaggggacgagatcccgagatgggcggaaagcctcagcgaaggaagaatccgcaagaggggctttataacgaactccagaaagataaaatggcagaagcctatagtgagattgggatgaagggagaaaggaggaggggtaaaggtcacgatgggttgtaccaaggattgagcacagccactaaagatacctatgatgcgctccacatgcaggccctgccgccaaga

SEQ ID NO: 2709 - DNA, 3294 bp, Artificial Sequence
  Synthetic Polynucloetide
atggccttaccagtgaccgccttgctcctgccgctggccttgctgctccacgccgccaggccggaagtgcagctggttgaatctggcggaggactggttcagcctggcggatctctgagactgtcttgtgccgccagcggcttcagcttcagcgacttttggatgagctgggtccgacaggcccctggcaaaggacttgaatgggtcgccacaatcagccaggccggcagcgagaaggactacgtggactctgtgaagggcagattcaccatcagccgggacaacgccaagaagtccctgtacctccagatgaacagcctgagagccgaggacaccgccgtgtactattgtgcctctggcgtgtacagcttcgactacagaggccagggcaccctggtcacagtctcttctggtaccggcggaggcggatctggcggcggaggtagcggtggcggaggatctgaattcgacatcgtgatgagccagagccctagcagcctggccgtgtccgtgggcgagaaagtgaccatgagctgcaagagcagccagtccctgctgcacagcagcaaccagaagaactacctggcctggtatcagcagaagcccggccagtcccccaaggtgctgatctactgggccagcaccagagaaagcggcgtgcccgatagattcaccggcagcggctctggcaccgacttcaccctgaccatcaccagcgtgaagtccgaggacctggctgtgtactactgccagcagtattacagctacccctggaccttcggcggaggcacccggctggaaatcaaaagactcgaggacctgaagaacgtgttcccacctgaggtggccgtgttcgagcctagcgaggccgagatcagccacacccagaaagccaccctcgtgtgcctggctaccggcttctaccccgaccatgtggaactgtcttggtgggtcaacggcaaagaggtgcacagcggcgtgtctaccgacccccagccactgaaagaacagcccgccctgaacgacagccggtactgcctgagcagcagactgagagtgtccgccaccttctggcagaacccccggaaccacttcagatgccaggtgcagttctacggcctgagcgagaacgacgagtggacccaggacagagccaagcccgtgacccagatcgtgtctgccgaagcctggggcagagccgattgcggatcccagagcttcggcctgctggaccccaagctgtgctacctgctggatggcatcctgttcatctacggcgtgatcctgaccgccctgttcctgagagtgaagttcagcagaagcgccgacgcccctgcctaccagcagggacagaaccaactgtacaacgagctgaacctgggcagacgggaagagtacgacgtgctggacaagcggagaggcagggaccctgagatgggcggaaagccccagcggagaaagaacccccaggaaggactgtataacgaactccagaaagacaagatggccgaagcctacagcgagatcggcatgaagggcgagcggagaagaggcaagggccacgatggcctgtaccagggcctgagcaccgccaccaaggacacctatgacgccctgcacatgcaggccctgcctccaagaagggccaagcgatctggatctggagcaacaaacttctcactactcaaacaagcaggtgacgtggaggagaatcccgggcctactagtatggactggatttggcgcatccttttccttgtcggcgctgctaccggcgcgcattccgggccccagctccagctgcaagagtctggacctggcctggtcaagcctagcgagacactgagcctgacctgtaccgtgtccggcgatagcatcagcagcggcgattactactggggctggatcagacagcctcctggcaaaggactggaatggatcggccacatctactacagcggcgtgacctactacaaccccagcctgaagtccagagtgaccatcagcgtggacaccagccggaaccagttctccctgaagctgtctagcgtgacagccgccgataccgccgtgtactactgcaccagagaggacagcagcaactggcggagtagaggccagggaacactggtcacagttagctctggatccggcggaggcggaagtggaggcggaggatctggcggcggaggctctttcgaagaagtgcaactccagcagagcgtggccgagcttgtgaagcctggcgcttccgtgaagatgtcctgcaaggtgtccggctacaccctgacagaccacaccatccactggatgaagcagcggcctgagcagggcctggaatggatcggctacatctaccccagggacggcatcaccggctacaacgagaagttcaagggcaaggccacactgaccgccgacaccagcagcagcacagcctacatgcaactgaacagcctgaccagcgaggacagcgccgtgtacttctgtgccagatggggctacagctacagaaactacgcctactactacgactactggggccagggcacaaccctgaccgtgtctagtacgcgtatccagaaccctgatcctgccgtgtaccagctgcgggatagcaagagcagcgacaagagcgtgtgtctgttcaccgacttcgacagccagaccaacgtgtcccagagcaaggactccgacgtgtacatcaccgataagaccgtgctggacatgcggagcatggacttcaagagcaactccgccgtggcctggtccaacaagtccgatttcgcctgcgccaacgccttcaacaacagcattatccccgaggacacattcttcccaagccccgagagcagctgcggtacccagagttttgggttgttggaccctaaattgtgctatctgttggacggaatcctgttcatttacggagtgatcctgaccgcattgttcctgcgggttaagttttccagatccgcagacgcacccgcttaccaacaagggcagaaccaactctacaatgaacttaatttggggcggagggaagagtacgacgttctggacaaaaggaggggacgagatcccgagatgggcggaaagcctcagcgaaggaagaatccgcaagaggggctttataacgaactccagaaagataaaatggcagaagcctatagtgagattgggatgaagggagaaaggaggaggggtaaaggtcacgatgggttgtaccaaggattgagcacagccactaaagatacctatgatgcgctccacatgcaggccctgccgccaaga

SEQ ID NO: 2710 - DNA, 3285 bp, Artificial Sequence
  Synthetic Polynucloetide
atggccttaccagtgaccgccttgctcctgccgctggccttgctgctccacgccgccaggccggaagtgcagctggttgaatctggcggaggactggttcagcctggcggatctctgagactgtcttgtgccgccagcggcttcagcttcagcgacttttggatgagctgggtccgacaggcccctggcaaaggacttgaatgggtcgccacaatcagccaggccggcagcgagaaggactacgtggactctgtgaagggcagattcaccatcagccgggacaacgccaagaagtccctgtacctccagatgaacagcctgagagccgaggacaccgccgtgtactattgtgcctctggcgtgtacagcttcgactacagaggccagggcaccctggtcacagtctcttctggtaccggcggaggcggatctggcggcggaggtagcggtggcggaggatctgaattcgagatcgtgctgacacagagccctggcaccctgagcctgtctccaggcgaaagagccacactgagctgtcgggccagccagagcgtgtccagctcttacctggcctggtatcagcagaagcccggccaggctccccggctgctgatctacggaacaagcagcagagccaccggcatccccgacagattttctggcagcggctccggcaccgacttcaccctgacaatcagcagactggaacccgaggacttcgccgtgtactactgccagcagtacggcagcagccccttcacctttggcggaggcaccaaggtggaaatcaagagactcgaggacctgaagaacgtgttcccacctgaggtggccgtgttcgagcctagcgaggccgagatcagccacacccagaaagccaccctcgtgtgcctggctaccggcttctaccccgaccatgtggaactgtcttggtgggtcaacggcaaagaggtgcacagcggcgtgtctaccgacccccagccactgaaagaacagcccgccctgaacgacagccggtactgcctgagcagcagactgagagtgtccgccaccttctggcagaacccccggaaccacttcagatgccaggtgcagttctacggcctgagcgagaacgacgagtggacccaggacagagccaagcccgtgacccagatcgtgtctgccgaagcctggggcagagccgattgcggatcccagagcttcggcctgctggaccccaagctgtgctacctgctggatggcatcctgttcatctacggcgtgatcctgaccgccctgttcctgagagtgaagttcagcagaagcgccgacgcccctgcctaccagcagggacagaaccaactgtacaacgagctgaacctgggcagacgggaagagtacgacgtgctggacaagcggagaggcagggaccctgagatgggcggaaagccccagcggagaaagaacccccaggaaggactgtataacgaactccagaaagacaagatggccgaagcctacagcgagatcggcatgaagggcgagcggagaagaggcaagggccacgatggcctgtaccagggcctgagcaccgccaccaaggacacctatgacgccctgcacatgcaggccctgcctccaagaagggccaagcgatctggatctggagcaacaaacttctcactactcaaacaagcaggtgacgtggaggagaatcccgggcctactagtatggactggatttggcgcatccttttccttgtcggcgctgctaccggcgcgcattccgggccccagctccagctgcaagagtctggacctggcctggtcaagcctagcgagacactgagcctgacctgtaccgtgtccggcgatagcatcagcagcggcgattactactggggctggatcagacagcctcctggcaaaggactggaatggatcggccacatctactacagcggcgtgacctactacaaccccagcctgaagtccagagtgaccatcagcgtggacaccagccggaaccagttctccctgaagctgtctagcgtgacagccgccgataccgccgtgtactactgcaccagagaggacagcagcaactggcggagtagaggccagggaacactggtcacagttagctctggatccggcggaggcggaagtggaggcggaggatctggcggcggaggctctttcgaacaggtgcaactccaggaatctggccccggactggctaagcccagcgagacactgagcctgacctgtaccgtgtccggcgacagcatcaccagctactactggtcctggatcagacagccccctggcaagggcctggaatggatcggctacatctactacagcggcagcaccaactacaaccccagcctgaagtccagagtgaccatcagcgtggacaccagcaagaaccagttctccctgaagctgagcagcgtgacagccgccgacaccgccgtgtattattgcgccagagatcagcggagaatcgccgctgccggcacccacttttacggcatggatgtgtggggccagggcaccaccgtgaccgtgtcatctacgcgtatccagaaccctgatcctgccgtgtaccagctgcgggatagcaagagcagcgacaagagcgtgtgtctgttcaccgacttcgacagccagaccaacgtgtcccagagcaaggactccgacgtgtacatcaccgataagaccgtgctggacatgcggagcatggacttcaagagcaactccgccgtggcctggtccaacaagtccgatttcgcctgcgccaacgccttcaacaacagcattatccccgaggacacattcttcccaagccccgagagcagctgcggtacccagagttttgggttgttggaccctaaattgtgctatctgttggacggaatcctgttcatttacggagtgatcctgaccgcattgttcctgcgggttaagttttccagatccgcagacgcacccgcttaccaacaagggcagaaccaactctacaatgaacttaatttggggcggagggaagagtacgacgttctggacaaaaggaggggacgagatcccgagatgggcggaaagcctcagcgaaggaagaatccgcaagaggggctttataacgaactccagaaagataaaatggcagaagcctatagtgagattgggatgaagggagaaaggaggaggggtaaaggtcacgatgggttgtaccaaggattgagcacagccactaaagatacctatgatgcgctccacatgcaggccctgccgccaaga

SEQ ID NO: 2711 - DNA, 3261 bp, Artificial Sequence
  Synthetic Polynucloetide
atggccttaccagtgaccgccttgctcctgccgctggccttgctgctccacgccgccaggccggaagtgcagctggttgaatctggcggaggactggttcagcctggcggatctctgagactgtcttgtgccgccagcggcttcagcttcagcgacttttggatgagctgggtccgacaggcccctggcaaaggacttgaatgggtcgccacaatcagccaggccggcagcgagaaggactacgtggactctgtgaagggcagattcaccatcagccgggacaacgccaagaagtccctgtacctccagatgaacagcctgagagccgaggacaccgccgtgtactattgtgcctctggcgtgtacagcttcgactacagaggccagggcaccctggtcacagtctcttctggtaccggcggaggcggatctggcggcggaggtagcggtggcggaggatctgaattcgacatcctgctgacccagagccccgtgatcctgtccgtgtctcctggcgagagagtgtccttcagctgtcgggccagccagagcatcggcaccaacatccactggtatcagcagcggaccaacggcagccccagactgctgattaagtacgccagcgagtccatcagcggcatccccagcagattttccggcagcggctccggcaccgacttcaccctgagcatcaacagcgtggaaagcgaggacattgccgactactactgccagcagaacaacaactggcccaccaccttcggagccggcaccaagctggaactgaagctcgaggacctgaagaacgtgttcccacctgaggtggccgtgttcgagcctagcgaggccgagatcagccacacccagaaagccaccctcgtgtgcctggctaccggcttctaccccgaccatgtggaactgtcttggtgggtcaacggcaaagaggtgcacagcggcgtgtctaccgacccccagccactgaaagaacagcccgccctgaacgacagccggtactgcctgagcagcagactgagagtgtccgccaccttctggcagaacccccggaaccacttcagatgccaggtgcagttctacggcctgagcgagaacgacgagtggacccaggacagagccaagcccgtgacccagatcgtgtctgccgaagcctggggcagagccgattgcggatcccagagcttcggcctgctggaccccaagctgtgctacctgctggatggcatcctgttcatctacggcgtgatcctgaccgccctgttcctgagagtgaagttcagcagaagcgccgacgcccctgcctaccagcagggacagaaccaactgtacaacgagctgaacctgggcagacgggaagagtacgacgtgctggacaagcggagaggcagggaccctgagatgggcggaaagccccagcggagaaagaacccccaggaaggactgtataacgaactccagaaagacaagatggccgaagcctacagcgagatcggcatgaagggcgagcggagaagaggcaagggccacgatggcctgtaccagggcctgagcaccgccaccaaggacacctatgacgccctgcacatgcaggccctgcctccaagaagggccaagcgatctggatctggagcaacaaacttctcactactcaaacaagcaggtgacgtggaggagaatcccgggcctactagtatggactggatttggcgcatccttttccttgtcggcgctgctaccggcgcgcattccgggccccagctccagctgcaagagtctggacctggcctggtcaagcctagcgagacactgagcctgacctgtaccgtgtccggcgatagcatcagcagcggcgattactactggggctggatcagacagcctcctggcaaaggactggaatggatcggccacatctactacagcggcgtgacctactacaaccccagcctgaagtccagagtgaccatcagcgtggacaccagccggaaccagttctccctgaagctgtctagcgtgacagccgccgataccgccgtgtactactgcaccagagaggacagcagcaactggcggagtagaggccagggaacactggtcacagttagctctggatccggcggaggcggaagtggaggcggaggatctggcggcggaggctctttcgaacaggtgcagctgaagcagagcggacctggcctggtgcagcctagccagagcctgtccatcacctgtaccgtgtccggcttcagcctgaccaactacggcgtgcactgggtgcgccagagccctggaaaaggactggaatggctgggagtgatttggagcggcggcaacaccgactacaacacccccttcaccagcagactgtctatcaacaaggacaacagcaagagccaggtgttcttcaagatgaacagcctccagagcaacgacaccgccatctactactgtgctagagccctgacctactatgactacgagttcgcctactggggccagggcacactcgtgacagtgtctgctacgcgtatccagaaccctgatcctgccgtgtaccagctgcgggatagcaagagcagcgacaagagcgtgtgtctgttcaccgacttcgacagccagaccaacgtgtcccagagcaaggactccgacgtgtacatcaccgataagaccgtgctggacatgcggagcatggacttcaagagcaactccgccgtggcctggtccaacaagtccgatttcgcctgcgccaacgccttcaacaacagcattatccccgaggacacattcttcccaagccccgagagcagctgcggtacccagagttttgggttgttggaccctaaattgtgctatctgttggacggaatcctgttcatttacggagtgatcctgaccgcattgttcctgcgggttaagttttccagatccgcagacgcacccgcttaccaacaagggcagaaccaactctacaatgaacttaatttggggcggagggaagagtacgacgttctggacaaaaggaggggacgagatcccgagatgggcggaaagcctcagcgaaggaagaatccgcaagaggggctttataacgaactccagaaagataaaatggcagaagcctatagtgagattgggatgaagggagaaaggaggaggggtaaaggtcacgatgggttgtaccaaggattgagcacagccactaaagatacctatgatgcgctccacatgcaggccctgccgccaaga

SEQ ID NO: 2712 - DNA, 3240 bp, Artificial Sequence
  Synthetic Polynucloetide
atggccttaccagtgaccgccttgctcctgccgctggccttgctgctccacgccgccaggccggaagtgcagctggttgaatctggcggaggactggttcagcctggcggatctctgagactgtcttgtgccgccagcggcttcagcttcagcgacttttggatgagctgggtccgacaggcccctggcaaaggacttgaatgggtcgccacaatcagccaggccggcagcgagaaggactacgtggactctgtgaagggcagattcaccatcagccgggacaacgccaagaagtccctgtacctccagatgaacagcctgagagccgaggacaccgccgtgtactattgtgcctctggcgtgtacagcttcgactacagaggccagggcaccctggtcacagtctcttctggtaccggcggaggcggatctggcggcggaggtagcggtggcggaggatctgaattcatgacccagagccccaagttcctgctggtgtctgccggcgacagagtgaccctgacatgcaaggccagccagagcgtgaacaacgacgtgtactggtatcagcaggaacccggccagtcccccaagctgctgatctactgggccagcaccagagaaagcggcgtgcccgatagattcaccggcagcggctctggcaccgacttcaccctgacaatcagcagcgtgcaggccgaggacctggccgtgtactactgcaagcagagctacaacctgtacaccttcggcggaggcaccaagctggaaatcaagagactcgaggacctgaagaacgtgttcccacctgaggtggccgtgttcgagcctagcgaggccgagatcagccacacccagaaagccaccctcgtgtgcctggctaccggcttctaccccgaccatgtggaactgtcttggtgggtcaacggcaaagaggtgcacagcggcgtgtctaccgacccccagccactgaaagaacagcccgccctgaacgacagccggtactgcctgagcagcagactgagagtgtccgccaccttctggcagaacccccggaaccacttcagatgccaggtgcagttctacggcctgagcgagaacgacgagtggacccaggacagagccaagcccgtgacccagatcgtgtctgccgaagcctggggcagagccgattgcggatcccagagcttcggcctgctggaccccaagctgtgctacctgctggatggcatcctgttcatctacggcgtgatcctgaccgccctgttcctgagagtgaagttcagcagaagcgccgacgcccctgcctaccagcagggacagaaccaactgtacaacgagctgaacctgggcagacgggaagagtacgacgtgctggacaagcggagaggcagggaccctgagatgggcggaaagccccagcggagaaagaacccccaggaaggactgtataacgaactccagaaagacaagatggccgaagcctacagcgagatcggcatgaagggcgagcggagaagaggcaagggccacgatggcctgtaccagggcctgagcaccgccaccaaggacacctatgacgccctgcacatgcaggccctgcctccaagaagggccaagcgatctggatctggagcaacaaacttctcactactcaaacaagcaggtgacgtggaggagaatcccgggcctactagtatggactggatttggcgcatccttttccttgtcggcgctgctaccggcgcgcattccgggccccagctccagctgcaagagtctggacctggcctggtcaagcctagcgagacactgagcctgacctgtaccgtgtccggcgatagcatcagcagcggcgattactactggggctggatcagacagcctcctggcaaaggactggaatggatcggccacatctactacagcggcgtgacctactacaaccccagcctgaagtccagagtgaccatcagcgtggacaccagccggaaccagttctccctgaagctgtctagcgtgacagccgccgataccgccgtgtactactgcaccagagaggacagcagcaactggcggagtagaggccagggaacactggtcacagttagctctggatccggcggaggcggaagtggaggcggaggatctggcggcggaggctctttcgaagaatctggaagaggactggtgcagcctggcggcagcagaaagctgtcttgtgccgccagcggcttcaccttcagcaccagcggaatgcactgggtgcgccaggcccctgagaagggactggaatgggtggcctacatcagctccggcagcaccaccatctaccacgccgataccgtgaagggccggttcaccatcagccgggacaaccccaagaataccctgttcctccagatgaccagcctgcggagcgaggacaccgccatgtactattgctgcgccagaagcggccagttcggcaactacttcgactactggggccagggcaccaccctgaccgtgtcatctacgcgtatccagaaccctgatcctgccgtgtaccagctgcgggatagcaagagcagcgacaagagcgtgtgtctgttcaccgacttcgacagccagaccaacgtgtcccagagcaaggactccgacgtgtacatcaccgataagaccgtgctggacatgcggagcatggacttcaagagcaactccgccgtggcctggtccaacaagtccgatttcgcctgcgccaacgccttcaacaacagcattatccccgaggacacattcttcccaagccccgagagcagctgcggtacccagagttttgggttgttggaccctaaattgtgctatctgttggacggaatcctgttcatttacggagtgatcctgaccgcattgttcctgcgggttaagttttccagatccgcagacgcacccgcttaccaacaagggcagaaccaactctacaatgaacttaatttggggcggagggaagagtacgacgttctggacaaaaggaggggacgagatcccgagatgggcggaaagcctcagcgaaggaagaatccgcaagaggggctttataacgaactccagaaagataaaatggcagaagcctatagtgagattgggatgaagggagaaaggaggaggggtaaaggtcacgatgggttgtaccaaggattgagcacagccactaaagatacctatgatgcgctccacatgcaggccctgccgccaaga

SEQ ID NO: 2713 - DNA, 3255 bp, Artificial Sequence
  Synthetic Polynucloetide
atggccttaccagtgaccgccttgctcctgccgctggccttgctgctccacgccgccaggccggaagtgcagctggttgaatctggcggaggactggttcagcctggcggatctctgagactgtcttgtgccgccagcggcttcagcttcagcgacttttggatgagctgggtccgacaggcccctggcaaaggacttgaatgggtcgccacaatcagccaggccggcagcgagaaggactacgtggactctgtgaagggcagattcaccatcagccgggacaacgccaagaagtccctgtacctccagatgaacagcctgagagccgaggacaccgccgtgtactattgtgcctctggcgtgtacagcttcgactacagaggccagggcaccctggtcacagtctcttctggtaccggcggaggcggatctggcggcggaggtagcggtggcggaggatctgaattccagagcccatctagcctggctgtgtctgccggcgagaaagtgaccatgagctgcaagagcagccagagcctgctgaacagccggacccggaagaactacctggcctggtatcagcagaagcccggccagagccccaagctgctgatctactgggccagcaccagagaaagcggcgtgcccgatagattcaccggctctggcagcggcaccgacttcaccctgacaatcagcagcgtgcaggccgaggacctggccgtgtactactgcaagcagagcaacctgtacaccttcggcggaggcaccaagctggaaatcaagctcgaggacctgaagaacgtgttcccacctgaggtggccgtgttcgagcctagcgaggccgagatcagccacacccagaaagccaccctcgtgtgcctggctaccggcttctaccccgaccatgtggaactgtcttggtgggtcaacggcaaagaggtgcacagcggcgtgtctaccgacccccagccactgaaagaacagcccgccctgaacgacagccggtactgcctgagcagcagactgagagtgtccgccaccttctggcagaacccccggaaccacttcagatgccaggtgcagttctacggcctgagcgagaacgacgagtggacccaggacagagccaagcccgtgacccagatcgtgtctgccgaagcctggggcagagccgattgcggatcccagagcttcggcctgctggaccccaagctgtgctacctgctggatggcatcctgttcatctacggcgtgatcctgaccgccctgttcctgagagtgaagttcagcagaagcgccgacgcccctgcctaccagcagggacagaaccaactgtacaacgagctgaacctgggcagacgggaagagtacgacgtgctggacaagcggagaggcagggaccctgagatgggcggaaagccccagcggagaaagaacccccaggaaggactgtataacgaactccagaaagacaagatggccgaagcctacagcgagatcggcatgaagggcgagcggagaagaggcaagggccacgatggcctgtaccagggcctgagcaccgccaccaaggacacctatgacgccctgcacatgcaggccctgcctccaagaagggccaagcgatctggatctggagcaacaaacttctcactactcaaacaagcaggtgacgtggaggagaatcccgggcctactagtatggactggatttggcgcatccttttccttgtcggcgctgctaccggcgcgcattccgggccccagctccagctgcaagagtctggacctggcctggtcaagcctagcgagacactgagcctgacctgtaccgtgtccggcgatagcatcagcagcggcgattactactggggctggatcagacagcctcctggcaaaggactggaatggatcggccacatctactacagcggcgtgacctactacaaccccagcctgaagtccagagtgaccatcagcgtggacaccagccggaaccagttctccctgaagctgtctagcgtgacagccgccgataccgccgtgtactactgcaccagagaggacagcagcaactggcggagtagaggccagggaacactggtcacagttagctctggatccggcggaggcggaagtggaggcggaggatctggcggcggaggctctttcgaacaggtgcagctggaagagtctggacccgagcttgtgaagcctggggccagcgtgaagctgtcctgtaaagccagcggctacaccttcaccgagtacatcatccactgggtcaagcagcggagcggccagggcctggaatggatcggctggttttaccctggctccggcagcatcaagtacaacgagaagttcaaggacaaggccaccctgaccgccgacaagtccagcagcaccgtgtacatggaactgagcggcctgaccagcgaggacagcgccgtgtatttctgcgccagacacgacggctacagctacttcgactattggggccagggcaccacactgaccgtgtcctctacgcgtatccagaaccctgatcctgccgtgtaccagctgcgggatagcaagagcagcgacaagagcgtgtgtctgttcaccgacttcgacagccagaccaacgtgtcccagagcaaggactccgacgtgtacatcaccgataagaccgtgctggacatgcggagcatggacttcaagagcaactccgccgtggcctggtccaacaagtccgatttcgcctgcgccaacgccttcaacaacagcattatccccgaggacacattcttcccaagccccgagagcagctgcggtacccagagttttgggttgttggaccctaaattgtgctatctgttggacggaatcctgttcatttacggagtgatcctgaccgcattgttcctgcgggttaagttttccagatccgcagacgcacccgcttaccaacaagggcagaaccaactctacaatgaacttaatttggggcggagggaagagtacgacgttctggacaaaaggaggggacgagatcccgagatgggcggaaagcctcagcgaaggaagaatccgcaagaggggctttataacgaactccagaaagataaaatggcagaagcctatagtgagattgggatgaagggagaaaggaggaggggtaaaggtcacgatgggttgtaccaaggattgagcacagccactaaagatacctatgatgcgctccacatgcaggccctgccgccaaga

SEQ ID NO: 2714 - DNA, 3264 bp, Artificial Sequence
  Synthetic Polynucloetide
atggccttaccagtgaccgccttgctcctgccgctggccttgctgctccacgccgccaggccggaagtgcagctggttgaatctggcggaggactggttcagcctggcggatctctgagactgtcttgtgccgccagcggcttcagcttcagcgacttttggatgagctgggtccgacaggcccctggcaaaggacttgaatgggtcgccacaatcagccaggccggcagcgagaaggactacgtggactctgtgaagggcagattcaccatcagccgggacaacgccaagaagtccctgtacctccagatgaacagcctgagagccgaggacaccgccgtgtactattgtgcctctggcgtgtacagcttcgactacagaggccagggcaccctggtcacagtctcttctggtaccggcggaggcggatctggcggcggaggtagcggtggcggaggatctgaattcgacatccagatgacccagagccccagcagcctgtctgcctctctgggcgagagagtgtccctgacctgtcgggccacacaggaactgagcggctacctgtcttggctgcagcagaagcccgacggcaccatcaagcggctgatctacgccgccagcaccctggatagcggcgtgcccaagagattcagcggcaacagaagcggcagcgactacagcctgaccatcagctccctggaaagcgaggacttcgccgactactactgcctgcagtacgccatctacccctacaccttcggcggaggcaccaagctggaaatcaagctcgaggacctgaagaacgtgttcccacctgaggtggccgtgttcgagcctagcgaggccgagatcagccacacccagaaagccaccctcgtgtgcctggctaccggcttctaccccgaccatgtggaactgtcttggtgggtcaacggcaaagaggtgcacagcggcgtgtctaccgacccccagccactgaaagaacagcccgccctgaacgacagccggtactgcctgagcagcagactgagagtgtccgccaccttctggcagaacccccggaaccacttcagatgccaggtgcagttctacggcctgagcgagaacgacgagtggacccaggacagagccaagcccgtgacccagatcgtgtctgccgaagcctggggcagagccgattgcggatcccagagcttcggcctgctggaccccaagctgtgctacctgctggatggcatcctgttcatctacggcgtgatcctgaccgccctgttcctgagagtgaagttcagcagaagcgccgacgcccctgcctaccagcagggacagaaccaactgtacaacgagctgaacctgggcagacgggaagagtacgacgtgctggacaagcggagaggcagggaccctgagatgggcggaaagccccagcggagaaagaacccccaggaaggactgtataacgaactccagaaagacaagatggccgaagcctacagcgagatcggcatgaagggcgagcggagaagaggcaagggccacgatggcctgtaccagggcctgagcaccgccaccaaggacacctatgacgccctgcacatgcaggccctgcctccaagaagggccaagcgatctggatctggagcaacaaacttctcactactcaaacaagcaggtgacgtggaggagaatcccgggcctactagtatggactggatttggcgcatccttttccttgtcggcgctgctaccggcgcgcattccgggccccagctccagctgcaagagtctggacctggcctggtcaagcctagcgagacactgagcctgacctgtaccgtgtccggcgatagcatcagcagcggcgattactactggggctggatcagacagcctcctggcaaaggactggaatggatcggccacatctactacagcggcgtgacctactacaaccccagcctgaagtccagagtgaccatcagcgtggacaccagccggaaccagttctccctgaagctgtctagcgtgacagccgccgataccgccgtgtactactgcaccagagaggacagcagcaactggcggagtagaggccagggaacactggtcacagttagctctggatccggcggaggcggaagtggaggcggaggatctggcggcggaggctctttcgaagaggtgcaactgcagcagtctggccccgagcttgtgaagcctggcgcctccgtgaagatgagctgcaaggccagcggctacacctttaccagctacttcatccactgggtcaagcagaaacccggccagggcctggaatggatcggcttcatcaacccttacaacgacggcagcaagtacaacgagaagttcaagggcaaggccaccctgaccagcgacaagagcagcagcaccgcctacatggaactgtccagcctgacatccgaggacagcgccgtgtactactgcaccagggacgacggctactacggctacgccatggactactggggccagggaacaagcgtcaccgtgtcctctacgcgtatccagaaccctgatcctgccgtgtaccagctgcgggatagcaagagcagcgacaagagcgtgtgtctgttcaccgacttcgacagccagaccaacgtgtcccagagcaaggactccgacgtgtacatcaccgataagaccgtgctggacatgcggagcatggacttcaagagcaactccgccgtggcctggtccaacaagtccgatttcgcctgcgccaacgccttcaacaacagcattatccccgaggacacattcttcccaagccccgagagcagctgcggtacccagagttttgggttgttggaccctaaattgtgctatctgttggacggaatcctgttcatttacggagtgatcctgaccgcattgttcctgcgggttaagttttccagatccgcagacgcacccgcttaccaacaagggcagaaccaactctacaatgaacttaatttggggcggagggaagagtacgacgttctggacaaaaggaggggacgagatcccgagatgggcggaaagcctcagcgaaggaagaatccgcaagaggggctttataacgaactccagaaagataaaatggcagaagcctatagtgagattgggatgaagggagaaaggaggaggggtaaaggtcacgatgggttgtaccaaggattgagcacagccactaaagatacctatgatgcgctccacatgcaggccctgccgccaaga

SEQ ID NO: 2715 - DNA, 3279 bp, Artificial Sequence
  Synthetic Polynucloetide
atggccttaccagtgaccgccttgctcctgccgctggccttgctgctccacgccgccaggccggaagtgcagctggttgaatctggcggaggactggttcagcctggcggatctctgagactgtcttgtgccgccagcggcttcagcttcagcgacttttggatgagctgggtccgacaggcccctggcaaaggacttgaatgggtcgccacaatcagccaggccggcagcgagaaggactacgtggactctgtgaagggcagattcaccatcagccgggacaacgccaagaagtccctgtacctccagatgaacagcctgagagccgaggacaccgccgtgtactattgtgcctctggcgtgtacagcttcgactacagaggccagggcaccctggtcacagtctcttctggtaccggcggaggcggatctggcggcggaggtagcggtggcggaggatctgaattcgacaccatcgtgctgacacagagccctgcttccctggccgtgtccctgggacagagagccaccatctcttgcagagccagcgagagcgtggacagctacggcaacagcttcatgcactggtatcagcagaagcccggccagccccccaagctgctgatctacctggcctccaacctggaaagcggcgtgcccgccagattttctggcagcggcagcagaaccgacttcaccctgaccatcgaccccgtggaagccgatgatgccgccacctactactgccagcagaacaactacgacccctggaccttcggcggaggcaccaagctggaaatcaagctcgaggacctgaagaacgtgttcccacctgaggtggccgtgttcgagcctagcgaggccgagatcagccacacccagaaagccaccctcgtgtgcctggctaccggcttctaccccgaccatgtggaactgtcttggtgggtcaacggcaaagaggtgcacagcggcgtgtctaccgacccccagccactgaaagaacagcccgccctgaacgacagccggtactgcctgagcagcagactgagagtgtccgccaccttctggcagaacccccggaaccacttcagatgccaggtgcagttctacggcctgagcgagaacgacgagtggacccaggacagagccaagcccgtgacccagatcgtgtctgccgaagcctggggcagagccgattgcggatcccagagcttcggcctgctggaccccaagctgtgctacctgctggatggcatcctgttcatctacggcgtgatcctgaccgccctgttcctgagagtgaagttcagcagaagcgccgacgcccctgcctaccagcagggacagaaccaactgtacaacgagctgaacctgggcagacgggaagagtacgacgtgctggacaagcggagaggcagggaccctgagatgggcggaaagccccagcggagaaagaacccccaggaaggactgtataacgaactccagaaagacaagatggccgaagcctacagcgagatcggcatgaagggcgagcggagaagaggcaagggccacgatggcctgtaccagggcctgagcaccgccaccaaggacacctatgacgccctgcacatgcaggccctgcctccaagaagggccaagcgatctggatctggagcaacaaacttctcactactcaaacaagcaggtgacgtggaggagaatcccgggcctactagtatggactggatttggcgcatccttttccttgtcggcgctgctaccggcgcgcattccgggccccagctccagctgcaagagtctggacctggcctggtcaagcctagcgagacactgagcctgacctgtaccgtgtccggcgatagcatcagcagcggcgattactactggggctggatcagacagcctcctggcaaaggactggaatggatcggccacatctactacagcggcgtgacctactacaaccccagcctgaagtccagagtgaccatcagcgtggacaccagccggaaccagttctccctgaagctgtctagcgtgacagccgccgataccgccgtgtactactgcaccagagaggacagcagcaactggcggagtagaggccagggaacactggtcacagttagctctggatccggcggaggcggaagtggaggcggaggatctggcggcggaggctctttcgaagaagtgcaactccagcagagcggccctgagcttgtgaagcctggcgcttccgtgaagatgagctgcaaggccagcggctacaccttcaccagctacgtgatgcactgggtcaagcagaaacctggacagggcctggaatggatcggctacatcaacccctacaacgacggcaccaagtacaacgagaagttcaagggcaaggccaccctgacaagcgacaccagcagcagcaccgcctacatggaactgaacagcctgaccagcgaggacagcgccgtgtacttctgcgccagacccatctacttcgacaacgactacttcgattactggggccagggcaccaccctgaaggtgtcctctacgcgtatccagaaccctgatcctgccgtgtaccagctgcgggatagcaagagcagcgacaagagcgtgtgtctgttcaccgacttcgacagccagaccaacgtgtcccagagcaaggactccgacgtgtacatcaccgataagaccgtgctggacatgcggagcatggacttcaagagcaactccgccgtggcctggtccaacaagtccgatttcgcctgcgccaacgccttcaacaacagcattatccccgaggacacattcttcccaagccccgagagcagctgcggtacccagagttttgggttgttggaccctaaattgtgctatctgttggacggaatcctgttcatttacggagtgatcctgaccgcattgttcctgcgggttaagttttccagatccgcagacgcacccgcttaccaacaagggcagaaccaactctacaatgaacttaatttggggcggagggaagagtacgacgttctggacaaaaggaggggacgagatcccgagatgggcggaaagcctcagcgaaggaagaatccgcaagaggggctttataacgaactccagaaagataaaatggcagaagcctatagtgagattgggatgaagggagaaaggaggaggggtaaaggtcacgatgggttgtaccaaggattgagcacagccactaaagatacctatgatgcgctccacatgcaggccctgccgccaaga

SEQ ID NO: 2716 - DNA, 3264 bp, Artificial Sequence
  Synthetic Polynucloetide
atggccttaccagtgaccgccttgctcctgccgctggccttgctgctccacgccgccaggccggaagtgcagctggttgaatctggcggaggactggttcagcctggcggatctctgagactgtcttgtgccgccagcggcttcagcttcagcgacttttggatgagctgggtccgacaggcccctggcaaaggacttgaatgggtcgccacaatcagccaggccggcagcgagaaggactacgtggactctgtgaagggcagattcaccatcagccgggacaacgccaagaagtccctgtacctccagatgaacagcctgagagccgaggacaccgccgtgtactattgtgcctctggcgtgtacagcttcgactacagaggccagggcaccctggtcacagtctcttctggtaccggcggaggcggatctggcggcggaggtagcggtggcggaggatctgaattcgacatccagatgacccagagccccagcagcctgtctgccagcgtgggcgacagagtgaccatcacatgcaaggccagccaggacgtgggaatcgccgtggcctggtatcagcagaaacccggcaaggtgcccaagctgctgatctactgggccagcaccagacacaccggcgtgcccgatagattttccggcagcggctccggcaccgacttcaccctgacaatcagctccctccagcccgaggacgtggcaacctactactgccagcagtacagcagctacccctacaccttcggccagggcaccaaggtggaaatcaagagactcgaggacctgaagaacgtgttcccacctgaggtggccgtgttcgagcctagcgaggccgagatcagccacacccagaaagccaccctcgtgtgcctggctaccggcttctaccccgaccatgtggaactgtcttggtgggtcaacggcaaagaggtgcacagcggcgtgtctaccgacccccagccactgaaagaacagcccgccctgaacgacagccggtactgcctgagcagcagactgagagtgtccgccaccttctggcagaacccccggaaccacttcagatgccaggtgcagttctacggcctgagcgagaacgacgagtggacccaggacagagccaagcccgtgacccagatcgtgtctgccgaagcctggggcagagccgattgcggatcccagagcttcggcctgctggaccccaagctgtgctacctgctggatggcatcctgttcatctacggcgtgatcctgaccgccctgttcctgagagtgaagttcagcagaagcgccgacgcccctgcctaccagcagggacagaaccaactgtacaacgagctgaacctgggcagacgggaagagtacgacgtgctggacaagcggagaggcagggaccctgagatgggcggaaagccccagcggagaaagaacccccaggaaggactgtataacgaactccagaaagacaagatggccgaagcctacagcgagatcggcatgaagggcgagcggagaagaggcaagggccacgatggcctgtaccagggcctgagcaccgccaccaaggacacctatgacgccctgcacatgcaggccctgcctccaagaagggccaagcgatctggatctggagcaacaaacttctcactactcaaacaagcaggtgacgtggaggagaatcccgggcctactagtatggactggatttggcgcatccttttccttgtcggcgctgctaccggcgcgcattccgggccccagctccagctgcaagagtctggacctggcctggtcaagcctagcgagacactgagcctgacctgtaccgtgtccggcgatagcatcagcagcggcgattactactggggctggatcagacagcctcctggcaaaggactggaatggatcggccacatctactacagcggcgtgacctactacaaccccagcctgaagtccagagtgaccatcagcgtggacaccagccggaaccagttctccctgaagctgtctagcgtgacagccgccgataccgccgtgtactactgcaccagagaggacagcagcaactggcggagtagaggccagggaacactggtcacagttagctctggatccggcggaggcggaagtggaggcggaggatctggcggcggaggctctttcgaagaagtgcaactggtggaatcaggcggcggactggtgcagcctggcggatctctgagactgagctgtgccgccagcggcttcgacttcagccggtactggatgagctgggtgcgccaggcccctggcaaaggactggaatggatcggcgagatcaaccccgacagcagcaccatcaactacgcccccagcctgaaggacaagttcatcatcagccgggacaacgccaagaacagcctgtacctccagatgaactccctgcgggccgaggacaccgccgtgtactattgcgccagacccgacggcaactactggtacttcgacgtgtggggccagggaaccctcgtgaccgtgtcatctacgcgtatccagaaccctgatcctgccgtgtaccagctgcgggatagcaagagcagcgacaagagcgtgtgtctgttcaccgacttcgacagccagaccaacgtgtcccagagcaaggactccgacgtgtacatcaccgataagaccgtgctggacatgcggagcatggacttcaagagcaactccgccgtggcctggtccaacaagtccgatttcgcctgcgccaacgccttcaacaacagcattatccccgaggacacattcttcccaagccccgagagcagctgcggtacccagagttttgggttgttggaccctaaattgtgctatctgttggacggaatcctgttcatttacggagtgatcctgaccgcattgttcctgcgggttaagttttccagatccgcagacgcacccgcttaccaacaagggcagaaccaactctacaatgaacttaatttggggcggagggaagagtacgacgttctggacaaaaggaggggacgagatcccgagatgggcggaaagcctcagcgaaggaagaatccgcaagaggggctttataacgaactccagaaagataaaatggcagaagcctatagtgagattgggatgaagggagaaaggaggaggggtaaaggtcacgatgggttgtaccaaggattgagcacagccactaaagatacctatgatgcgctccacatgcaggccctgccgccaaga

SEQ ID NO: 2717 - DNA, 3264 bp, Artificial Sequence
  Synthetic Polynucloetide
atggccttaccagtgaccgccttgctcctgccgctggccttgctgctccacgccgccaggccggaagtgcagctggttgaatctggcggaggactggttcagcctggcggatctctgagactgtcttgtgccgccagcggcttcagcttcagcgacttttggatgagctgggtccgacaggcccctggcaaaggacttgaatgggtcgccacaatcagccaggccggcagcgagaaggactacgtggactctgtgaagggcagattcaccatcagccgggacaacgccaagaagtccctgtacctccagatgaacagcctgagagccgaggacaccgccgtgtactattgtgcctctggcgtgtacagcttcgactacagaggccagggcaccctggtcacagtctcttctggtaccggcggaggcggatctggcggcggaggtagcggtggcggaggatctgaattcgacatcgtgatgacccagagccagaagagcatgagcaccagcgtgggcgacagagtgagcatcacctgcaaggccagccaggacgtgatcaccggcgtggcctggtaccagcagaagcccggccagagccccaagctgctgatctacagcgccagctacagatacaccggcgtgcccgacagattcaccggcagcggcagcggcaccgacttcaccttcaccatcagcaacgtgcaggccgaggacctggccgtgtactactgccagcagcactacagcacccccctgaccttcggcgccggcaccaagctggagctgaagctcgaggacctgaagaacgtgttcccacctgaggtggccgtgttcgagcctagcgaggccgagatcagccacacccagaaagccaccctcgtgtgcctggctaccggcttctaccccgaccatgtggaactgtcttggtgggtcaacggcaaagaggtgcacagcggcgtgtctaccgacccccagccactgaaagaacagcccgccctgaacgacagccggtactgcctgagcagcagactgagagtgtccgccaccttctggcagaacccccggaaccacttcagatgccaggtgcagttctacggcctgagcgagaacgacgagtggacccaggacagagccaagcccgtgacccagatcgtgtctgccgaagcctggggcagagccgattgcggatcccagagcttcggcctgctggaccccaagctgtgctacctgctggatggcatcctgttcatctacggcgtgatcctgaccgccctgttcctgagagtgaagttcagcagaagcgccgacgcccctgcctaccagcagggacagaaccaactgtacaacgagctgaacctgggcagacgggaagagtacgacgtgctggacaagcggagaggcagggaccctgagatgggcggaaagccccagcggagaaagaacccccaggaaggactgtataacgaactccagaaagacaagatggccgaagcctacagcgagatcggcatgaagggcgagcggagaagaggcaagggccacgatggcctgtaccagggcctgagcaccgccaccaaggacacctatgacgccctgcacatgcaggccctgcctccaagaagggccaagcgatctggatctggagcaacaaacttctcactactcaaacaagcaggtgacgtggaggagaatcccgggcctactagtatggactggatttggcgcatccttttccttgtcggcgctgctaccggcgcgcattccgggccccagctccagctgcaagagtctggacctggcctggtcaagcctagcgagacactgagcctgacctgtaccgtgtccggcgatagcatcagcagcggcgattactactggggctggatcagacagcctcctggcaaaggactggaatggatcggccacatctactacagcggcgtgacctactacaaccccagcctgaagtccagagtgaccatcagcgtggacaccagccggaaccagttctccctgaagctgtctagcgtgacagccgccgataccgccgtgtactactgcaccagagaggacagcagcaactggcggagtagaggccagggaacactggtcacagttagctctggatccggcggaggcggaagtggaggcggaggatctggcggcggaggctctttcgaacaggtgcagctgcagcagcccggcgccgagctggtgagacccggcgccagcgtgaagctgagctgcaaggccagcggctacagcttcaccacctactggatgaactgggtgaagcagagacccggccagggcctggagtggatcggcatgatccaccccagcgacagcgagaccagactgaaccagaagttcaaggacaaggccaccctgaccgtggacaagagcagcagcaccgcctacatgcagctgagcagccccaccagcgaggacagcgccgtgtactactgcgccagaagcaccatgatcgccaccagagccatggactactggggccagggcaccagcgtgaccgtgagcagcacgcgtatccagaaccctgatcctgccgtgtaccagctgcgggatagcaagagcagcgacaagagcgtgtgtctgttcaccgacttcgacagccagaccaacgtgtcccagagcaaggactccgacgtgtacatcaccgataagaccgtgctggacatgcggagcatggacttcaagagcaactccgccgtggcctggtccaacaagtccgatttcgcctgcgccaacgccttcaacaacagcattatccccgaggacacattcttcccaagccccgagagcagctgcggtacccagagttttgggttgttggaccctaaattgtgctatctgttggacggaatcctgttcatttacggagtgatcctgaccgcattgttcctgcgggttaagttttccagatccgcagacgcacccgcttaccaacaagggcagaaccaactctacaatgaacttaatttggggcggagggaagagtacgacgttctggacaaaaggaggggacgagatcccgagatgggcggaaagcctcagcgaaggaagaatccgcaagaggggctttataacgaactccagaaagataaaatggcagaagcctatagtgagattgggatgaagggagaaaggaggaggggtaaaggtcacgatgggttgtaccaaggattgagcacagccactaaagatacctatgatgcgctccacatgcaggccctgccgccaaga

SEQ ID NO: 2718 - DNA, 3282 bp, Artificial Sequence
  Synthetic Polynucloetide
atggccttaccagtgaccgccttgctcctgccgctggccttgctgctccacgccgccaggccggaagtgcagctggttgaatctggcggaggactggttcagcctggcggatctctgagactgtcttgtgccgccagcggcttcagcttcagcgacttttggatgagctgggtccgacaggcccctggcaaaggacttgaatgggtcgccacaatcagccaggccggcagcgagaaggactacgtggactctgtgaagggcagattcaccatcagccgggacaacgccaagaagtccctgtacctccagatgaacagcctgagagccgaggacaccgccgtgtactattgtgcctctggcgtgtacagcttcgactacagaggccagggcaccctggtcacagtctcttctggtaccggcggaggcggatctggcggcggaggtagcggtggcggaggatctgaattccagagcgtgctgacacagcctccatccgtgtctggcgctccaggccagagagtgaccatctcctgtaccggcagcggcagcaacatcggagccccctacgacgtgtcctggtatcagcaactgcctggcaccgcccccaagctgctgatctaccacaacaacaagcggcccagcggcgtgcccgatagattcagcggctctaagagcggcaccagcgccagcctggctatcactggactccaggccgaggacgaggccgactactactgtgccacagtggaagccggcctgagcggctctgtgtttggcggcggaacaaagctgaccgtgctgggagctctcgaggacctgaagaacgtgttcccacctgaggtggccgtgttcgagcctagcgaggccgagatcagccacacccagaaagccaccctcgtgtgcctggctaccggcttctaccccgaccatgtggaactgtcttggtgggtcaacggcaaagaggtgcacagcggcgtgtctaccgacccccagccactgaaagaacagcccgccctgaacgacagccggtactgcctgagcagcagactgagagtgtccgccaccttctggcagaacccccggaaccacttcagatgccaggtgcagttctacggcctgagcgagaacgacgagtggacccaggacagagccaagcccgtgacccagatcgtgtctgccgaagcctggggcagagccgattgcggatcccagagcttcggcctgctggaccccaagctgtgctacctgctggatggcatcctgttcatctacggcgtgatcctgaccgccctgttcctgagagtgaagttcagcagaagcgccgacgcccctgcctaccagcagggacagaaccaactgtacaacgagctgaacctgggcagacgggaagagtacgacgtgctggacaagcggagaggcagggaccctgagatgggcggaaagccccagcggagaaagaacccccaggaaggactgtataacgaactccagaaagacaagatggccgaagcctacagcgagatcggcatgaagggcgagcggagaagaggcaagggccacgatggcctgtaccagggcctgagcaccgccaccaaggacacctatgacgccctgcacatgcaggccctgcctccaagaagggccaagcgatctggatctggagcaacaaacttctcactactcaaacaagcaggtgacgtggaggagaatcccgggcctactagtatggactggatttggcgcatccttttccttgtcggcgctgctaccggcgcgcattccgggccccagctccagctgcaagagtctggacctggcctggtcaagcctagcgagacactgagcctgacctgtaccgtgtccggcgatagcatcagcagcggcgattactactggggctggatcagacagcctcctggcaaaggactggaatggatcggccacatctactacagcggcgtgacctactacaaccccagcctgaagtccagagtgaccatcagcgtggacaccagccggaaccagttctccctgaagctgtctagcgtgacagccgccgataccgccgtgtactactgcaccagagaggacagcagcaactggcggagtagaggccagggaacactggtcacagttagctctggatccggcggaggcggaagtggaggcggaggatctggcggcggaggctctttcgaacaggtgcaactggtgcagagcggagccgaagtgaagaaacctggggccagcgtgaaggtgtcctgcaaggtgtccggctacaccctgaccgagctgagcattcactgggtgcgccaggcccctggcaagggactggaatggatgggcggcttcgaccccgaagagaacgagatcgtgtacgcccagcggttccagggcagagtgacaatgaccgaggacaccagcaccgacaccgcctacatggaactgagcagcctgcggagcgaggataccgccgtgtactactgcgccatcgtgggcagcttcagccctctgacactgggcctgtggggccagggaactatggtcaccgtgtccagcacgcgtatccagaaccctgatcctgccgtgtaccagctgcgggatagcaagagcagcgacaagagcgtgtgtctgttcaccgacttcgacagccagaccaacgtgtcccagagcaaggactccgacgtgtacatcaccgataagaccgtgctggacatgcggagcatggacttcaagagcaactccgccgtggcctggtccaacaagtccgatttcgcctgcgccaacgccttcaacaacagcattatccccgaggacacattcttcccaagccccgagagcagctgcggtacccagagttttgggttgttggaccctaaattgtgctatctgttggacggaatcctgttcatttacggagtgatcctgaccgcattgttcctgcgggttaagttttccagatccgcagacgcacccgcttaccaacaagggcagaaccaactctacaatgaacttaatttggggcggagggaagagtacgacgttctggacaaaaggaggggacgagatcccgagatgggcggaaagcctcagcgaaggaagaatccgcaagaggggctttataacgaactccagaaagataaaatggcagaagcctatagtgagattgggatgaagggagaaaggaggaggggtaaaggtcacgatgggttgtaccaaggattgagcacagccactaaagatacctatgatgcgctccacatgcaggccctgccgccaaga

SEQ ID NO: 2719 - DNA, 3282 bp, Artificial Sequence
  Synthetic Polynucloetide
atggccttaccagtgaccgccttgctcctgccgctggccttgctgctccacgccgccaggccggaagtgcagctggttgaatctggcggaggactggttcagcctggcggatctctgagactgtcttgtgccgccagcggcttcagcttcagcgacttttggatgagctgggtccgacaggcccctggcaaaggacttgaatgggtcgccacaatcagccaggccggcagcgagaaggactacgtggactctgtgaagggcagattcaccatcagccgggacaacgccaagaagtccctgtacctccagatgaacagcctgagagccgaggacaccgccgtgtactattgtgcctctggcgtgtacagcttcgactacagaggccagggcaccctggtcacagtctcttctggtaccggcggaggcggatctggcggcggaggtagcggtggcggaggatctgaattccagagcgtgctgacacagcctccatccgtgtctggcgctccaggccagagagtgaccatctcctgtaccggcagcggcagcaacatcggagccccctacgacgtgtcctggtatcagcaactgcctggcaccgcccccaagctgctgatctaccacaacaacaagcggcccagcggcgtgcccgatagattcagcggctctaagagcggcaccagcgccagcctggctatcactggactccaggccgaggacgaggccgactactactgccagagctacgacagcagcagcatcagcaccatcttcggcggaggcaccaagctgacagtgctgggagctctcgaggacctgaagaacgtgttcccacctgaggtggccgtgttcgagcctagcgaggccgagatcagccacacccagaaagccaccctcgtgtgcctggctaccggcttctaccccgaccatgtggaactgtcttggtgggtcaacggcaaagaggtgcacagcggcgtgtctaccgacccccagccactgaaagaacagcccgccctgaacgacagccggtactgcctgagcagcagactgagagtgtccgccaccttctggcagaacccccggaaccacttcagatgccaggtgcagttctacggcctgagcgagaacgacgagtggacccaggacagagccaagcccgtgacccagatcgtgtctgccgaagcctggggcagagccgattgcggatcccagagcttcggcctgctggaccccaagctgtgctacctgctggatggcatcctgttcatctacggcgtgatcctgaccgccctgttcctgagagtgaagttcagcagaagcgccgacgcccctgcctaccagcagggacagaaccaactgtacaacgagctgaacctgggcagacgggaagagtacgacgtgctggacaagcggagaggcagggaccctgagatgggcggaaagccccagcggagaaagaacccccaggaaggactgtataacgaactccagaaagacaagatggccgaagcctacagcgagatcggcatgaagggcgagcggagaagaggcaagggccacgatggcctgtaccagggcctgagcaccgccaccaaggacacctatgacgccctgcacatgcaggccctgcctccaagaagggccaagcgatctggatctggagcaacaaacttctcactactcaaacaagcaggtgacgtggaggagaatcccgggcctactagtatggactggatttggcgcatccttttccttgtcggcgctgctaccggcgcgcattccgggccccagctccagctgcaagagtctggacctggcctggtcaagcctagcgagacactgagcctgacctgtaccgtgtccggcgatagcatcagcagcggcgattactactggggctggatcagacagcctcctggcaaaggactggaatggatcggccacatctactacagcggcgtgacctactacaaccccagcctgaagtccagagtgaccatcagcgtggacaccagccggaaccagttctccctgaagctgtctagcgtgacagccgccgataccgccgtgtactactgcaccagagaggacagcagcaactggcggagtagaggccagggaacactggtcacagttagctctggatccggcggaggcggaagtggaggcggaggatctggcggcggaggctctttcgaacaggtgcaactggtgcagagcggagccgaagtgaagaaacctggggccagcgtgaaggtgtcctgcaaggtgtccggctacaccctgaccgagctgagcattcactgggtgcgccaggcccctggcaagggactggaatggatgggcggcttcgaccccgaagagaacgagatcgtgtacgcccagcggttccagggcagagtgacaatgaccgaggacaccagcaccgacaccgcctacatggaactgagcagcctgcggagcgaggataccgccgtgtactactgtgccatcgtgggcagcttcagcggaatcgcctacagaccttggggccagggcacaatggtcaccgtgtctagcacgcgtatccagaaccctgatcctgccgtgtaccagctgcgggatagcaagagcagcgacaagagcgtgtgtctgttcaccgacttcgacagccagaccaacgtgtcccagagcaaggactccgacgtgtacatcaccgataagaccgtgctggacatgcggagcatggacttcaagagcaactccgccgtggcctggtccaacaagtccgatttcgcctgcgccaacgccttcaacaacagcattatccccgaggacacattcttcccaagccccgagagcagctgcggtacccagagttttgggttgttggaccctaaattgtgctatctgttggacggaatcctgttcatttacggagtgatcctgaccgcattgttcctgcgggttaagttttccagatccgcagacgcacccgcttaccaacaagggcagaaccaactctacaatgaacttaatttggggcggagggaagagtacgacgttctggacaaaaggaggggacgagatcccgagatgggcggaaagcctcagcgaaggaagaatccgcaagaggggctttataacgaactccagaaagataaaatggcagaagcctatagtgagattgggatgaagggagaaaggaggaggggtaaaggtcacgatgggttgtaccaaggattgagcacagccactaaagatacctatgatgcgctccacatgcaggccctgccgccaaga

SEQ ID NO: 2720 - DNA, 3246 bp, Artificial Sequence
  Synthetic Polynucloetide
atggccttaccagtgaccgccttgctcctgccgctggccttgctgctccacgccgccaggccggaagtgcagctggttgaatctggcggaggactggttcagcctggcggatctctgagactgtcttgtgccgccagcggcttcagcttcagcgacttttggatgagctgggtccgacaggcccctggcaaaggacttgaatgggtcgccacaatcagccaggccggcagcgagaaggactacgtggactctgtgaagggcagattcaccatcagccgggacaacgccaagaagtccctgtacctccagatgaacagcctgagagccgaggacaccgccgtgtactattgtgcctctggcgtgtacagcttcgactacagaggccagggcaccctggtcacagtctcttctggtaccggcggaggcggatctggcggcggaggtagcggtggcggaggatctgaattcgacatccagatgacccagagccccagcagcctgtctgccagcgtgggcgacagagtgaccatcacctgtagagccagccagggcatcagaaacaacctggcctggtatcagcagaagcccggcaaggcccccaagcggctgatctacgccgccagcaatctccagagcggcgtgcccagcagattcacaggctctggcagcggcaccgagttcaccctgatcgtgtctagcctccagcccgaggacttcgccacctactactgcctccagcaccacagctaccccctgacatctggcggaggcaccaaggtggaactcgaggacctgaagaacgtgttcccacctgaggtggccgtgttcgagcctagcgaggccgagatcagccacacccagaaagccaccctcgtgtgcctggctaccggcttctaccccgaccatgtggaactgtcttggtgggtcaacggcaaagaggtgcacagcggcgtgtctaccgacccccagccactgaaagaacagcccgccctgaacgacagccggtactgcctgagcagcagactgagagtgtccgccaccttctggcagaacccccggaaccacttcagatgccaggtgcagttctacggcctgagcgagaacgacgagtggacccaggacagagccaagcccgtgacccagatcgtgtctgccgaagcctggggcagagccgattgcggatcccagagcttcggcctgctggaccccaagctgtgctacctgctggatggcatcctgttcatctacggcgtgatcctgaccgccctgttcctgagagtgaagttcagcagaagcgccgacgcccctgcctaccagcagggacagaaccaactgtacaacgagctgaacctgggcagacgggaagagtacgacgtgctggacaagcggagaggcagggaccctgagatgggcggaaagccccagcggagaaagaacccccaggaaggactgtataacgaactccagaaagacaagatggccgaagcctacagcgagatcggcatgaagggcgagcggagaagaggcaagggccacgatggcctgtaccagggcctgagcaccgccaccaaggacacctatgacgccctgcacatgcaggccctgcctccaagaagggccaagcgatctggatctggagcaacaaacttctcactactcaaacaagcaggtgacgtggaggagaatcccgggcctactagtatggactggatttggcgcatccttttccttgtcggcgctgctaccggcgcgcattccgggccccagctccagctgcaagagtctggacctggcctggtcaagcctagcgagacactgagcctgacctgtaccgtgtccggcgatagcatcagcagcggcgattactactggggctggatcagacagcctcctggcaaaggactggaatggatcggccacatctactacagcggcgtgacctactacaaccccagcctgaagtccagagtgaccatcagcgtggacaccagccggaaccagttctccctgaagctgtctagcgtgacagccgccgataccgccgtgtactactgcaccagagaggacagcagcaactggcggagtagaggccagggaacactggtcacagttagctctggatccggcggaggcggaagtggaggcggaggatctggcggcggaggctctttcgaagaggtgcaggtgctggaaagtggcggaggactggtgcagcctggcggctctctgagactgtcttgtgccgccagcggcttcaccttcagcagctacgccatgagctgggtgcgccaggcccctggaaaaggactggaatgggtgtccgccatcagcggctctggcgggtctaccaactacgccgatagcgtgaagggccggttcaccatcagccgggacaacagcaagaacaccctgtacctccagatgaacagcctgcgggccgaggacaccgccgtgtattattgtgccggcagcagcgggtggagcgagtattggggacagggcaccctcgtgaccgtgtcctctacgcgtatccagaaccctgatcctgccgtgtaccagctgcgggatagcaagagcagcgacaagagcgtgtgtctgttcaccgacttcgacagccagaccaacgtgtcccagagcaaggactccgacgtgtacatcaccgataagaccgtgctggacatgcggagcatggacttcaagagcaactccgccgtggcctggtccaacaagtccgatttcgcctgcgccaacgccttcaacaacagcattatccccgaggacacattcttcccaagccccgagagcagctgcggtacccagagttttgggttgttggaccctaaattgtgctatctgttggacggaatcctgttcatttacggagtgatcctgaccgcattgttcctgcgggttaagttttccagatccgcagacgcacccgcttaccaacaagggcagaaccaactctacaatgaacttaatttggggcggagggaagagtacgacgttctggacaaaaggaggggacgagatcccgagatgggcggaaagcctcagcgaaggaagaatccgcaagaggggctttataacgaactccagaaagataaaatggcagaagcctatagtgagattgggatgaagggagaaaggaggaggggtaaaggtcacgatgggttgtaccaaggattgagcacagccactaaagatacctatgatgcgctccacatgcaggccctgccgccaaga

SEQ ID NO: 2721 - DNA, 3264 bp, Artificial Sequence
  Synthetic Polynucloetide
atggccttaccagtgaccgccttgctcctgccgctggccttgctgctccacgccgccaggccggaagtgcagctggttgaatctggcggaggactggttcagcctggcggatctctgagactgtcttgtgccgccagcggcttcagcttcagcgacttttggatgagctgggtccgacaggcccctggcaaaggacttgaatgggtcgccacaatcagccaggccggcagcgagaaggactacgtggactctgtgaagggcagattcaccatcagccgggacaacgccaagaagtccctgtacctccagatgaacagcctgagagccgaggacaccgccgtgtactattgtgcctctggcgtgtacagcttcgactacagaggccagggcaccctggtcacagtctcttctggtaccggcggaggcggatctggcggcggaggtagcggtggcggaggatctgaattcgacgagatccagctggtgcagagcggagccgaagtgaagaagcctggcgagagcctgcggatcagctgcaagggcagcggcttcaacatcgaggactactacatccactgggtgcgccagatgcccggcaagggcctggaatggatgggcagaatcgaccccgagaacgacgagactaagtacggccccatcttccagggccacgtgaccatcagcgccgacaccagcatcaacaccgtgtacctccagtggtccagcctgaaggccagcgacaccgccatgtactactgcgcctttagaggcggcgtgtactggggccagggcaccacagtgacagtgtctagcctcgaggacctgaagaacgtgttcccacctgaggtggccgtgttcgagcctagcgaggccgagatcagccacacccagaaagccaccctcgtgtgcctggctaccggcttctaccccgaccatgtggaactgtcttggtgggtcaacggcaaagaggtgcacagcggcgtgtctaccgacccccagccactgaaagaacagcccgccctgaacgacagccggtactgcctgagcagcagactgagagtgtccgccaccttctggcagaacccccggaaccacttcagatgccaggtgcagttctacggcctgagcgagaacgacgagtggacccaggacagagccaagcccgtgacccagatcgtgtctgccgaagcctggggcagagccgattgcggatcccagagcttcggcctgctggaccccaagctgtgctacctgctggatggcatcctgttcatctacggcgtgatcctgaccgccctgttcctgagagtgaagttcagcagaagcgccgacgcccctgcctaccagcagggacagaaccaactgtacaacgagctgaacctgggcagacgggaagagtacgacgtgctggacaagcggagaggcagggaccctgagatgggcggaaagccccagcggagaaagaacccccaggaaggactgtataacgaactccagaaagacaagatggccgaagcctacagcgagatcggcatgaagggcgagcggagaagaggcaagggccacgatggcctgtaccagggcctgagcaccgccaccaaggacacctatgacgccctgcacatgcaggccctgcctccaagaagggccaagcgatctggatctggagcaacaaacttctcactactcaaacaagcaggtgacgtggaggagaatcccgggcctactagtatggactggatttggcgcatccttttccttgtcggcgctgctaccggcgcgcattccgggccccagctccagctgcaagagtctggacctggcctggtcaagcctagcgagacactgagcctgacctgtaccgtgtccggcgatagcatcagcagcggcgattactactggggctggatcagacagcctcctggcaaaggactggaatggatcggccacatctactacagcggcgtgacctactacaaccccagcctgaagtccagagtgaccatcagcgtggacaccagccggaaccagttctccctgaagctgtctagcgtgacagccgccgataccgccgtgtactactgcaccagagaggacagcagcaactggcggagtagaggccagggaacactggtcacagttagctctggatccggcggaggcggaagtggaggcggaggatctggcggcggaggctctttcgaagatgtcgtgatgacccagagccccgacagcctggctgtgtctctgggagagagagccaccatcaactgcaagtccagccagtccctgctggacagcgacggcaagacctacctgaactggctccagcagaagcccggccagccccccaagagactgatctccctggtgtccaagctggactccggcgtgcccgatagattttccggctctggcagcggcaccgacttcaccctgacaatcagctcccttcaggccgaggacgtggccgtgtactattgctggcagggcacacacttccccggcacctttggcggaggcaccaaggtggaaatcaagacgcgtatccagaaccctgatcctgccgtgtaccagctgcgggatagcaagagcagcgacaagagcgtgtgtctgttcaccgacttcgacagccagaccaacgtgtcccagagcaaggactccgacgtgtacatcaccgataagaccgtgctggacatgcggagcatggacttcaagagcaactccgccgtggcctggtccaacaagtccgatttcgcctgcgccaacgccttcaacaacagcattatccccgaggacacattcttcccaagccccgagagcagctgcggtacccagagttttgggttgttggaccctaaattgtgctatctgttggacggaatcctgttcatttacggagtgatcctgaccgcattgttcctgcgggttaagttttccagatccgcagacgcacccgcttaccaacaagggcagaaccaactctacaatgaacttaatttggggcggagggaagagtacgacgttctggacaaaaggaggggacgagatcccgagatgggcggaaagcctcagcgaaggaagaatccgcaagaggggctttataacgaactccagaaagataaaatggcagaagcctatagtgagattgggatgaagggagaaaggaggaggggtaaaggtcacgatgggttgtaccaaggattgagcacagccactaaagatacctatgatgcgctccacatgcaggccctgccgccaaga

SEQ ID NO: 2722 - DNA, 3285 bp, Artificial Sequence
  Synthetic Polynucloetide
atggccttaccagtgaccgccttgctcctgccgctggccttgctgctccacgccgccaggccggaagtgcagctggttgaatctggcggaggactggttcagcctggcggatctctgagactgtcttgtgccgccagcggcttcagcttcagcgacttttggatgagctgggtccgacaggcccctggcaaaggacttgaatgggtcgccacaatcagccaggccggcagcgagaaggactacgtggactctgtgaagggcagattcaccatcagccgggacaacgccaagaagtccctgtacctccagatgaacagcctgagagccgaggacaccgccgtgtactattgtgcctctggcgtgtacagcttcgactacagaggccagggcaccctggtcacagtctcttctggtaccggcggaggcggatctggcggcggaggtagcggtggcggaggatctgaattcgacgagcttgtgatgacccagagccccagcagcctgacagtgacagccggcgagaaagtgaccatgagctgcaagagcagccagagcctgctgaacagcggcaaccagaagaactacctgacctggtatcagcagaagcccggccagccccccaagctgctgatctactgggccagcaccagagaaagcggcgtgcccgatagattcaccggctctggcagcggcaccgacttcaccctgacaatcagcagcgtgcaggccgaggacctggccgtgtactactgccagaacgactacagctaccccctgaccttcggagccggcaccaagctggaaatcaagctcgaggacctgaagaacgtgttcccacctgaggtggccgtgttcgagcctagcgaggccgagatcagccacacccagaaagccaccctcgtgtgcctggctaccggcttctaccccgaccatgtggaactgtcttggtgggtcaacggcaaagaggtgcacagcggcgtgtctaccgacccccagccactgaaagaacagcccgccctgaacgacagccggtactgcctgagcagcagactgagagtgtccgccaccttctggcagaacccccggaaccacttcagatgccaggtgcagttctacggcctgagcgagaacgacgagtggacccaggacagagccaagcccgtgacccagatcgtgtctgccgaagcctggggcagagccgattgcggatcccagagcttcggcctgctggaccccaagctgtgctacctgctggatggcatcctgttcatctacggcgtgatcctgaccgccctgttcctgagagtgaagttcagcagaagcgccgacgcccctgcctaccagcagggacagaaccaactgtacaacgagctgaacctgggcagacgggaagagtacgacgtgctggacaagcggagaggcagggaccctgagatgggcggaaagccccagcggagaaagaacccccaggaaggactgtataacgaactccagaaagacaagatggccgaagcctacagcgagatcggcatgaagggcgagcggagaagaggcaagggccacgatggcctgtaccagggcctgagcaccgccaccaaggacacctatgacgccctgcacatgcaggccctgcctccaagaagggccaagcgatctggatctggagcaacaaacttctcactactcaaacaagcaggtgacgtggaggagaatcccgggcctactagtatggactggatttggcgcatccttttccttgtcggcgctgctaccggcgcgcattccgggccccagctccagctgcaagagtctggacctggcctggtcaagcctagcgagacactgagcctgacctgtaccgtgtccggcgatagcatcagcagcggcgattactactggggctggatcagacagcctcctggcaaaggactggaatggatcggccacatctactacagcggcgtgacctactacaaccccagcctgaagtccagagtgaccatcagcgtggacaccagccggaaccagttctccctgaagctgtctagcgtgacagccgccgataccgccgtgtactactgcaccagagaggacagcagcaactggcggagtagaggccagggaacactggtcacagttagctctggatccggcggaggcggaagtggaggcggaggatctggcggcggaggctctttcgaagaagtgcagctgctggaacagtctggcgccgaacttgtgcggcctggcaccagcgtgaagatcagctgtaaagccagcggctacgccttcaccaactactggctgggctgggtcaagcagaggcctggacacggcctggaatggatcggcgacatctttcccggctccggcaacatccactacaacgagaagttcaagggcaaggccaccctgaccgccgacaagtctagcagcaccgcctacatgcagctgtccagcctgacctttgaggacagcgccgtgtatttctgtgcccggctgcggaactgggacgagcccatggattattggggccagggcaccaccgtgaccgtgtctagtacgcgtatccagaaccctgatcctgccgtgtaccagctgcgggatagcaagagcagcgacaagagcgtgtgtctgttcaccgacttcgacagccagaccaacgtgtcccagagcaaggactccgacgtgtacatcaccgataagaccgtgctggacatgcggagcatggacttcaagagcaactccgccgtggcctggtccaacaagtccgatttcgcctgcgccaacgccttcaacaacagcattatccccgaggacacattcttcccaagccccgagagcagctgcggtacccagagttttgggttgttggaccctaaattgtgctatctgttggacggaatcctgttcatttacggagtgatcctgaccgcattgttcctgcgggttaagttttccagatccgcagacgcacccgcttaccaacaagggcagaaccaactctacaatgaacttaatttggggcggagggaagagtacgacgttctggacaaaaggaggggacgagatcccgagatgggcggaaagcctcagcgaaggaagaatccgcaagaggggctttataacgaactccagaaagataaaatggcagaagcctatagtgagattgggatgaagggagaaaggaggaggggtaaaggtcacgatgggttgtaccaaggattgagcacagccactaaagatacctatgatgcgctccacatgcaggccctgccgccaaga

SEQ ID NO: 2723 - DNA, 3288 bp, Artificial Sequence
  Synthetic Polynucloetide
atggccttaccagtgaccgccttgctcctgccgctggccttgctgctccacgccgccaggccggaagtgcagctggttgaatctggcggaggactggttcagcctggcggatctctgagactgtcttgtgccgccagcggcttcagcttcagcgacttttggatgagctgggtccgacaggcccctggcaaaggacttgaatgggtcgccacaatcagccaggccggcagcgagaaggactacgtggactctgtgaagggcagattcaccatcagccgggacaacgccaagaagtccctgtacctccagatgaacagcctgagagccgaggacaccgccgtgtactattgtgcctctggcgtgtacagcttcgactacagaggccagggcaccctggtcacagtctcttctggtaccggcggaggcggatctggcggcggaggtagcggtggcggaggatctgaattcgacgagctgcagatgacccagagccctagcagcctgtctgccagcgtgggcgacagagtgaccatcacctgtagagccagccagagcatcagcagctacctgaactggtatcagcagaagcccggccagccccccaaactgctgatctactgggccagcaccagagaaagcggcgtgcccgatagattcagcggcagcgagagcggcaccaactacaccctgaccatcagctccctgcagcccgaggacttcgccacctacttttgccagcagagcgacagcctgcccatcacctttggacagggcacccggctggacattcagctcgaggacctgaagaacgtgttcccacctgaggtggccgtgttcgagcctagcgaggccgagatcagccacacccagaaagccaccctcgtgtgcctggctaccggcttctaccccgaccatgtggaactgtcttggtgggtcaacggcaaagaggtgcacagcggcgtgtctaccgacccccagccactgaaagaacagcccgccctgaacgacagccggtactgcctgagcagcagactgagagtgtccgccaccttctggcagaacccccggaaccacttcagatgccaggtgcagttctacggcctgagcgagaacgacgagtggacccaggacagagccaagcccgtgacccagatcgtgtctgccgaagcctggggcagagccgattgcggatcccagagcttcggcctgctggaccccaagctgtgctacctgctggatggcatcctgttcatctacggcgtgatcctgaccgccctgttcctgagagtgaagttcagcagaagcgccgacgcccctgcctaccagcagggacagaaccaactgtacaacgagctgaacctgggcagacgggaagagtacgacgtgctggacaagcggagaggcagggaccctgagatgggcggaaagccccagcggagaaagaacccccaggaaggactgtataacgaactccagaaagacaagatggccgaagcctacagcgagatcggcatgaagggcgagcggagaagaggcaagggccacgatggcctgtaccagggcctgagcaccgccaccaaggacacctatgacgccctgcacatgcaggccctgcctccaagaagggccaagcgatctggatctggagcaacaaacttctcactactcaaacaagcaggtgacgtggaggagaatcccgggcctactagtatggactggatttggcgcatccttttccttgtcggcgctgctaccggcgcgcattccgggccccagctccagctgcaagagtctggacctggcctggtcaagcctagcgagacactgagcctgacctgtaccgtgtccggcgatagcatcagcagcggcgattactactggggctggatcagacagcctcctggcaaaggactggaatggatcggccacatctactacagcggcgtgacctactacaaccccagcctgaagtccagagtgaccatcagcgtggacaccagccggaaccagttctccctgaagctgtctagcgtgacagccgccgataccgccgtgtactactgcaccagagaggacagcagcaactggcggagtagaggccagggaacactggtcacagttagctctggatccggcggaggcggaagtggaggcggaggatctggcggcggaggctctttcgaagaggtgcaactgctggaatctgggggcggagtggtgcagcctggcagaagcctgagactgagctgtgccgccagcggcttcaccttcagctcctacggaatgcactgggtgcgccaggcccctggcaaaggactggaatgggtggccgtgatctcctacgacggcagcaacaagtactacgccgacagcgtgaagggccggttcaccatcagccgggacaacagcaagaacaccctgtacctgcagatgaacagcctgcgggccgaggacaccgccgtgtactactgcgccaaggatatgggctggggcagcggctggcggccttactactactacggcatggacgtgtggggccagggcaccaccgtgacagtgtcatctacgcgtatccagaaccctgatcctgccgtgtaccagctgcgggatagcaagagcagcgacaagagcgtgtgtctgttcaccgacttcgacagccagaccaacgtgtcccagagcaaggactccgacgtgtacatcaccgataagaccgtgctggacatgcggagcatggacttcaagagcaactccgccgtggcctggtccaacaagtccgatttcgcctgcgccaacgccttcaacaacagcattatccccgaggacacattcttcccaagccccgagagcagctgcggtacccagagttttgggttgttggaccctaaattgtgctatctgttggacggaatcctgttcatttacggagtgatcctgaccgcattgttcctgcgggttaagttttccagatccgcagacgcacccgcttaccaacaagggcagaaccaactctacaatgaacttaatttggggcggagggaagagtacgacgttctggacaaaaggaggggacgagatcccgagatgggcggaaagcctcagcgaaggaagaatccgcaagaggggctttataacgaactccagaaagataaaatggcagaagcctatagtgagattgggatgaagggagaaaggaggaggggtaaaggtcacgatgggttgtaccaaggattgagcacagccactaaagatacctatgatgcgctccacatgcaggccctgccgccaaga

SEQ ID NO: 2724 - DNA, 3279 bp, Artificial Sequence
  Synthetic Polynucloetide
atggccttaccagtgaccgccttgctcctgccgctggccttgctgctccacgccgccaggccggaagtgcagctggttgaatctggcggaggactggttcagcctggcggatctctgagactgtcttgtgccgccagcggcttcagcttcagcgacttttggatgagctgggtccgacaggcccctggcaaaggacttgaatgggtcgccacaatcagccaggccggcagcgagaaggactacgtggactctgtgaagggcagattcaccatcagccgggacaacgccaagaagtccctgtacctccagatgaacagcctgagagccgaggacaccgccgtgtactattgtgcctctggcgtgtacagcttcgactacagaggccagggcaccctggtcacagtctcttctggtaccggcggaggcggatctggcggcggaggtagcggtggcggaggatctgaattcgacgacatccaaatgacacagagtccttctagtttgagtgcgagcgtgggggacagggtgaccattacctgcagggccagccagagcataagctcataccttaattggtaccagcaaaaaccaggtaaggcccctaagctcctgatctacgcggcctcttcacttcaatctggggtcccttcccgcttcagtggctccggcagcggcaccgacttcacgctcactatatcaagtctgcagcctgaggatctcgccacctattactgtcaacaaagttattccacccctttcacctttggaccgggcacgaaagtggatattaagctcgaggacctgaagaacgtgttcccacctgaggtggccgtgttcgagcctagcgaggccgagatcagccacacccagaaagccaccctcgtgtgcctggctaccggcttctaccccgaccatgtggaactgtcttggtgggtcaacggcaaagaggtgcacagcggcgtgtctaccgacccccagccactgaaagaacagcccgccctgaacgacagccggtactgcctgagcagcagactgagagtgtccgccaccttctggcagaacccccggaaccacttcagatgccaggtgcagttctacggcctgagcgagaacgacgagtggacccaggacagagccaagcccgtgacccagatcgtgtctgccgaagcctggggcagagccgattgcggatcccagagcttcggcctgctggaccccaagctgtgctacctgctggatggcatcctgttcatctacggcgtgatcctgaccgccctgttcctgagagtgaagttcagcagaagcgccgacgcccctgcctaccagcagggacagaaccaactgtacaacgagctgaacctgggcagacgggaagagtacgacgtgctggacaagcggagaggcagggaccctgagatgggcggaaagccccagcggagaaagaacccccaggaaggactgtataacgaactccagaaagacaagatggccgaagcctacagcgagatcggcatgaagggcgagcggagaagaggcaagggccacgatggcctgtaccagggcctgagcaccgccaccaaggacacctatgacgccctgcacatgcaggccctgcctccaagaagggccaagcgatctggatctggagcaacaaacttctcactactcaaacaagcaggtgacgtggaggagaatcccgggcctactagtatggactggatttggcgcatccttttccttgtcggcgctgctaccggcgcgcattccgggccccagctccagctgcaagagtctggacctggcctggtcaagcctagcgagacactgagcctgacctgtaccgtgtccggcgatagcatcagcagcggcgattactactggggctggatcagacagcctcctggcaaaggactggaatggatcggccacatctactacagcggcgtgacctactacaaccccagcctgaagtccagagtgaccatcagcgtggacaccagccggaaccagttctccctgaagctgtctagcgtgacagccgccgataccgccgtgtactactgcaccagagaggacagcagcaactggcggagtagaggccagggaacactggtcacagttagctctggatccggcggaggcggaagtggaggcggaggatctggcggcggaggctctttcgaagtgcacgaggtccagcttgtgcagtccggggcagaggtcaagaagcctggttctagcgtaaaagtgagttgcaaagcctcaggtgggacattttcatcctacgcgatcagttgggttagacaggctcctggtcaagggctggaatggatgggcggaattattccaatcttcggaacagcgaattacgcgcagaagttccagggtagagtaaccatcactgctgacaagtccacctccaccgcatacatggaattgtctagtctccggagcgaggatacggcggtgtattattgtgctacgttcgccctgtttggcttccgcgaacaggctttcgacatctgggggcagggcacgacagtcacggttagtagtacgcgtatccagaaccctgatcctgccgtgtaccagctgcgggatagcaagagcagcgacaagagcgtgtgtctgttcaccgacttcgacagccagaccaacgtgtcccagagcaaggactccgacgtgtacatcaccgataagaccgtgctggacatgcggagcatggacttcaagagcaactccgccgtggcctggtccaacaagtccgatttcgcctgcgccaacgccttcaacaacagcattatccccgaggacacattcttcccaagccccgagagcagctgcggtacccagagttttgggttgttggaccctaaattgtgctatctgttggacggaatcctgttcatttacggagtgatcctgaccgcattgttcctgcgggttaagttttccagatccgcagacgcacccgcttaccaacaagggcagaaccaactctacaatgaacttaatttggggcggagggaagagtacgacgttctggacaaaaggaggggacgagatcccgagatgggcggaaagcctcagcgaaggaagaatccgcaagaggggctttataacgaactccagaaagataaaatggcagaagcctatagtgagattgggatgaagggagaaaggaggaggggtaaaggtcacgatgggttgtaccaaggattgagcacagccactaaagatacctatgatgcgctccacatgcaggccctgccgccaaga

SEQ ID NO: 2725 - DNA, 3273 bp, Artificial Sequence
  Synthetic Polynucloetide
atggccttaccagtgaccgccttgctcctgccgctggccttgctgctccacgccgccaggccggaagtgcagctggttgaatctggcggaggactggttcagcctggcggatctctgagactgtcttgtgccgccagcggcttcagcttcagcgacttttggatgagctgggtccgacaggcccctggcaaaggacttgaatgggtcgccacaatcagccaggccggcagcgagaaggactacgtggactctgtgaagggcagattcaccatcagccgggacaacgccaagaagtccctgtacctccagatgaacagcctgagagccgaggacaccgccgtgtactattgtgcctctggcgtgtacagcttcgactacagaggccagggcaccctggtcacagtctcttctggtaccggcggaggcggatctggcggcggaggtagcggtggcggaggatctgaattcgacatcgtgctgacccagagccctctgagcctggccgtgtctctgggacagcctgccatcatcagctgcaaggccagccagagcgtgtcctttgccggcacctctctgatgcactggtatcaccagaagcccggccagcagcccagactgctgatctacagagccagcaacctggaagccggcgtgcccgatagattttccggcagcggcagcaagaccgacttcaccctgaccatcagccccgtggaagccgaagatgccgccacctactactgccagcagagcagagagtacccctacaccttcggcggaggcaccaagctggaaatcaagaggctcgaggacctgaagaacgtgttcccacctgaggtggccgtgttcgagcctagcgaggccgagatcagccacacccagaaagccaccctcgtgtgcctggctaccggcttctaccccgaccatgtggaactgtcttggtgggtcaacggcaaagaggtgcacagcggcgtgtctaccgacccccagccactgaaagaacagcccgccctgaacgacagccggtactgcctgagcagcagactgagagtgtccgccaccttctggcagaacccccggaaccacttcagatgccaggtgcagttctacggcctgagcgagaacgacgagtggacccaggacagagccaagcccgtgacccagatcgtgtctgccgaagcctggggcagagccgattgcggatcccagagcttcggcctgctggaccccaagctgtgctacctgctggatggcatcctgttcatctacggcgtgatcctgaccgccctgttcctgagagtgaagttcagcagaagcgccgacgcccctgcctaccagcagggacagaaccaactgtacaacgagctgaacctgggcagacgggaagagtacgacgtgctggacaagcggagaggcagggaccctgagatgggcggaaagccccagcggagaaagaacccccaggaaggactgtataacgaactccagaaagacaagatggccgaagcctacagcgagatcggcatgaagggcgagcggagaagaggcaagggccacgatggcctgtaccagggcctgagcaccgccaccaaggacacctatgacgccctgcacatgcaggccctgcctccaagaagggccaagcgatctggatctggagcaacaaacttctcactactcaaacaagcaggtgacgtggaggagaatcccgggcctactagtatggactggatttggcgcatccttttccttgtcggcgctgctaccggcgcgcattccgggccccagctccagctgcaagagtctggacctggcctggtcaagcctagcgagacactgagcctgacctgtaccgtgtccggcgatagcatcagcagcggcgattactactggggctggatcagacagcctcctggcaaaggactggaatggatcggccacatctactacagcggcgtgacctactacaaccccagcctgaagtccagagtgaccatcagcgtggacaccagccggaaccagttctccctgaagctgtctagcgtgacagccgccgataccgccgtgtactactgcaccagagaggacagcagcaactggcggagtagaggccagggaacactggtcacagttagctctggatccggcggaggcggaagtggaggcggaggatctggcggcggaggctctttcgaacaggtccaactggtgcagagcggagccgaggtcgtgaagcctggcgcttccgtgaagattagctgcaaagccagcggctacacctttaccggctactttatgaactgggtcaagcagagccctggccagagcctggaatggatcggcagaatccacccctacgacggcgacaccttctacaaccagaagttccagggcaaggccaccctgacagtggacaagagcagcaacaccgcccacatggaactgctgagcctgaccagcgaggacttcgccgtgtactactgcaccagatacgacggcagccgggctatggactattggggccagggcaccaccgtgaccgtgtctagtacgcgtatccagaaccctgatcctgccgtgtaccagctgcgggatagcaagagcagcgacaagagcgtgtgtctgttcaccgacttcgacagccagaccaacgtgtcccagagcaaggactccgacgtgtacatcaccgataagaccgtgctggacatgcggagcatggacttcaagagcaactccgccgtggcctggtccaacaagtccgatttcgcctgcgccaacgccttcaacaacagcattatccccgaggacacattcttcccaagccccgagagcagctgcggtacccagagttttgggttgttggaccctaaattgtgctatctgttggacggaatcctgttcatttacggagtgatcctgaccgcattgttcctgcgggttaagttttccagatccgcagacgcacccgcttaccaacaagggcagaaccaactctacaatgaacttaatttggggcggagggaagagtacgacgttctggacaaaaggaggggacgagatcccgagatgggcggaaagcctcagcgaaggaagaatccgcaagaggggctttataacgaactccagaaagataaaatggcagaagcctatagtgagattgggatgaagggagaaaggaggaggggtaaaggtcacgatgggttgtaccaaggattgagcacagccactaaagatacctatgatgcgctccacatgcaggccctgccgccaaga

SEQ ID NO: 2726 - DNA, 3264 bp, Artificial Sequence
  Synthetic Polynucloetide
atggccttaccagtgaccgccttgctcctgccgctggccttgctgctccacgccgccaggccggaagtgcagctggttgaatctggcggaggactggttcagcctggcggatctctgagactgtcttgtgccgccagcggcttcagcttcagcgacttttggatgagctgggtccgacaggcccctggcaaaggacttgaatgggtcgccacaatcagccaggccggcagcgagaaggactacgtggactctgtgaagggcagattcaccatcagccgggacaacgccaagaagtccctgtacctccagatgaacagcctgagagccgaggacaccgccgtgtactattgtgcctctggcgtgtacagcttcgactacagaggccagggcaccctggtcacagtctcttctggtaccggcggaggcggatctggcggcggaggtagcggtggcggaggatctgaattcgacgacgttgtgatgacccagacccccctgagcctgcctgtgacacctggcgaacctgccagcatcagctgtcggagcagccagagcctggtgcacagaaacggcaacacctacctgcactggtatctccagaagcccggccagagccccaagctgctgatccacaaggtgtccaacagattcagcggcgtgcccgacagattctccggcagcggctctggcaccgacttcaccctgaagatcagccgggtggaagccgaggacctgggcgtgtacttctgtagccagagcacccatgtgccccccctgacatttggagccggcaccaagctggaactgaagctcgaggacctgaagaacgtgttcccacctgaggtggccgtgttcgagcctagcgaggccgagatcagccacacccagaaagccaccctcgtgtgcctggctaccggcttctaccccgaccatgtggaactgtcttggtgggtcaacggcaaagaggtgcacagcggcgtgtctaccgacccccagccactgaaagaacagcccgccctgaacgacagccggtactgcctgagcagcagactgagagtgtccgccaccttctggcagaacccccggaaccacttcagatgccaggtgcagttctacggcctgagcgagaacgacgagtggacccaggacagagccaagcccgtgacccagatcgtgtctgccgaagcctggggcagagccgattgcggatcccagagcttcggcctgctggaccccaagctgtgctacctgctggatggcatcctgttcatctacggcgtgatcctgaccgccctgttcctgagagtgaagttcagcagaagcgccgacgcccctgcctaccagcagggacagaaccaactgtacaacgagctgaacctgggcagacgggaagagtacgacgtgctggacaagcggagaggcagggaccctgagatgggcggaaagccccagcggagaaagaacccccaggaaggactgtataacgaactccagaaagacaagatggccgaagcctacagcgagatcggcatgaagggcgagcggagaagaggcaagggccacgatggcctgtaccagggcctgagcaccgccaccaaggacacctatgacgccctgcacatgcaggccctgcctccaagaagggccaagcgatctggatctggagcaacaaacttctcactactcaaacaagcaggtgacgtggaggagaatcccgggcctactagtatggactggatttggcgcatccttttccttgtcggcgctgctaccggcgcgcattccgggccccagctccagctgcaagagtctggacctggcctggtcaagcctagcgagacactgagcctgacctgtaccgtgtccggcgatagcatcagcagcggcgattactactggggctggatcagacagcctcctggcaaaggactggaatggatcggccacatctactacagcggcgtgacctactacaaccccagcctgaagtccagagtgaccatcagcgtggacaccagccggaaccagttctccctgaagctgtctagcgtgacagccgccgataccgccgtgtactactgcaccagagaggacagcagcaactggcggagtagaggccagggaacactggtcacagttagctctggatccggcggaggcggaagtggaggcggaggatctggcggcggaggctctttcgaagaagtgcagctggtgcagtctggcgctgaggtggaaaagcctggggccagcgtgaagattagctgcaaggccagcggcagcagcttcaccggctacaacatgaactgggtgcgccagaacatcggcaagagcctggaatggatcggagccatcgacccctactacggcggcaccagctacaaccagaagttcaagggcagagccaccctgaccgtggacaagagcaccagcaccgcctacatgcacctgaagtccctgcggagcgaggacaccgccgtgtactactgtgtgtccggcatggaatattggggccagggcaccagcgtgaccgtgtctagtacgcgtatccagaaccctgatcctgccgtgtaccagctgcgggatagcaagagcagcgacaagagcgtgtgtctgttcaccgacttcgacagccagaccaacgtgtcccagagcaaggactccgacgtgtacatcaccgataagaccgtgctggacatgcggagcatggacttcaagagcaactccgccgtggcctggtccaacaagtccgatttcgcctgcgccaacgccttcaacaacagcattatccccgaggacacattcttcccaagccccgagagcagctgcggtacccagagttttgggttgttggaccctaaattgtgctatctgttggacggaatcctgttcatttacggagtgatcctgaccgcattgttcctgcgggttaagttttccagatccgcagacgcacccgcttaccaacaagggcagaaccaactctacaatgaacttaatttggggcggagggaagagtacgacgttctggacaaaaggaggggacgagatcccgagatgggcggaaagcctcagcgaaggaagaatccgcaagaggggctttataacgaactccagaaagataaaatggcagaagcctatagtgagattgggatgaagggagaaaggaggaggggtaaaggtcacgatgggttgtaccaaggattgagcacagccactaaagatacctatgatgcgctccacatgcaggccctgccgccaaga

SEQ ID NO: 2727 - DNA, 3258 bp, Artificial Sequence
  Synthetic Polynucloetide
atggccttaccagtgaccgccttgctcctgccgctggccttgctgctccacgccgccaggccggaagtgcagctggttgaatctggcggaggactggttcagcctggcggatctctgagactgtcttgtgccgccagcggcttcagcttcagcgacttttggatgagctgggtccgacaggcccctggcaaaggacttgaatgggtcgccacaatcagccaggccggcagcgagaaggactacgtggactctgtgaagggcagattcaccatcagccgggacaacgccaagaagtccctgtacctccagatgaacagcctgagagccgaggacaccgccgtgtactattgtgcctctggcgtgtacagcttcgactacagaggccagggcaccctggtcacagtctcttctggtaccggcggaggcggatctggcggcggaggtagcggtggcggaggatctgaattcgacgagatcgtgatgacccagacccctgccaccctgtctgtgtctgccggcgagagagtgaccattacctgcaaggccagccagagcgtgtccaacgacgtgacctggtatcagcagaagcccggccaggcccccagactgctgatctacagcgccagcaacagatacagcggcgtgcccgccagattttccggcagcggctacggcaccgagttcaccttcaccatcagcagcgtgcagagcgaggacttcgccgtgtacttctgtcagcaagactacagcagcttcggccagggcaccaagctggaaatcaagaggctcgaggacctgaagaacgtgttcccacctgaggtggccgtgttcgagcctagcgaggccgagatcagccacacccagaaagccaccctcgtgtgcctggctaccggcttctaccccgaccatgtggaactgtcttggtgggtcaacggcaaagaggtgcacagcggcgtgtctaccgacccccagccactgaaagaacagcccgccctgaacgacagccggtactgcctgagcagcagactgagagtgtccgccaccttctggcagaacccccggaaccacttcagatgccaggtgcagttctacggcctgagcgagaacgacgagtggacccaggacagagccaagcccgtgacccagatcgtgtctgccgaagcctggggcagagccgattgcggatcccagagcttcggcctgctggaccccaagctgtgctacctgctggatggcatcctgttcatctacggcgtgatcctgaccgccctgttcctgagagtgaagttcagcagaagcgccgacgcccctgcctaccagcagggacagaaccaactgtacaacgagctgaacctgggcagacgggaagagtacgacgtgctggacaagcggagaggcagggaccctgagatgggcggaaagccccagcggagaaagaacccccaggaaggactgtataacgaactccagaaagacaagatggccgaagcctacagcgagatcggcatgaagggcgagcggagaagaggcaagggccacgatggcctgtaccagggcctgagcaccgccaccaaggacacctatgacgccctgcacatgcaggccctgcctccaagaagggccaagcgatctggatctggagcaacaaacttctcactactcaaacaagcaggtgacgtggaggagaatcccgggcctactagtatggactggatttggcgcatccttttccttgtcggcgctgctaccggcgcgcattccgggccccagctccagctgcaagagtctggacctggcctggtcaagcctagcgagacactgagcctgacctgtaccgtgtccggcgatagcatcagcagcggcgattactactggggctggatcagacagcctcctggcaaaggactggaatggatcggccacatctactacagcggcgtgacctactacaaccccagcctgaagtccagagtgaccatcagcgtggacaccagccggaaccagttctccctgaagctgtctagcgtgacagccgccgataccgccgtgtactactgcaccagagaggacagcagcaactggcggagtagaggccagggaacactggtcacagttagctctggatccggcggaggcggaagtggaggcggaggatctggcggcggaggctctttcgaacaggtgcagctggtggaatctggacctggcgtggtgcagcctggcagaagcctgagaatcagctgtgccgtgtccggcttcagcgtgaccaactacggcgtgcactgggtgcgccagccacctggaaaaggactggaatggctgggcgtgatctgggctggcggcatcaccaactacaacagcgccttcatgtcccggctgaccatctccaaggacaacagcaagaacaccgtgtacctccagatgaacagcctgcgggccgaggacaccgccatgtactactgtgcttccagaggcggccactacggctacgccctggattattggggccagggaaccctcgtgaccgtgtcctctacgcgtatccagaaccctgatcctgccgtgtaccagctgcgggatagcaagagcagcgacaagagcgtgtgtctgttcaccgacttcgacagccagaccaacgtgtcccagagcaaggactccgacgtgtacatcaccgataagaccgtgctggacatgcggagcatggacttcaagagcaactccgccgtggcctggtccaacaagtccgatttcgcctgcgccaacgccttcaacaacagcattatccccgaggacacattcttcccaagccccgagagcagctgcggtacccagagttttgggttgttggaccctaaattgtgctatctgttggacggaatcctgttcatttacggagtgatcctgaccgcattgttcctgcgggttaagttttccagatccgcagacgcacccgcttaccaacaagggcagaaccaactctacaatgaacttaatttggggcggagggaagagtacgacgttctggacaaaaggaggggacgagatcccgagatgggcggaaagcctcagcgaaggaagaatccgcaagaggggctttataacgaactccagaaagataaaatggcagaagcctatagtgagattgggatgaagggagaaaggaggaggggtaaaggtcacgatgggttgtaccaaggattgagcacagccactaaagatacctatgatgcgctccacatgcaggccctgccgccaaga

SEQ ID NO: 2728 - DNA, 3264 bp, Artificial Sequence
  Synthetic Polynucloetide
atggccttaccagtgaccgccttgctcctgccgctggccttgctgctccacgccgccaggccggaagtgcagctggttgaatctggcggaggactggttcagcctggcggatctctgagactgtcttgtgccgccagcggcttcagcttcagcgacttttggatgagctgggtccgacaggcccctggcaaaggacttgaatgggtcgccacaatcagccaggccggcagcgagaaggactacgtggactctgtgaagggcagattcaccatcagccgggacaacgccaagaagtccctgtacctccagatgaacagcctgagagccgaggacaccgccgtgtactattgtgcctctggcgtgtacagcttcgactacagaggccagggcaccctggtcacagtctcttctggtaccggcggaggcggatctggcggcggaggtagcggtggcggaggatctgaattcgacatccagatgacccagaccgccagcagcctgcctgcctctctgggcgacagagtgaccatctcctgtagcgccagccaggacatcagcaactacctgaactggtatcagcagaaacccgacggcaccgtgaagctgctgatcttctacagcagcaacctgcacagcggcgtgcccagcagattttctggcggcggaagcggcaccgactacagcctgaccatcagcaatctggaacccgaggacattgccacctacttttgccaccagtacagcaagctgccctggacctttggcggaggcaccaagctggaaatcaagagactcgaggacctgaagaacgtgttcccacctgaggtggccgtgttcgagcctagcgaggccgagatcagccacacccagaaagccaccctcgtgtgcctggctaccggcttctaccccgaccatgtggaactgtcttggtgggtcaacggcaaagaggtgcacagcggcgtgtctaccgacccccagccactgaaagaacagcccgccctgaacgacagccggtactgcctgagcagcagactgagagtgtccgccaccttctggcagaacccccggaaccacttcagatgccaggtgcagttctacggcctgagcgagaacgacgagtggacccaggacagagccaagcccgtgacccagatcgtgtctgccgaagcctggggcagagccgattgcggatcccagagcttcggcctgctggaccccaagctgtgctacctgctggatggcatcctgttcatctacggcgtgatcctgaccgccctgttcctgagagtgaagttcagcagaagcgccgacgcccctgcctaccagcagggacagaaccaactgtacaacgagctgaacctgggcagacgggaagagtacgacgtgctggacaagcggagaggcagggaccctgagatgggcggaaagccccagcggagaaagaacccccaggaaggactgtataacgaactccagaaagacaagatggccgaagcctacagcgagatcggcatgaagggcgagcggagaagaggcaagggccacgatggcctgtaccagggcctgagcaccgccaccaaggacacctatgacgccctgcacatgcaggccctgcctccaagaagggccaagcgatctggatctggagcaacaaacttctcactactcaaacaagcaggtgacgtggaggagaatcccgggcctactagtatggactggatttggcgcatccttttccttgtcggcgctgctaccggcgcgcattccgggccccagctccagctgcaagagtctggacctggcctggtcaagcctagcgagacactgagcctgacctgtaccgtgtccggcgatagcatcagcagcggcgattactactggggctggatcagacagcctcctggcaaaggactggaatggatcggccacatctactacagcggcgtgacctactacaaccccagcctgaagtccagagtgaccatcagcgtggacaccagccggaaccagttctccctgaagctgtctagcgtgacagccgccgataccgccgtgtactactgcaccagagaggacagcagcaactggcggagtagaggccagggaacactggtcacagttagctctggatccggcggaggcggaagtggaggcggaggatctggcggcggaggctctttcgaagaagtgaccctggtggaaagcggcggagacttcgtgaagcctggcggctctctgaaggtgtcctgtgccgccagcggcttcgcctttagccactacgccatgagctgggtgcgccagacccctgccaagagactggaatgggtggcctacatcagcagcggcggctccggcacctactactccgatagcgtgaagggccggttcaccatcagccgggacaacgccaagaacaccctgtacctccagatgcggagcctgcggagcgaggacagcgccatgtatttctgcaccagagtgaagctgggcacctattacttcgactcttggggccagggcaccaccctgaccgtgtcatctacgcgtatccagaaccctgatcctgccgtgtaccagctgcgggatagcaagagcagcgacaagagcgtgtgtctgttcaccgacttcgacagccagaccaacgtgtcccagagcaaggactccgacgtgtacatcaccgataagaccgtgctggacatgcggagcatggacttcaagagcaactccgccgtggcctggtccaacaagtccgatttcgcctgcgccaacgccttcaacaacagcattatccccgaggacacattcttcccaagccccgagagcagctgcggtacccagagttttgggttgttggaccctaaattgtgctatctgttggacggaatcctgttcatttacggagtgatcctgaccgcattgttcctgcgggttaagttttccagatccgcagacgcacccgcttaccaacaagggcagaaccaactctacaatgaacttaatttggggcggagggaagagtacgacgttctggacaaaaggaggggacgagatcccgagatgggcggaaagcctcagcgaaggaagaatccgcaagaggggctttataacgaactccagaaagataaaatggcagaagcctatagtgagattgggatgaagggagaaaggaggaggggtaaaggtcacgatgggttgtaccaaggattgagcacagccactaaagatacctatgatgcgctccacatgcaggccctgccgccaaga

SEQ ID NO: 2729 - DNA, 3270 bp, Artificial Sequence
  Synthetic Polynucloetide
atggccttaccagtgaccgccttgctcctgccgctggccttgctgctccacgccgccaggccggaagtgcagctggttgaatctggcggaggactggttcagcctggcggatctctgagactgtcttgtgccgccagcggcttcagcttcagcgacttttggatgagctgggtccgacaggcccctggcaaaggacttgaatgggtcgccacaatcagccaggccggcagcgagaaggactacgtggactctgtgaagggcagattcaccatcagccgggacaacgccaagaagtccctgtacctccagatgaacagcctgagagccgaggacaccgccgtgtactattgtgcctctggcgtgtacagcttcgactacagaggccagggcaccctggtcacagtctcttctggtaccggcggaggcggatctggcggcggaggtagcggtggcggaggatctgaattccagttcgtgctgacccagagcccttctgcctctgctgccctgggagcctctgccaagctgacctgtacactgagcagcgcccacaagacctacaccatcgactggtatcagcagcagaagggaaaggcccccagatacctgatccaagtgaagtccgacggcacctacacaaaggccaccggcgtgcccgatagattcagcggcagtagcagcggagccgatagatacctgattatccccagcgtgcaggccgacgacgaggccgattactactgcggcaccgattacaccggcggctacgtgttcggcggaggcacacaactgaccgtgacactcgaggacctgaagaacgtgttcccacctgaggtggccgtgttcgagcctagcgaggccgagatcagccacacccagaaagccaccctcgtgtgcctggctaccggcttctaccccgaccatgtggaactgtcttggtgggtcaacggcaaagaggtgcacagcggcgtgtctaccgacccccagccactgaaagaacagcccgccctgaacgacagccggtactgcctgagcagcagactgagagtgtccgccaccttctggcagaacccccggaaccacttcagatgccaggtgcagttctacggcctgagcgagaacgacgagtggacccaggacagagccaagcccgtgacccagatcgtgtctgccgaagcctggggcagagccgattgcggatcccagagcttcggcctgctggaccccaagctgtgctacctgctggatggcatcctgttcatctacggcgtgatcctgaccgccctgttcctgagagtgaagttcagcagaagcgccgacgcccctgcctaccagcagggacagaaccaactgtacaacgagctgaacctgggcagacgggaagagtacgacgtgctggacaagcggagaggcagggaccctgagatgggcggaaagccccagcggagaaagaacccccaggaaggactgtataacgaactccagaaagacaagatggccgaagcctacagcgagatcggcatgaagggcgagcggagaagaggcaagggccacgatggcctgtaccagggcctgagcaccgccaccaaggacacctatgacgccctgcacatgcaggccctgcctccaagaagggccaagcgatctggatctggagcaacaaacttctcactactcaaacaagcaggtgacgtggaggagaatcccgggcctactagtatggactggatttggcgcatccttttccttgtcggcgctgctaccggcgcgcattccgggccccagctccagctgcaagagtctggacctggcctggtcaagcctagcgagacactgagcctgacctgtaccgtgtccggcgatagcatcagcagcggcgattactactggggctggatcagacagcctcctggcaaaggactggaatggatcggccacatctactacagcggcgtgacctactacaaccccagcctgaagtccagagtgaccatcagcgtggacaccagccggaaccagttctccctgaagctgtctagcgtgacagccgccgataccgccgtgtactactgcaccagagaggacagcagcaactggcggagtagaggccagggaacactggtcacagttagctctggatccggcggaggcggaagtggaggcggaggatctggcggcggaggctctttcgaagagcaactgaaagagtctggcggcggactgttcaagcccaccgataccctgaccctgacctgcaccgtgtccggcttcagcctgagctactacggcgtgaactgggtgcgccaggcccctggcaatggcctggaatggatcggcacaatcggcggcagcggcgacacctactatgcctcttgggccaagtccagaagcaccatcatcagaaacaccaacgagaacaccgtgaccctgaagatgaccagcctgacagccgccgacaccgccacctacttttgcgtcagatacgccaacatcggctacgagtatttcaacgtgtggggacccggcaccctcgtgaccgtgtcatctacgcgtatccagaaccctgatcctgccgtgtaccagctgcgggatagcaagagcagcgacaagagcgtgtgtctgttcaccgacttcgacagccagaccaacgtgtcccagagcaaggactccgacgtgtacatcaccgataagaccgtgctggacatgcggagcatggacttcaagagcaactccgccgtggcctggtccaacaagtccgatttcgcctgcgccaacgccttcaacaacagcattatccccgaggacacattcttcccaagccccgagagcagctgcggtacccagagttttgggttgttggaccctaaattgtgctatctgttggacggaatcctgttcatttacggagtgatcctgaccgcattgttcctgcgggttaagttttccagatccgcagacgcacccgcttaccaacaagggcagaaccaactctacaatgaacttaatttggggcggagggaagagtacgacgttctggacaaaaggaggggacgagatcccgagatgggcggaaagcctcagcgaaggaagaatccgcaagaggggctttataacgaactccagaaagataaaatggcagaagcctatagtgagattgggatgaagggagaaaggaggaggggtaaaggtcacgatgggttgtaccaaggattgagcacagccactaaagatacctatgatgcgctccacatgcaggccctgccgccaaga

SEQ ID NO: 2730 - DNA, 3285 bp, Artificial Sequence
  Synthetic Polynucloetide
atggccttaccagtgaccgccttgctcctgccgctggccttgctgctccacgccgccaggccggaagtgcagctggttgaatctggcggaggactggttcagcctggcggatctctgagactgtcttgtgccgccagcggcttcagcttcagcgacttttggatgagctgggtccgacaggcccctggcaaaggacttgaatgggtcgccacaatcagccaggccggcagcgagaaggactacgtggactctgtgaagggcagattcaccatcagccgggacaacgccaagaagtccctgtacctccagatgaacagcctgagagccgaggacaccgccgtgtactattgtgcctctggcgtgtacagcttcgactacagaggccagggcaccctggtcacagtctcttctggtaccggcggaggcggatctggcggcggaggtagcggtggcggaggatctgaattccagttcgtgctgacccagagcccttctgtgtctgccgccctgggagcctctgccaagctgacctgtacactgagcagcgcccacaagacctacaccatcgactggtatcagcagcagcagggcgaggcccccagatacctgatgcaagtgaagtccgacggcagctacaccaagggcaccggcgtgcccgatagattcagcggcagtagcagcggagccgatagatacctgattatccccagcgtgcaggccgacgacgaggccggatatgtgtgcggcgctgacgacaatggcggctacgtgttcggcggaggcacccaactgacagtgacactcgaggacctgaagaacgtgttcccacctgaggtggccgtgttcgagcctagcgaggccgagatcagccacacccagaaagccaccctcgtgtgcctggctaccggcttctaccccgaccatgtggaactgtcttggtgggtcaacggcaaagaggtgcacagcggcgtgtctaccgacccccagccactgaaagaacagcccgccctgaacgacagccggtactgcctgagcagcagactgagagtgtccgccaccttctggcagaacccccggaaccacttcagatgccaggtgcagttctacggcctgagcgagaacgacgagtggacccaggacagagccaagcccgtgacccagatcgtgtctgccgaagcctggggcagagccgattgcggatcccagagcttcggcctgctggaccccaagctgtgctacctgctggatggcatcctgttcatctacggcgtgatcctgaccgccctgttcctgagagtgaagttcagcagaagcgccgacgcccctgcctaccagcagggacagaaccaactgtacaacgagctgaacctgggcagacgggaagagtacgacgtgctggacaagcggagaggcagggaccctgagatgggcggaaagccccagcggagaaagaacccccaggaaggactgtataacgaactccagaaagacaagatggccgaagcctacagcgagatcggcatgaagggcgagcggagaagaggcaagggccacgatggcctgtaccagggcctgagcaccgccaccaaggacacctatgacgccctgcacatgcaggccctgcctccaagaagggccaagcgatctggatctggagcaacaaacttctcactactcaaacaagcaggtgacgtggaggagaatcccgggcctactagtatggactggatttggcgcatccttttccttgtcggcgctgctaccggcgcgcattccgggccccagctccagctgcaagagtctggacctggcctggtcaagcctagcgagacactgagcctgacctgtaccgtgtccggcgatagcatcagcagcggcgattactactggggctggatcagacagcctcctggcaaaggactggaatggatcggccacatctactacagcggcgtgacctactacaaccccagcctgaagtccagagtgaccatcagcgtggacaccagccggaaccagttctccctgaagctgtctagcgtgacagccgccgataccgccgtgtactactgcaccagagaggacagcagcaactggcggagtagaggccagggaacactggtcacagttagctctggatccggcggaggcggaagtggaggcggaggatctggcggcggaggctctttcgaacagagcgtgaaagagtctgagggcggcctgttcaagcccaccgataccctgaccctgacctgcaccgtgtccggcttcagcctgagcagacacgccctgacatgggtgcgccaggcccctggaaatggcctggaatggatcggagccatcgacaacgccggcaccacctactatgcctcttgggccaagtccagaagcaccatcacccggaacaccgacctgcacaccgtgaccctgaagatgaccagcctgaccgccagcgacaccgccacctacttttgcgccagagtgttctacgacatcaacagcggctactacctggacggcatggacctgtggggacctggcacacttgtgaccgtgtccagcacgcgtatccagaaccctgatcctgccgtgtaccagctgcgggatagcaagagcagcgacaagagcgtgtgtctgttcaccgacttcgacagccagaccaacgtgtcccagagcaaggactccgacgtgtacatcaccgataagaccgtgctggacatgcggagcatggacttcaagagcaactccgccgtggcctggtccaacaagtccgatttcgcctgcgccaacgccttcaacaacagcattatccccgaggacacattcttcccaagccccgagagcagctgcggtacccagagttttgggttgttggaccctaaattgtgctatctgttggacggaatcctgttcatttacggagtgatcctgaccgcattgttcctgcgggttaagttttccagatccgcagacgcacccgcttaccaacaagggcagaaccaactctacaatgaacttaatttggggcggagggaagagtacgacgttctggacaaaaggaggggacgagatcccgagatgggcggaaagcctcagcgaaggaagaatccgcaagaggggctttataacgaactccagaaagataaaatggcagaagcctatagtgagattgggatgaagggagaaaggaggaggggtaaaggtcacgatgggttgtaccaaggattgagcacagccactaaagatacctatgatgcgctccacatgcaggccctgccgccaaga

SEQ ID NO: 2731 - DNA, 3267 bp, Artificial Sequence
  Synthetic Polynucloetide
atggccttaccagtgaccgccttgctcctgccgctggccttgctgctccacgccgccaggccggaagtgcagctggttgaatctggcggaggactggttcagcctggcggatctctgagactgtcttgtgccgccagcggcttcagcttcagcgacttttggatgagctgggtccgacaggcccctggcaaaggacttgaatgggtcgccacaatcagccaggccggcagcgagaaggactacgtggactctgtgaagggcagattcaccatcagccgggacaacgccaagaagtccctgtacctccagatgaacagcctgagagccgaggacaccgccgtgtactattgtgcctctggcgtgtacagcttcgactacagaggccagggcaccctggtcacagtctcttctggtaccggcggaggcggatctggcggcggaggtagcggtggcggaggatctgaattcgacatccagatgacccagagccccagcagcctgtctgccagcgtgggcgacagagtgaccatcacctgtagagccagccagggcatcagctcttggctggcctggtatcagcagaagcccgagaaggcccccaagagcctgatctacgccgcctctagtctccagagcggcgtgcccagcagattttctggcagcggctccggcaccgacttcaccctgacaatcagctccctccagcccgaggacttcgccacctactactgccagcagtacaacagctacccccccacctttggcggaggcaccaaggtggaaatcaagctcgaggacctgaagaacgtgttcccacctgaggtggccgtgttcgagcctagcgaggccgagatcagccacacccagaaagccaccctcgtgtgcctggctaccggcttctaccccgaccatgtggaactgtcttggtgggtcaacggcaaagaggtgcacagcggcgtgtctaccgacccccagccactgaaagaacagcccgccctgaacgacagccggtactgcctgagcagcagactgagagtgtccgccaccttctggcagaacccccggaaccacttcagatgccaggtgcagttctacggcctgagcgagaacgacgagtggacccaggacagagccaagcccgtgacccagatcgtgtctgccgaagcctggggcagagccgattgcggatcccagagcttcggcctgctggaccccaagctgtgctacctgctggatggcatcctgttcatctacggcgtgatcctgaccgccctgttcctgagagtgaagttcagcagaagcgccgacgcccctgcctaccagcagggacagaaccaactgtacaacgagctgaacctgggcagacgggaagagtacgacgtgctggacaagcggagaggcagggaccctgagatgggcggaaagccccagcggagaaagaacccccaggaaggactgtataacgaactccagaaagacaagatggccgaagcctacagcgagatcggcatgaagggcgagcggagaagaggcaagggccacgatggcctgtaccagggcctgagcaccgccaccaaggacacctatgacgccctgcacatgcaggccctgcctccaagaagggccaagcgatctggatctggagcaacaaacttctcactactcaaacaagcaggtgacgtggaggagaatcccgggcctactagtatggactggatttggcgcatccttttccttgtcggcgctgctaccggcgcgcattccgggccccagctccagctgcaagagtctggacctggcctggtcaagcctagcgagacactgagcctgacctgtaccgtgtccggcgatagcatcagcagcggcgattactactggggctggatcagacagcctcctggcaaaggactggaatggatcggccacatctactacagcggcgtgacctactacaaccccagcctgaagtccagagtgaccatcagcgtggacaccagccggaaccagttctccctgaagctgtctagcgtgacagccgccgataccgccgtgtactactgcaccagagaggacagcagcaactggcggagtagaggccagggaacactggtcacagttagctctggatccggcggaggcggaagtggaggcggaggatctggcggcggaggctctttcgaagaagtgcaactggtggaatcaggcggcggactggtgcagcctggcgagtctctgagactgagctgtgtggcctccggcttcaccttcagccggtacaagatgaactgggtgcgccaggcccctggcaagggactggaatgggtgtcctacatcagccgcagcggcagagacatctactacgccgacagcgtgaagggccggttcaccatcagcagagacaacgccaagaacagcctgtacctccagatgaactccctgcgggacgaggacaccgccgtgtactactgtgccggaaccgtgaccacctattactacttcggcatggacgtgtggggccacggcaccaccgtgacagtgtcatctacgcgtatccagaaccctgatcctgccgtgtaccagctgcgggatagcaagagcagcgacaagagcgtgtgtctgttcaccgacttcgacagccagaccaacgtgtcccagagcaaggactccgacgtgtacatcaccgataagaccgtgctggacatgcggagcatggacttcaagagcaactccgccgtggcctggtccaacaagtccgatttcgcctgcgccaacgccttcaacaacagcattatccccgaggacacattcttcccaagccccgagagcagctgcggtacccagagttttgggttgttggaccctaaattgtgctatctgttggacggaatcctgttcatttacggagtgatcctgaccgcattgttcctgcgggttaagttttccagatccgcagacgcacccgcttaccaacaagggcagaaccaactctacaatgaacttaatttggggcggagggaagagtacgacgttctggacaaaaggaggggacgagatcccgagatgggcggaaagcctcagcgaaggaagaatccgcaagaggggctttataacgaactccagaaagataaaatggcagaagcctatagtgagattgggatgaagggagaaaggaggaggggtaaaggtcacgatgggttgtaccaaggattgagcacagccactaaagatacctatgatgcgctccacatgcaggccctgccgccaaga

SEQ ID NO: 2732 - DNA, 3270 bp, Artificial Sequence
  Synthetic Polynucloetide
atggccttaccagtgaccgccttgctcctgccgctggccttgctgctccacgccgccaggccggaagtgcagctggttgaatctggcggaggactggttcagcctggcggatctctgagactgtcttgtgccgccagcggcttcagcttcagcgacttttggatgagctgggtccgacaggcccctggcaaaggacttgaatgggtcgccacaatcagccaggccggcagcgagaaggactacgtggactctgtgaagggcagattcaccatcagccgggacaacgccaagaagtccctgtacctccagatgaacagcctgagagccgaggacaccgccgtgtactattgtgcctctggcgtgtacagcttcgactacagaggccagggcaccctggtcacagtctcttctggtaccggcggaggcggatctggcggcggaggtagcggtggcggaggatctgaattcgacatccagatgacccagagccccagcagcctgtctgccagcgtgggcgacagagtgaccatcacctgtagagccagccagggcatcagctcttggctggcctggtatcagcagaagcccgagaaggcccccaagagcctgatctacgccgcctctagtctccagagcggcgtgcccagcagattttctggcagcggctccggcaccgacttcaccctgacaatcagctccctccagcccgaggacttcgccacctactactgccagcagtacaacagctaccctcccacctttggcggaggcaccaaggtggaaatcaagctcgaggacctgaagaacgtgttcccacctgaggtggccgtgttcgagcctagcgaggccgagatcagccacacccagaaagccaccctcgtgtgcctggctaccggcttctaccccgaccatgtggaactgtcttggtgggtcaacggcaaagaggtgcacagcggcgtgtctaccgacccccagccactgaaagaacagcccgccctgaacgacagccggtactgcctgagcagcagactgagagtgtccgccaccttctggcagaacccccggaaccacttcagatgccaggtgcagttctacggcctgagcgagaacgacgagtggacccaggacagagccaagcccgtgacccagatcgtgtctgccgaagcctggggcagagccgattgcggatcccagagcttcggcctgctggaccccaagctgtgctacctgctggatggcatcctgttcatctacggcgtgatcctgaccgccctgttcctgagagtgaagttcagcagaagcgccgacgcccctgcctaccagcagggacagaaccaactgtacaacgagctgaacctgggcagacgggaagagtacgacgtgctggacaagcggagaggcagggaccctgagatgggcggaaagccccagcggagaaagaacccccaggaaggactgtataacgaactccagaaagacaagatggccgaagcctacagcgagatcggcatgaagggcgagcggagaagaggcaagggccacgatggcctgtaccagggcctgagcaccgccaccaaggacacctatgacgccctgcacatgcaggccctgcctccaagaagggccaagcgatctggatctggagcaacaaacttctcactactcaaacaagcaggtgacgtggaggagaatcccgggcctactagtatggactggatttggcgcatccttttccttgtcggcgctgctaccggcgcgcattccgggccccagctccagctgcaagagtctggacctggcctggtcaagcctagcgagacactgagcctgacctgtaccgtgtccggcgatagcatcagcagcggcgattactactggggctggatcagacagcctcctggcaaaggactggaatggatcggccacatctactacagcggcgtgacctactacaaccccagcctgaagtccagagtgaccatcagcgtggacaccagccggaaccagttctccctgaagctgtctagcgtgacagccgccgataccgccgtgtactactgcaccagagaggacagcagcaactggcggagtagaggccagggaacactggtcacagttagctctggatccggcggaggcggaagtggaggcggaggatctggcggcggaggctctttcgaagaagtgcaactggtggaatccgggggaggctctgtgcagcctggcgagtctctgagactgagctgtgtggcctccggcttcaccttcagccggtacaagatgaactgggtgcgccaggcccctggcaagggactggaatgggtgtcctacatcagccgcagcggcagagacatctactacgccgacagcgtgaagggccggttcaccatcagcagagacaacgccaagaacagcctgtacctccagatgaactccctgcgggacgaggacaccgccgtgtactactgtgccggaaccgtgaccacctattactacgacttcggcatggacgtgtggggccagggcacaaccgtgacagtgtctagcacgcgtatccagaaccctgatcctgccgtgtaccagctgcgggatagcaagagcagcgacaagagcgtgtgtctgttcaccgacttcgacagccagaccaacgtgtcccagagcaaggactccgacgtgtacatcaccgataagaccgtgctggacatgcggagcatggacttcaagagcaactccgccgtggcctggtccaacaagtccgatttcgcctgcgccaacgccttcaacaacagcattatccccgaggacacattcttcccaagccccgagagcagctgcggtacccagagttttgggttgttggaccctaaattgtgctatctgttggacggaatcctgttcatttacggagtgatcctgaccgcattgttcctgcgggttaagttttccagatccgcagacgcacccgcttaccaacaagggcagaaccaactctacaatgaacttaatttggggcggagggaagagtacgacgttctggacaaaaggaggggacgagatcccgagatgggcggaaagcctcagcgaaggaagaatccgcaagaggggctttataacgaactccagaaagataaaatggcagaagcctatagtgagattgggatgaagggagaaaggaggaggggtaaaggtcacgatgggttgtaccaaggattgagcacagccactaaagatacctatgatgcgctccacatgcaggccctgccgccaaga

SEQ ID NO: 2733 - DNA, 3264 bp, Artificial Sequence
  Synthetic Polynucloetide
atggccttaccagtgaccgccttgctcctgccgctggccttgctgctccacgccgccaggccggaagtgcagctggttgaatctggcggaggactggttcagcctggcggatctctgagactgtcttgtgccgccagcggcttcagcttcagcgacttttggatgagctgggtccgacaggcccctggcaaaggacttgaatgggtcgccacaatcagccaggccggcagcgagaaggactacgtggactctgtgaagggcagattcaccatcagccgggacaacgccaagaagtccctgtacctccagatgaacagcctgagagccgaggacaccgccgtgtactattgtgcctctggcgtgtacagcttcgactacagaggccagggcaccctggtcacagtctcttctggtaccggcggaggcggatctggcggcggaggtagcggtggcggaggatctgaattccagtctgtgctgacacagcctccatctgcctctggcacacctggacagagagtgaccatcagctgtagcggcagcagaagcaacgtcggcggcaactacgtgttctggtatcagcaggtcccaggcgctacccctaagctgctgatctacagaagcaatcagcggcctagcggcgtgcccgatagatttgccggaagcaagagcggcagctctgccagccttgccatctctggactgagaagcgaggacgaggccgactactactgtgccacctgggatgatagcctgagcggcttcgtgtttggcaccggcaccaaagtgacagtgcttggtctcgaggacctgaagaacgtgttcccacctgaggtggccgtgttcgagcctagcgaggccgagatcagccacacccagaaagccaccctcgtgtgcctggctaccggcttctaccccgaccatgtggaactgtcttggtgggtcaacggcaaagaggtgcacagcggcgtgtctaccgacccccagccactgaaagaacagcccgccctgaacgacagccggtactgcctgagcagcagactgagagtgtccgccaccttctggcagaacccccggaaccacttcagatgccaggtgcagttctacggcctgagcgagaacgacgagtggacccaggacagagccaagcccgtgacccagatcgtgtctgccgaagcctggggcagagccgattgcggatcccagagcttcggcctgctggaccccaagctgtgctacctgctggatggcatcctgttcatctacggcgtgatcctgaccgccctgttcctgagagtgaagttcagcagaagcgccgacgcccctgcctaccagcagggacagaaccaactgtacaacgagctgaacctgggcagacgggaagagtacgacgtgctggacaagcggagaggcagggaccctgagatgggcggaaagccccagcggagaaagaacccccaggaaggactgtataacgaactccagaaagacaagatggccgaagcctacagcgagatcggcatgaagggcgagcggagaagaggcaagggccacgatggcctgtaccagggcctgagcaccgccaccaaggacacctatgacgccctgcacatgcaggccctgcctccaagaagggccaagcgatctggatctggagcaacaaacttctcactactcaaacaagcaggtgacgtggaggagaatcccgggcctactagtatggactggatttggcgcatccttttccttgtcggcgctgctaccggcgcgcattccgggccccagctccagctgcaagagtctggacctggcctggtcaagcctagcgagacactgagcctgacctgtaccgtgtccggcgatagcatcagcagcggcgattactactggggctggatcagacagcctcctggcaaaggactggaatggatcggccacatctactacagcggcgtgacctactacaaccccagcctgaagtccagagtgaccatcagcgtggacaccagccggaaccagttctccctgaagctgtctagcgtgacagccgccgataccgccgtgtactactgcaccagagaggacagcagcaactggcggagtagaggccagggaacactggtcacagttagctctggatccggcggaggcggaagtggaggcggaggatctggcggcggaggctctttcgaagttcagctggttgaatctggcggcggactggttaagcctggcggatctctgagactgtcttgtgccgccagcggcttcaccttcagcgattactacatgagctggatcagacaggcccctggcaaaggactggaatgggtgtcctacatcagcagcagcggctccaccatctactacgccgatagcgtgaagggcagattcaccatcagccgggacaacgccaagaacagcctgtacctccagatgaactccctgagagccgaggacaccgccgtgtactattgcgccagaggctacggcaaagcctacgatcaatggggccagggcacactggtcaccgtttcttctacgcgtatccagaaccctgatcctgccgtgtaccagctgcgggatagcaagagcagcgacaagagcgtgtgtctgttcaccgacttcgacagccagaccaacgtgtcccagagcaaggactccgacgtgtacatcaccgataagaccgtgctggacatgcggagcatggacttcaagagcaactccgccgtggcctggtccaacaagtccgatttcgcctgcgccaacgccttcaacaacagcattatccccgaggacacattcttcccaagccccgagagcagctgcggtacccagagttttgggttgttggaccctaaattgtgctatctgttggacggaatcctgttcatttacggagtgatcctgaccgcattgttcctgcgggttaagttttccagatccgcagacgcacccgcttaccaacaagggcagaaccaactctacaatgaacttaatttggggcggagggaagagtacgacgttctggacaaaaggaggggacgagatcccgagatgggcggaaagcctcagcgaaggaagaatccgcaagaggggctttataacgaactccagaaagataaaatggcagaagcctatagtgagattgggatgaagggagaaaggaggaggggtaaaggtcacgatgggttgtaccaaggattgagcacagccactaaagatacctatgatgcgctccacatgcaggccctgccgccaaga

SEQ ID NO: 2734 - DNA, 3261 bp, Artificial Sequence
  Synthetic Polynucloetide
atggccttaccagtgaccgccttgctcctgccgctggccttgctgctccacgccgccaggccggaagtgcagctggttgaatctggcggaggactggttcagcctggcggatctctgagactgtcttgtgccgccagcggcttcagcttcagcgacttttggatgagctgggtccgacaggcccctggcaaaggacttgaatgggtcgccacaatcagccaggccggcagcgagaaggactacgtggactctgtgaagggcagattcaccatcagccgggacaacgccaagaagtccctgtacctccagatgaacagcctgagagccgaggacaccgccgtgtactattgtgcctctggcgtgtacagcttcgactacagaggccagggcaccctggtcacagtctcttctggtaccggcggaggcggatctggcggcggaggtagcggtggcggaggatctgaattccagtctgtggtcacacagccacctagcatgtctgccgctccaggccagcaagtgaccatctcttgtagcggcggcaacagcaacatcgagcggaactacgtgtcctggtatctgcaactgcctggcacagcccctaagctggtcatcttcgacaacgacagacggcccagcggcatccccgatagattttctggcagcaagagcggcaccagcgccacactgggaattaccggacttcagacaggcgacgaggccgactactactgtggcacatgggactctagcctgagaggctgggttttcggcggaggcacaaagctgacagtgcttggtctcgaggacctgaagaacgtgttcccacctgaggtggccgtgttcgagcctagcgaggccgagatcagccacacccagaaagccaccctcgtgtgcctggctaccggcttctaccccgaccatgtggaactgtcttggtgggtcaacggcaaagaggtgcacagcggcgtgtctaccgacccccagccactgaaagaacagcccgccctgaacgacagccggtactgcctgagcagcagactgagagtgtccgccaccttctggcagaacccccggaaccacttcagatgccaggtgcagttctacggcctgagcgagaacgacgagtggacccaggacagagccaagcccgtgacccagatcgtgtctgccgaagcctggggcagagccgattgcggatcccagagcttcggcctgctggaccccaagctgtgctacctgctggatggcatcctgttcatctacggcgtgatcctgaccgccctgttcctgagagtgaagttcagcagaagcgccgacgcccctgcctaccagcagggacagaaccaactgtacaacgagctgaacctgggcagacgggaagagtacgacgtgctggacaagcggagaggcagggaccctgagatgggcggaaagccccagcggagaaagaacccccaggaaggactgtataacgaactccagaaagacaagatggccgaagcctacagcgagatcggcatgaagggcgagcggagaagaggcaagggccacgatggcctgtaccagggcctgagcaccgccaccaaggacacctatgacgccctgcacatgcaggccctgcctccaagaagggccaagcgatctggatctggagcaacaaacttctcactactcaaacaagcaggtgacgtggaggagaatcccgggcctactagtatggactggatttggcgcatccttttccttgtcggcgctgctaccggcgcgcattccgggccccagctccagctgcaagagtctggacctggcctggtcaagcctagcgagacactgagcctgacctgtaccgtgtccggcgatagcatcagcagcggcgattactactggggctggatcagacagcctcctggcaaaggactggaatggatcggccacatctactacagcggcgtgacctactacaaccccagcctgaagtccagagtgaccatcagcgtggacaccagccggaaccagttctccctgaagctgtctagcgtgacagccgccgataccgccgtgtactactgcaccagagaggacagcagcaactggcggagtagaggccagggaacactggtcacagttagctctggatccggcggaggcggaagtggaggcggaggatctggcggcggaggctctttcgaagtgcagctcgttgagtctggcggcggactgattcaacctggcggaagcctgagactgagctgtgccgcttccggcttcaccttcagcaactacgccatgaactgggttcgacaggcccctggcaaaggactggaatgggtgtccaccatcaacggcagaggcagcagcaccatctacgccgattctgtgaagggcagattcaccatcagccgggacaacagcaagaacaccctgtacctccagatgaactccctgagagccgaggacaccgccacctattactgtgcccggtacatcagcagaggactgggcgattcttggggccagggcacactggttacagtgacgcgtatccagaaccctgatcctgccgtgtaccagctgcgggatagcaagagcagcgacaagagcgtgtgtctgttcaccgacttcgacagccagaccaacgtgtcccagagcaaggactccgacgtgtacatcaccgataagaccgtgctggacatgcggagcatggacttcaagagcaactccgccgtggcctggtccaacaagtccgatttcgcctgcgccaacgccttcaacaacagcattatccccgaggacacattcttcccaagccccgagagcagctgcggtacccagagttttgggttgttggaccctaaattgtgctatctgttggacggaatcctgttcatttacggagtgatcctgaccgcattgttcctgcgggttaagttttccagatccgcagacgcacccgcttaccaacaagggcagaaccaactctacaatgaacttaatttggggcggagggaagagtacgacgttctggacaaaaggaggggacgagatcccgagatgggcggaaagcctcagcgaaggaagaatccgcaagaggggctttataacgaactccagaaagataaaatggcagaagcctatagtgagattgggatgaagggagaaaggaggaggggtaaaggtcacgatgggttgtaccaaggattgagcacagccactaaagatacctatgatgcgctccacatgcaggccctgccgccaaga

SEQ ID NO: 2735 - DNA, 3264 bp, Artificial Sequence
  Synthetic Polynucloetide
atggccttaccagtgaccgccttgctcctgccgctggccttgctgctccacgccgccaggccggaagtgcagctggttgaatctggcggaggactggttcagcctggcggatctctgagactgtcttgtgccgccagcggcttcagcttcagcgacttttggatgagctgggtccgacaggcccctggcaaaggacttgaatgggtcgccacaatcagccaggccggcagcgagaaggactacgtggactctgtgaagggcagattcaccatcagccgggacaacgccaagaagtccctgtacctccagatgaacagcctgagagccgaggacaccgccgtgtactattgtgcctctggcgtgtacagcttcgactacagaggccagggcaccctggtcacagtctcttctggtaccggcggaggcggatctggcggcggaggtagcggtggcggaggatctgaattcgacgtcgtgatgacccagacccctctgagcctgcctgtgtccctgggcgatcaggccagcatcagctgtagaagcagccagagcctggtgcacagcaacggcaacacctacctgcactggtatctccagaagcccggccagagccccaagctgctgatctacaaggtgtccaacagattcagcggcgtgcccgacagattctccggcagcggctctggcaccgacttcaccctgaagatcagccgggtggaagccgaggacctgggcgtgtacttctgtagccagaacacccccgtgccccccaagtttggcagcggcaccaagctggaaatcaagctcgaggacctgaagaacgtgttcccacctgaggtggccgtgttcgagcctagcgaggccgagatcagccacacccagaaagccaccctcgtgtgcctggctaccggcttctaccccgaccatgtggaactgtcttggtgggtcaacggcaaagaggtgcacagcggcgtgtctaccgacccccagccactgaaagaacagcccgccctgaacgacagccggtactgcctgagcagcagactgagagtgtccgccaccttctggcagaacccccggaaccacttcagatgccaggtgcagttctacggcctgagcgagaacgacgagtggacccaggacagagccaagcccgtgacccagatcgtgtctgccgaagcctggggcagagccgattgcggatcccagagcttcggcctgctggaccccaagctgtgctacctgctggatggcatcctgttcatctacggcgtgatcctgaccgccctgttcctgagagtgaagttcagcagaagcgccgacgcccctgcctaccagcagggacagaaccaactgtacaacgagctgaacctgggcagacgggaagagtacgacgtgctggacaagcggagaggcagggaccctgagatgggcggaaagccccagcggagaaagaacccccaggaaggactgtataacgaactccagaaagacaagatggccgaagcctacagcgagatcggcatgaagggcgagcggagaagaggcaagggccacgatggcctgtaccagggcctgagcaccgccaccaaggacacctatgacgccctgcacatgcaggccctgcctccaagaagggccaagcgatctggatctggagcaacaaacttctcactactcaaacaagcaggtgacgtggaggagaatcccgggcctactagtatggactggatttggcgcatccttttccttgtcggcgctgctaccggcgcgcattccgggccccagctccagctgcaagagtctggacctggcctggtcaagcctagcgagacactgagcctgacctgtaccgtgtccggcgatagcatcagcagcggcgattactactggggctggatcagacagcctcctggcaaaggactggaatggatcggccacatctactacagcggcgtgacctactacaaccccagcctgaagtccagagtgaccatcagcgtggacaccagccggaaccagttctccctgaagctgtctagcgtgacagccgccgataccgccgtgtactactgcaccagagaggacagcagcaactggcggagtagaggccagggaacactggtcacagttagctctggatccggcggaggcggaagtggaggcggaggatctggcggcggaggctctttcgaacaggtgcagctccagcagtctggcgctgaactcgtgcggcctggcgcttctgtgaagctgtcttgcaaggccagcggctacaccttcaacgactacgagatgcactgggtcaagcagacccctgtgcacggcctgaagtggatcggagccctggaacccaagaccggcgataccgcctacagccagaagttcaagggcaaggccaccctgaccgccgacaagagcagcagcacagcctacatggaactgcggagcctgaccagcgaggacagcgccgtgtactactgcaccagctgctactactacacctacagcggccagggcaccctcgtgacagtgtctgctacgcgtatccagaaccctgatcctgccgtgtaccagctgcgggatagcaagagcagcgacaagagcgtgtgtctgttcaccgacttcgacagccagaccaacgtgtcccagagcaaggactccgacgtgtacatcaccgataagaccgtgctggacatgcggagcatggacttcaagagcaactccgccgtggcctggtccaacaagtccgatttcgcctgcgccaacgccttcaacaacagcattatccccgaggacacattcttcccaagccccgagagcagctgcggtacccagagttttgggttgttggaccctaaattgtgctatctgttggacggaatcctgttcatttacggagtgatcctgaccgcattgttcctgcgggttaagttttccagatccgcagacgcacccgcttaccaacaagggcagaaccaactctacaatgaacttaatttggggcggagggaagagtacgacgttctggacaaaaggaggggacgagatcccgagatgggcggaaagcctcagcgaaggaagaatccgcaagaggggctttataacgaactccagaaagataaaatggcagaagcctatagtgagattgggatgaagggagaaaggaggaggggtaaaggtcacgatgggttgtaccaaggattgagcacagccactaaagatacctatgatgcgctccacatgcaggccctgccgccaaga

SEQ ID NO: 2736 - DNA, 3261 bp, Artificial Sequence
  Synthetic Polynucloetide
atggccttaccagtgaccgccttgctcctgccgctggccttgctgctccacgccgccaggccggaagtgcagctggttgaatctggcggaggactggttcagcctggcggatctctgagactgtcttgtgccgccagcggcttcagcttcagcgacttttggatgagctgggtccgacaggcccctggcaaaggacttgaatgggtcgccacaatcagccaggccggcagcgagaaggactacgtggactctgtgaagggcagattcaccatcagccgggacaacgccaagaagtccctgtacctccagatgaacagcctgagagccgaggacaccgccgtgtactattgtgcctctggcgtgtacagcttcgactacagaggccagggcaccctggtcacagtctcttctggtaccggcggaggcggatctggcggcggaggtagcggtggcggaggatctgaattcgacatccaactgacccagagccccagcagcctgtctgcctctgtgggcgacagagtgaccatcacctgtagagccagccagggcatcagaaacgacctgggctggtatcagcagaagcccggcaaggcccccaagcggctgatctatgctgccagctccctccagaatggcgtgcccagcagattttccggcagcggctctggcaccgagttcaccctgaccatcagctccctccagcccgaggacttcgccacctactactgcctccagcacaacacctaccccgccttcggccagggcaccaaggtggaaatcaagagactcgaggacctgaagaacgtgttcccacctgaggtggccgtgttcgagcctagcgaggccgagatcagccacacccagaaagccaccctcgtgtgcctggctaccggcttctaccccgaccatgtggaactgtcttggtgggtcaacggcaaagaggtgcacagcggcgtgtctaccgacccccagccactgaaagaacagcccgccctgaacgacagccggtactgcctgagcagcagactgagagtgtccgccaccttctggcagaacccccggaaccacttcagatgccaggtgcagttctacggcctgagcgagaacgacgagtggacccaggacagagccaagcccgtgacccagatcgtgtctgccgaagcctggggcagagccgattgcggatcccagagcttcggcctgctggaccccaagctgtgctacctgctggatggcatcctgttcatctacggcgtgatcctgaccgccctgttcctgagagtgaagttcagcagaagcgccgacgcccctgcctaccagcagggacagaaccaactgtacaacgagctgaacctgggcagacgggaagagtacgacgtgctggacaagcggagaggcagggaccctgagatgggcggaaagccccagcggagaaagaacccccaggaaggactgtataacgaactccagaaagacaagatggccgaagcctacagcgagatcggcatgaagggcgagcggagaagaggcaagggccacgatggcctgtaccagggcctgagcaccgccaccaaggacacctatgacgccctgcacatgcaggccctgcctccaagaagggccaagcgatctggatctggagcaacaaacttctcactactcaaacaagcaggtgacgtggaggagaatcccgggcctactagtatggactggatttggcgcatccttttccttgtcggcgctgctaccggcgcgcattccgggccccagctccagctgcaagagtctggacctggcctggtcaagcctagcgagacactgagcctgacctgtaccgtgtccggcgatagcatcagcagcggcgattactactggggctggatcagacagcctcctggcaaaggactggaatggatcggccacatctactacagcggcgtgacctactacaaccccagcctgaagtccagagtgaccatcagcgtggacaccagccggaaccagttctccctgaagctgtctagcgtgacagccgccgataccgccgtgtactactgcaccagagaggacagcagcaactggcggagtagaggccagggaacactggtcacagttagctctggatccggcggaggcggaagtggaggcggaggatctggcggcggaggctctttcgaacaggtgcaactccaggaatctggccctggcctcgtgaagcctagccagaccctgagcctgacctgtaccgtgtctggcggcagcatcagcagcttcaactactactggtcctggatcagacaccaccctggcaagggcctggaatggatcggctacatctactacagcggcagcacctacagcaaccccagcctgaagtcccgcgtgaccatctccgtggacaccagcaagaaccagtttagcctgaccctgtccagcgtgacagccgccgataccgccgtgtactactgcgccagaggctacaactggaactacttcgactactggggccagggaaccctcgtgaccgtgtctagtacgcgtatccagaaccctgatcctgccgtgtaccagctgcgggatagcaagagcagcgacaagagcgtgtgtctgttcaccgacttcgacagccagaccaacgtgtcccagagcaaggactccgacgtgtacatcaccgataagaccgtgctggacatgcggagcatggacttcaagagcaactccgccgtggcctggtccaacaagtccgatttcgcctgcgccaacgccttcaacaacagcattatccccgaggacacattcttcccaagccccgagagcagctgcggtacccagagttttgggttgttggaccctaaattgtgctatctgttggacggaatcctgttcatttacggagtgatcctgaccgcattgttcctgcgggttaagttttccagatccgcagacgcacccgcttaccaacaagggcagaaccaactctacaatgaacttaatttggggcggagggaagagtacgacgttctggacaaaaggaggggacgagatcccgagatgggcggaaagcctcagcgaaggaagaatccgcaagaggggctttataacgaactccagaaagataaaatggcagaagcctatagtgagattgggatgaagggagaaaggaggaggggtaaaggtcacgatgggttgtaccaaggattgagcacagccactaaagatacctatgatgcgctccacatgcaggccctgccgccaaga

SEQ ID NO: 2737 - DNA, 3267 bp, Artificial Sequence
  Synthetic Polynucloetide
atggccttaccagtgaccgccttgctcctgccgctggccttgctgctccacgccgccaggccggaagtgcagctggttgaatctggcggaggactggttcagcctggcggatctctgagactgtcttgtgccgccagcggcttcagcttcagcgacttttggatgagctgggtccgacaggcccctggcaaaggacttgaatgggtcgccacaatcagccaggccggcagcgagaaggactacgtggactctgtgaagggcagattcaccatcagccgggacaacgccaagaagtccctgtacctccagatgaacagcctgagagccgaggacaccgccgtgtactattgtgcctctggcgtgtacagcttcgactacagaggccagggcaccctggtcacagtctcttctggtaccggcggaggcggatctggcggcggaggtagcggtggcggaggatctgaattcgacgacatcgtgctgacccagagccccgccagcctggccgtgagcctgggccagagcgtgaccatcagctgcagagccagcgagagcgtggagtactacggcaccagcctgatgcagtggtaccagcagaagcccggccagccccccaagctgctgatctacgccaccagcaacgtggagagcggcgtgcccgccagattcagcggcagcggcagcggcaccgacttcagcctgaacatccaccccgtggaggaggacgacatcgccatgtacttctgccagcagagcagaaagctgcccagcaccttcggcggcggcaccaagctggagatcaagctcgaggacctgaagaacgtgttcccacctgaggtggccgtgttcgagcctagcgaggccgagatcagccacacccagaaagccaccctcgtgtgcctggctaccggcttctaccccgaccatgtggaactgtcttggtgggtcaacggcaaagaggtgcacagcggcgtgtctaccgacccccagccactgaaagaacagcccgccctgaacgacagccggtactgcctgagcagcagactgagagtgtccgccaccttctggcagaacccccggaaccacttcagatgccaggtgcagttctacggcctgagcgagaacgacgagtggacccaggacagagccaagcccgtgacccagatcgtgtctgccgaagcctggggcagagccgattgcggatcccagagcttcggcctgctggaccccaagctgtgctacctgctggatggcatcctgttcatctacggcgtgatcctgaccgccctgttcctgagagtgaagttcagcagaagcgccgacgcccctgcctaccagcagggacagaaccaactgtacaacgagctgaacctgggcagacgggaagagtacgacgtgctggacaagcggagaggcagggaccctgagatgggcggaaagccccagcggagaaagaacccccaggaaggactgtataacgaactccagaaagacaagatggccgaagcctacagcgagatcggcatgaagggcgagcggagaagaggcaagggccacgatggcctgtaccagggcctgagcaccgccaccaaggacacctatgacgccctgcacatgcaggccctgcctccaagaagggccaagcgatctggatctggagcaacaaacttctcactactcaaacaagcaggtgacgtggaggagaatcccgggcctactagtatggactggatttggcgcatccttttccttgtcggcgctgctaccggcgcgcattccgggccccagctccagctgcaagagtctggacctggcctggtcaagcctagcgagacactgagcctgacctgtaccgtgtccggcgatagcatcagcagcggcgattactactggggctggatcagacagcctcctggcaaaggactggaatggatcggccacatctactacagcggcgtgacctactacaaccccagcctgaagtccagagtgaccatcagcgtggacaccagccggaaccagttctccctgaagctgtctagcgtgacagccgccgataccgccgtgtactactgcaccagagaggacagcagcaactggcggagtagaggccagggaacactggtcacagttagctctggatccggcggaggcggaagtggaggcggaggatctggcggcggaggctctttcgaagacgtgagactgcaggagagcggccccggccaggtgaagcccagccagaccgtgagcctgacctgcagcgtgaccggctacagcatcaccaacggcaaccactggtggaactggatcagacaggtgagcggcagcaagctggagtggatcggctacatcagcagcagcggcagcaccgacagcaaccccagcctgaagagcagaatcagcatcaccagagacaccagcaagaaccagctgttcctgcagctgaacagcgtgaccaccgaggacatcgccacctactactgcgccagaggctactacttcgactactggggccagggcaccaccctgaccgtgagcagcacgcgtatccagaaccctgatcctgccgtgtaccagctgcgggatagcaagagcagcgacaagagcgtgtgtctgttcaccgacttcgacagccagaccaacgtgtcccagagcaaggactccgacgtgtacatcaccgataagaccgtgctggacatgcggagcatggacttcaagagcaactccgccgtggcctggtccaacaagtccgatttcgcctgcgccaacgccttcaacaacagcattatccccgaggacacattcttcccaagccccgagagcagctgcggtacccagagttttgggttgttggaccctaaattgtgctatctgttggacggaatcctgttcatttacggagtgatcctgaccgcattgttcctgcgggttaagttttccagatccgcagacgcacccgcttaccaacaagggcagaaccaactctacaatgaacttaatttggggcggagggaagagtacgacgttctggacaaaaggaggggacgagatcccgagatgggcggaaagcctcagcgaaggaagaatccgcaagaggggctttataacgaactccagaaagataaaatggcagaagcctatagtgagattgggatgaagggagaaaggaggaggggtaaaggtcacgatgggttgtaccaaggattgagcacagccactaaagatacctatgatgcgctccacatgcaggccctgccgccaaga

SEQ ID NO: 2738 - DNA, 3264 bp, Artificial Sequence
  Synthetic Polynucloetide
atggccttaccagtgaccgccttgctcctgccgctggccttgctgctccacgccgccaggccggaagtgcagctggttgaatctggcggaggactggttcagcctggcggatctctgagactgtcttgtgccgccagcggcttcagcttcagcgacttttggatgagctgggtccgacaggcccctggcaaaggacttgaatgggtcgccacaatcagccaggccggcagcgagaaggactacgtggactctgtgaagggcagattcaccatcagccgggacaacgccaagaagtccctgtacctccagatgaacagcctgagagccgaggacaccgccgtgtactattgtgcctctggcgtgtacagcttcgactacagaggccagggcaccctggtcacagtctcttctggtaccggcggaggcggatctggcggcggaggtagcggtggcggaggatctgaattcgacatccagatgacccagagccccagcagcctgtctgccagcgtgggcgacagagtgaccatcacctgtagagccagccaggacgtgaacaccgccgtggcctggtatcagcagaagcctggcaaggcccccaagctgctgatctacagcgccagcttcctggaaagcggcgtgcccagcagattcagcggaagcagaagcggcaccgacttcaccctgaccatcagctccctccagcccgaggacttcgccacctactactgccagcagcactacaccacccctcccaccttcggccagaccaaggtggaaatcaagagactcgaggacctgaagaacgtgttcccacctgaggtggccgtgttcgagcctagcgaggccgagatcagccacacccagaaagccaccctcgtgtgcctggctaccggcttctaccccgaccatgtggaactgtcttggtgggtcaacggcaaagaggtgcacagcggcgtgtctaccgacccccagccactgaaagaacagcccgccctgaacgacagccggtactgcctgagcagcagactgagagtgtccgccaccttctggcagaacccccggaaccacttcagatgccaggtgcagttctacggcctgagcgagaacgacgagtggacccaggacagagccaagcccgtgacccagatcgtgtctgccgaagcctggggcagagccgattgcggatcccagagcttcggcctgctggaccccaagctgtgctacctgctggatggcatcctgttcatctacggcgtgatcctgaccgccctgttcctgagagtgaagttcagcagaagcgccgacgcccctgcctaccagcagggacagaaccaactgtacaacgagctgaacctgggcagacgggaagagtacgacgtgctggacaagcggagaggcagggaccctgagatgggcggaaagccccagcggagaaagaacccccaggaaggactgtataacgaactccagaaagacaagatggccgaagcctacagcgagatcggcatgaagggcgagcggagaagaggcaagggccacgatggcctgtaccagggcctgagcaccgccaccaaggacacctatgacgccctgcacatgcaggccctgcctccaagaagggccaagcgatctggatctggagcaacaaacttctcactactcaaacaagcaggtgacgtggaggagaatcccgggcctactagtatggactggatttggcgcatccttttccttgtcggcgctgctaccggcgcgcattccgggccccagctccagctgcaagagtctggacctggcctggtcaagcctagcgagacactgagcctgacctgtaccgtgtccggcgatagcatcagcagcggcgattactactggggctggatcagacagcctcctggcaaaggactggaatggatcggccacatctactacagcggcgtgacctactacaaccccagcctgaagtccagagtgaccatcagcgtggacaccagccggaaccagttctccctgaagctgtctagcgtgacagccgccgataccgccgtgtactactgcaccagagaggacagcagcaactggcggagtagaggccagggaacactggtcacagttagctctggatccggcggaggcggaagtggaggcggaggatctggcggcggaggctctttcgaagaagtgcaactggtggaatctggcggcggactggtgcagcctggcggatctctgagactgagctgtgccgccagcggcttcaacatcaaggacacctacatccactgggtgcgccaggcccctggaaagggactggaatgggtggcccggatctaccccaccaacggctacaccagatacgccgacagcgtgaagggccggttcaccatcagcgccgacaccagcaagaataccgcctacctccagatgaacagcctgcgggccgaggataccgccgtgtactactgctcaagatggggaggcgacggcttctacgctatggacgtgtggggccagggcacccttgtgaccgtgtcatctacgcgtatccagaaccctgatcctgccgtgtaccagctgcgggatagcaagagcagcgacaagagcgtgtgtctgttcaccgacttcgacagccagaccaacgtgtcccagagcaaggactccgacgtgtacatcaccgataagaccgtgctggacatgcggagcatggacttcaagagcaactccgccgtggcctggtccaacaagtccgatttcgcctgcgccaacgccttcaacaacagcattatccccgaggacacattcttcccaagccccgagagcagctgcggtacccagagttttgggttgttggaccctaaattgtgctatctgttggacggaatcctgttcatttacggagtgatcctgaccgcattgttcctgcgggttaagttttccagatccgcagacgcacccgcttaccaacaagggcagaaccaactctacaatgaacttaatttggggcggagggaagagtacgacgttctggacaaaaggaggggacgagatcccgagatgggcggaaagcctcagcgaaggaagaatccgcaagaggggctttataacgaactccagaaagataaaatggcagaagcctatagtgagattgggatgaagggagaaaggaggaggggtaaaggtcacgatgggttgtaccaaggattgagcacagccactaaagatacctatgatgcgctccacatgcaggccctgccgccaaga

SEQ ID NO: 2739 - DNA, 3261 bp, Artificial Sequence
  Synthetic Polynucloetide
atggccttaccagtgaccgccttgctcctgccgctggccttgctgctccacgccgccaggccggaagtgcagctggttgaatctggcggaggactggttcagcctggcggatctctgagactgtcttgtgccgccagcggcttcagcttcagcgacttttggatgagctgggtccgacaggcccctggcaaaggacttgaatgggtcgccacaatcagccaggccggcagcgagaaggactacgtggactctgtgaagggcagattcaccatcagccgggacaacgccaagaagtccctgtacctccagatgaacagcctgagagccgaggacaccgccgtgtactattgtgcctctggcgtgtacagcttcgactacagaggccagggcaccctggtcacagtctcttctggtaccggcggaggcggatctggcggcggaggtagcggtggcggaggatctgaattcgaccagagcgtgctgacacagcctcctagcgtgtcagtggcccctggcaagaccgccagaatcccctgcgagggcaactacatcggcagcagcaacgtgcactggtatcagcagaagcccggccaggctcccgtgctcgtgatccacttcgacagcgacagacccagcggcatccccgacagattcagcggcagcaacagcggcaacatggctaccctgaccatcagcagagtggaagccggggacgaggccgactactactgtcaagtgtgggagaaccacggctgggtgttcggcggaggcaccaagctgacagtgctgtctctcgaggacctgaagaacgtgttcccacctgaggtggccgtgttcgagcctagcgaggccgagatcagccacacccagaaagccaccctcgtgtgcctggctaccggcttctaccccgaccatgtggaactgtcttggtgggtcaacggcaaagaggtgcacagcggcgtgtctaccgacccccagccactgaaagaacagcccgccctgaacgacagccggtactgcctgagcagcagactgagagtgtccgccaccttctggcagaacccccggaaccacttcagatgccaggtgcagttctacggcctgagcgagaacgacgagtggacccaggacagagccaagcccgtgacccagatcgtgtctgccgaagcctggggcagagccgattgcggatcccagagcttcggcctgctggaccccaagctgtgctacctgctggatggcatcctgttcatctacggcgtgatcctgaccgccctgttcctgagagtgaagttcagcagaagcgccgacgcccctgcctaccagcagggacagaaccaactgtacaacgagctgaacctgggcagacgggaagagtacgacgtgctggacaagcggagaggcagggaccctgagatgggcggaaagccccagcggagaaagaacccccaggaaggactgtataacgaactccagaaagacaagatggccgaagcctacagcgagatcggcatgaagggcgagcggagaagaggcaagggccacgatggcctgtaccagggcctgagcaccgccaccaaggacacctatgacgccctgcacatgcaggccctgcctccaagaagggccaagcgatctggatctggagcaacaaacttctcactactcaaacaagcaggtgacgtggaggagaatcccgggcctactagtatggactggatttggcgcatccttttccttgtcggcgctgctaccggcgcgcattccgggccccagctccagctgcaagagtctggacctggcctggtcaagcctagcgagacactgagcctgacctgtaccgtgtccggcgatagcatcagcagcggcgattactactggggctggatcagacagcctcctggcaaaggactggaatggatcggccacatctactacagcggcgtgacctactacaaccccagcctgaagtccagagtgaccatcagcgtggacaccagccggaaccagttctccctgaagctgtctagcgtgacagccgccgataccgccgtgtactactgcaccagagaggacagcagcaactggcggagtagaggccagggaacactggtcacagttagctctggatccggcggaggcggaagtggaggcggaggatctggcggcggaggctctttcgaagaggtgcaactggtggaaacaggcggcggactggtgcagcctggcgagtctctgagactgagctgtgccgccagcggcttcaccttcagcgactacgagatgaactgggtgcgccaggcccctggaaagggcctggaatgggtgtcctacatcagcagctccggcagcaccatctactacgccgacagcgtgaagggccggtttaccatctaccgggacaacgccaagaacagcctgtacctccagatgaactccctgcgggccgaggacaccgccctgtactattgtgccagagcctggggcgtgggaccccctgattattggggacagggcaccctcgtgaccgtgtcctctacgcgtatccagaaccctgatcctgccgtgtaccagctgcgggatagcaagagcagcgacaagagcgtgtgtctgttcaccgacttcgacagccagaccaacgtgtcccagagcaaggactccgacgtgtacatcaccgataagaccgtgctggacatgcggagcatggacttcaagagcaactccgccgtggcctggtccaacaagtccgatttcgcctgcgccaacgccttcaacaacagcattatccccgaggacacattcttcccaagccccgagagcagctgcggtacccagagttttgggttgttggaccctaaattgtgctatctgttggacggaatcctgttcatttacggagtgatcctgaccgcattgttcctgcgggttaagttttccagatccgcagacgcacccgcttaccaacaagggcagaaccaactctacaatgaacttaatttggggcggagggaagagtacgacgttctggacaaaaggaggggacgagatcccgagatgggcggaaagcctcagcgaaggaagaatccgcaagaggggctttataacgaactccagaaagataaaatggcagaagcctatagtgagattgggatgaagggagaaaggaggaggggtaaaggtcacgatgggttgtaccaaggattgagcacagccactaaagatacctatgatgcgctccacatgcaggccctgccgccaaga

SEQ ID NO: 2740 - DNA, 3285 bp, Artificial Sequence
  Synthetic Polynucloetide
atggccttaccagtgaccgccttgctcctgccgctggccttgctgctccacgccgccaggccggaagtgcagctggttgaatctggcggaggactggttcagcctggcggatctctgagactgtcttgtgccgccagcggcttcagcttcagcgacttttggatgagctgggtccgacaggcccctggcaaaggacttgaatgggtcgccacaatcagccaggccggcagcgagaaggactacgtggactctgtgaagggcagattcaccatcagccgggacaacgccaagaagtccctgtacctccagatgaacagcctgagagccgaggacaccgccgtgtactattgtgcctctggcgtgtacagcttcgactacagaggccagggcaccctggtcacagtctcttctggtaccggcggaggcggatctggcggcggaggtagcggtggcggaggatctgaattcgacatccagatgacccagagccccagcagcctgtctgccagcgtgggcgataccgtgaccatcacctgtcaggccaacggctacctgaactggtatcagcagcggagaggcaaggcccccaagctgctgatctacgacggcagcaagctggaaagaggcgtgcccagcagattcagcggcagaagatggggccaggagtacaacctgaccatcaacaacctccagcccgaggatattgccacatacttttgccaggtgtacgagttcgtggtgcccggcacacggctggacctgaagagaacagtggctgctcctctcgaggacctgaagaacgtgttcccacctgaggtggccgtgttcgagcctagcgaggccgagatcagccacacccagaaagccaccctcgtgtgcctggctaccggcttctaccccgaccatgtggaactgtcttggtgggtcaacggcaaagaggtgcacagcggcgtgtctaccgacccccagccactgaaagaacagcccgccctgaacgacagccggtactgcctgagcagcagactgagagtgtccgccaccttctggcagaacccccggaaccacttcagatgccaggtgcagttctacggcctgagcgagaacgacgagtggacccaggacagagccaagcccgtgacccagatcgtgtctgccgaagcctggggcagagccgattgcggatcccagagcttcggcctgctggaccccaagctgtgctacctgctggatggcatcctgttcatctacggcgtgatcctgaccgccctgttcctgagagtgaagttcagcagaagcgccgacgcccctgcctaccagcagggacagaaccaactgtacaacgagctgaacctgggcagacgggaagagtacgacgtgctggacaagcggagaggcagggaccctgagatgggcggaaagccccagcggagaaagaacccccaggaaggactgtataacgaactccagaaagacaagatggccgaagcctacagcgagatcggcatgaagggcgagcggagaagaggcaagggccacgatggcctgtaccagggcctgagcaccgccaccaaggacacctatgacgccctgcacatgcaggccctgcctccaagaagggccaagcgatctggatctggagcaacaaacttctcactactcaaacaagcaggtgacgtggaggagaatcccgggcctactagtatggactggatttggcgcatccttttccttgtcggcgctgctaccggcgcgcattccgggccccagctccagctgcaagagtctggacctggcctggtcaagcctagcgagacactgagcctgacctgtaccgtgtccggcgatagcatcagcagcggcgattactactggggctggatcagacagcctcctggcaaaggactggaatggatcggccacatctactacagcggcgtgacctactacaaccccagcctgaagtccagagtgaccatcagcgtggacaccagccggaaccagttctccctgaagctgtctagcgtgacagccgccgataccgccgtgtactactgcaccagagaggacagcagcaactggcggagtagaggccagggaacactggtcacagttagctctggatccggcggaggcggaagtggaggcggaggatctggcggcggaggctctttcgaacaggtgcagctgctccagtctggcgctgccgtgacaaagcctggcgcttctgtgcgggtgtcctgtgaagccagcggctacaacatccgggactacttcatccactggtggcggcaggctccaggccagggactccagtgggtgggatggatcaaccccaagaccggccagcccaacaaccccagacagttccagggcagagtgtccctgaccagacacgccagctgggacttcgacaccttcagcttctacatggatctgaaggccctgcggagcgacgataccgccgtgtacttctgcgccagacagagaagcgactactgggatttcgacgtgtggggcagcggcacccaagtgacagtgtctagcgccagcaccaagggacccacgcgtatccagaaccctgatcctgccgtgtaccagctgcgggatagcaagagcagcgacaagagcgtgtgtctgttcaccgacttcgacagccagaccaacgtgtcccagagcaaggactccgacgtgtacatcaccgataagaccgtgctggacatgcggagcatggacttcaagagcaactccgccgtggcctggtccaacaagtccgatttcgcctgcgccaacgccttcaacaacagcattatccccgaggacacattcttcccaagccccgagagcagctgcggtacccagagttttgggttgttggaccctaaattgtgctatctgttggacggaatcctgttcatttacggagtgatcctgaccgcattgttcctgcgggttaagttttccagatccgcagacgcacccgcttaccaacaagggcagaaccaactctacaatgaacttaatttggggcggagggaagagtacgacgttctggacaaaaggaggggacgagatcccgagatgggcggaaagcctcagcgaaggaagaatccgcaagaggggctttataacgaactccagaaagataaaatggcagaagcctatagtgagattgggatgaagggagaaaggaggaggggtaaaggtcacgatgggttgtaccaaggattgagcacagccactaaagatacctatgatgcgctccacatgcaggccctgccgccaaga

SEQ ID NO: 2741 - DNA, 3303 bp, Artificial Sequence
  Synthetic Polynucloetide
atggccttaccagtgaccgccttgctcctgccgctggccttgctgctccacgccgccaggccggaagtgcagctggttgaatctggcggaggactggttcagcctggcggatctctgagactgtcttgtgccgccagcggcttcagcttcagcgacttttggatgagctgggtccgacaggcccctggcaaaggacttgaatgggtcgccacaatcagccaggccggcagcgagaaggactacgtggactctgtgaagggcagattcaccatcagccgggacaacgccaagaagtccctgtacctccagatgaacagcctgagagccgaggacaccgccgtgtactattgtgcctctggcgtgtacagcttcgactacagaggccagggcaccctggtcacagtctcttctggtaccggcggaggcggatctggcggcggaggtagcggtggcggaggatctgaattccagtctgccctgacacagcctcctagcgcctctggctctcccggccagagcatcaccatcagctgtaccggcaccagcaacaacttcgtgtcctggtatcagcagcacgccggcaaggcccccaagctcgtgatctacgacgtgaacaagcggcccagcggcgtgcccgatagattcagcggcagcaagagcggcaacaccgccagcctgacagtgtctggcctccagaccgatgacgaggccgtgtactactgcggcagcctcgtgggcaactgggacgtgatctttggcggaggcaccaagctgaccgtgctgctcgaggacctgaagaacgtgttcccacctgaggtggccgtgttcgagcctagcgaggccgagatcagccacacccagaaagccaccctcgtgtgcctggctaccggcttctaccccgaccatgtggaactgtcttggtgggtcaacggcaaagaggtgcacagcggcgtgtctaccgacccccagccactgaaagaacagcccgccctgaacgacagccggtactgcctgagcagcagactgagagtgtccgccaccttctggcagaacccccggaaccacttcagatgccaggtgcagttctacggcctgagcgagaacgacgagtggacccaggacagagccaagcccgtgacccagatcgtgtctgccgaagcctggggcagagccgattgcggatcccagagcttcggcctgctggaccccaagctgtgctacctgctggatggcatcctgttcatctacggcgtgatcctgaccgccctgttcctgagagtgaagttcagcagaagcgccgacgcccctgcctaccagcagggacagaaccaactgtacaacgagctgaacctgggcagacgggaagagtacgacgtgctggacaagcggagaggcagggaccctgagatgggcggaaagccccagcggagaaagaacccccaggaaggactgtataacgaactccagaaagacaagatggccgaagcctacagcgagatcggcatgaagggcgagcggagaagaggcaagggccacgatggcctgtaccagggcctgagcaccgccaccaaggacacctatgacgccctgcacatgcaggccctgcctccaagaagggccaagcgatctggatctggagcaacaaacttctcactactcaaacaagcaggtgacgtggaggagaatcccgggcctactagtatggactggatttggcgcatccttttccttgtcggcgctgctaccggcgcgcattccgggccccagctccagctgcaagagtctggacctggcctggtcaagcctagcgagacactgagcctgacctgtaccgtgtccggcgatagcatcagcagcggcgattactactggggctggatcagacagcctcctggcaaaggactggaatggatcggccacatctactacagcggcgtgacctactacaaccccagcctgaagtccagagtgaccatcagcgtggacaccagccggaaccagttctccctgaagctgtctagcgtgacagccgccgataccgccgtgtactactgcaccagagaggacagcagcaactggcggagtagaggccagggaacactggtcacagttagctctggatccggcggaggcggaagtggaggcggaggatctggcggcggaggctctttcgaacagccccagctccaggaatctggccccacactggtggaagccagcgagacactgagcctgacctgtgccgtgtccggcgattctaccgccgcctgcaatagcttctggggctgggtgcgccagcctcctggaaagggactggaatgggtgggaagcctgagccactgcgccagctattggaaccggggctggacctaccacaaccccagcctgaagtccagactgaccctggccctggacacccccaagaacctggtgttcctgaagctgaacagcgtgacagccgccgacaccgccacctactactgtgccagatttggcggcgaggtgctgcggtacaccgactggcctaaacctgcctgggtggacctgtggggcagaggaacactcgtgaccgtgtccagcacgcgtatccagaaccctgatcctgccgtgtaccagctgcgggatagcaagagcagcgacaagagcgtgtgtctgttcaccgacttcgacagccagaccaacgtgtcccagagcaaggactccgacgtgtacatcaccgataagaccgtgctggacatgcggagcatggacttcaagagcaactccgccgtggcctggtccaacaagtccgatttcgcctgcgccaacgccttcaacaacagcattatccccgaggacacattcttcccaagccccgagagcagctgcggtacccagagttttgggttgttggaccctaaattgtgctatctgttggacggaatcctgttcatttacggagtgatcctgaccgcattgttcctgcgggttaagttttccagatccgcagacgcacccgcttaccaacaagggcagaaccaactctacaatgaacttaatttggggcggagggaagagtacgacgttctggacaaaaggaggggacgagatcccgagatgggcggaaagcctcagcgaaggaagaatccgcaagaggggctttataacgaactccagaaagataaaatggcagaagcctatagtgagattgggatgaagggagaaaggaggaggggtaaaggtcacgatgggttgtaccaaggattgagcacagccactaaagatacctatgatgcgctccacatgcaggccctgccgccaaga

SEQ ID NO: 2742 - DNA, 3258 bp, Artificial Sequence
  Synthetic Polynucloetide
atggccttaccagtgaccgccttgctcctgccgctggccttgctgctccacgccgccaggccggaagtgcagctggttgaatctggcggaggactggttcagcctggcggatctctgagactgtcttgtgccgccagcggcttcagcttcagcgacttttggatgagctgggtccgacaggcccctggcaaaggacttgaatgggtcgccacaatcagccaggccggcagcgagaaggactacgtggactctgtgaagggcagattcaccatcagccgggacaacgccaagaagtccctgtacctccagatgaacagcctgagagccgaggacaccgccgtgtactattgtgcctctggcgtgtacagcttcgactacagaggccagggcaccctggtcacagtctcttctggtaccggcggaggcggatctggcggcggaggtagcggtggcggaggatctgaattcgagatcgtgctgacacagagccctggcaccctgagcctgtctccaggcgagacagccatcatcagctgccggacaagccagtacggcagcctggcctggtatcagcagaggccaggacaggcccccagactcgtgatctacagcggcagcacaagagccgccggaatccccgatagattcagcggctccagatggggacccgactacaacctgaccatcagcaacctggaaagcggcgacttcggcgtgtactactgccagcagtacgagttcttcggccagggcaccaaggtgcaggtggacatcaaaagactcgaggacctgaagaacgtgttcccacctgaggtggccgtgttcgagcctagcgaggccgagatcagccacacccagaaagccaccctcgtgtgcctggctaccggcttctaccccgaccatgtggaactgtcttggtgggtcaacggcaaagaggtgcacagcggcgtgtctaccgacccccagccactgaaagaacagcccgccctgaacgacagccggtactgcctgagcagcagactgagagtgtccgccaccttctggcagaacccccggaaccacttcagatgccaggtgcagttctacggcctgagcgagaacgacgagtggacccaggacagagccaagcccgtgacccagatcgtgtctgccgaagcctggggcagagccgattgcggatcccagagcttcggcctgctggaccccaagctgtgctacctgctggatggcatcctgttcatctacggcgtgatcctgaccgccctgttcctgagagtgaagttcagcagaagcgccgacgcccctgcctaccagcagggacagaaccaactgtacaacgagctgaacctgggcagacgggaagagtacgacgtgctggacaagcggagaggcagggaccctgagatgggcggaaagccccagcggagaaagaacccccaggaaggactgtataacgaactccagaaagacaagatggccgaagcctacagcgagatcggcatgaagggcgagcggagaagaggcaagggccacgatggcctgtaccagggcctgagcaccgccaccaaggacacctatgacgccctgcacatgcaggccctgcctccaagaagggccaagcgatctggatctggagcaacaaacttctcactactcaaacaagcaggtgacgtggaggagaatcccgggcctactagtatggactggatttggcgcatccttttccttgtcggcgctgctaccggcgcgcattccgggccccagctccagctgcaagagtctggacctggcctggtcaagcctagcgagacactgagcctgacctgtaccgtgtccggcgatagcatcagcagcggcgattactactggggctggatcagacagcctcctggcaaaggactggaatggatcggccacatctactacagcggcgtgacctactacaaccccagcctgaagtccagagtgaccatcagcgtggacaccagccggaaccagttctccctgaagctgtctagcgtgacagccgccgataccgccgtgtactactgcaccagagaggacagcagcaactggcggagtagaggccagggaacactggtcacagttagctctggatccggcggaggcggaagtggaggcggaggatctggcggcggaggctctttcgaacaggtgcagctggtgcagtctggcggccagatgaagaaacccggcgagagcatgagaatcagctgtcgggcctccggctacgagttcatcgactgcaccctgaactggatcagactggcccctggcaagcggcctgagtggatgggatggctgaagcctagaggcggagccgtgaactacgccagacctctccagggcagagtgaccatgaccagggacgtgtacagcgataccgccttcctggaactgcggagcctgaccgtggatgataccgccgtgtacttctgcaccagaggcaagaactgcgattacaactgggacttcgagcactggggcagaggcacccctgtgatcgtgtctagcacgcgtatccagaaccctgatcctgccgtgtaccagctgcgggatagcaagagcagcgacaagagcgtgtgtctgttcaccgacttcgacagccagaccaacgtgtcccagagcaaggactccgacgtgtacatcaccgataagaccgtgctggacatgcggagcatggacttcaagagcaactccgccgtggcctggtccaacaagtccgatttcgcctgcgccaacgccttcaacaacagcattatccccgaggacacattcttcccaagccccgagagcagctgcggtacccagagttttgggttgttggaccctaaattgtgctatctgttggacggaatcctgttcatttacggagtgatcctgaccgcattgttcctgcgggttaagttttccagatccgcagacgcacccgcttaccaacaagggcagaaccaactctacaatgaacttaatttggggcggagggaagagtacgacgttctggacaaaaggaggggacgagatcccgagatgggcggaaagcctcagcgaaggaagaatccgcaagaggggctttataacgaactccagaaagataaaatggcagaagcctatagtgagattgggatgaagggagaaaggaggaggggtaaaggtcacgatgggttgtaccaaggattgagcacagccactaaagatacctatgatgcgctccacatgcaggccctgccgccaaga

SEQ ID NO: 2743 - DNA, 3288 bp, Artificial Sequence
  Synthetic Polynucloetide
atggccttaccagtgaccgccttgctcctgccgctggccttgctgctccacgccgccaggccggaagtgcagctggttgaatctggcggaggactggttcagcctggcggatctctgagactgtcttgtgccgccagcggcttcagcttcagcgacttttggatgagctgggtccgacaggcccctggcaaaggacttgaatgggtcgccacaatcagccaggccggcagcgagaaggactacgtggactctgtgaagggcagattcaccatcagccgggacaacgccaagaagtccctgtacctccagatgaacagcctgagagccgaggacaccgccgtgtactattgtgcctctggcgtgtacagcttcgactacagaggccagggcaccctggtcacagtctcttctggtaccggcggaggcggatctggcggcggaggtagcggtggcggaggatctgaattcgagctggtgctgacacagagccctggcaccctgtctctgtctgccggcgaaagagccaccctgagctgtagagccagccagagcgtgtcctctggcagcctggcttggtatcagcagaagccaggccaggcccccagactgctgatctacggcgcttctaccagagccaccggcatccccgatagattcagcggctctggctccggcaccgacttcaccctgacaatcggcagactggaacccgaggacctggccgtgtactactgccagcagtacggcaccagcccctacacattcggccagggcaccaagctggaaatcctcgaggacctgaagaacgtgttcccacctgaggtggccgtgttcgagcctagcgaggccgagatcagccacacccagaaagccaccctcgtgtgcctggctaccggcttctaccccgaccatgtggaactgtcttggtgggtcaacggcaaagaggtgcacagcggcgtgtctaccgacccccagccactgaaagaacagcccgccctgaacgacagccggtactgcctgagcagcagactgagagtgtccgccaccttctggcagaacccccggaaccacttcagatgccaggtgcagttctacggcctgagcgagaacgacgagtggacccaggacagagccaagcccgtgacccagatcgtgtctgccgaagcctggggcagagccgattgcggatcccagagcttcggcctgctggaccccaagctgtgctacctgctggatggcatcctgttcatctacggcgtgatcctgaccgccctgttcctgagagtgaagttcagcagaagcgccgacgcccctgcctaccagcagggacagaaccaactgtacaacgagctgaacctgggcagacgggaagagtacgacgtgctggacaagcggagaggcagggaccctgagatgggcggaaagccccagcggagaaagaacccccaggaaggactgtataacgaactccagaaagacaagatggccgaagcctacagcgagatcggcatgaagggcgagcggagaagaggcaagggccacgatggcctgtaccagggcctgagcaccgccaccaaggacacctatgacgccctgcacatgcaggccctgcctccaagaagggccaagcgatctggatctggagcaacaaacttctcactactcaaacaagcaggtgacgtggaggagaatcccgggcctactagtatggactggatttggcgcatccttttccttgtcggcgctgctaccggcgcgcattccgggccccagctccagctgcaagagtctggacctggcctggtcaagcctagcgagacactgagcctgacctgtaccgtgtccggcgatagcatcagcagcggcgattactactggggctggatcagacagcctcctggcaaaggactggaatggatcggccacatctactacagcggcgtgacctactacaaccccagcctgaagtccagagtgaccatcagcgtggacaccagccggaaccagttctccctgaagctgtctagcgtgacagccgccgataccgccgtgtactactgcaccagagaggacagcagcaactggcggagtagaggccagggaacactggtcacagttagctctggatccggcggaggcggaagtggaggcggaggatctggcggcggaggctctttcgaactggaacagagcggagccgaagtgaagaaacccggcagcagcgtgcaggtgtcctgcaaagcaagcggcggcaccttctctatgtacggcttcaactgggtgcgccaggctcctggacacggcctggaatggatgggcggcatcatccccatcttcggcacctccaactacgcccagaaattccggggcagagtgaccttcaccgccgaccaggccacaagcaccgcctacatggaactgaccaacctgcggagcgacgacaccgccgtgtattattgcgccagagacttcggccccgactgggaggatggcgacagctacgatggcagcggcagaggcttcttcgacttctggggccagggaacccttgtgaccgtgtcctcaacgcgtatccagaaccctgatcctgccgtgtaccagctgcgggatagcaagagcagcgacaagagcgtgtgtctgttcaccgacttcgacagccagaccaacgtgtcccagagcaaggactccgacgtgtacatcaccgataagaccgtgctggacatgcggagcatggacttcaagagcaactccgccgtggcctggtccaacaagtccgatttcgcctgcgccaacgccttcaacaacagcattatccccgaggacacattcttcccaagccccgagagcagctgcggtacccagagttttgggttgttggaccctaaattgtgctatctgttggacggaatcctgttcatttacggagtgatcctgaccgcattgttcctgcgggttaagttttccagatccgcagacgcacccgcttaccaacaagggcagaaccaactctacaatgaacttaatttggggcggagggaagagtacgacgttctggacaaaaggaggggacgagatcccgagatgggcggaaagcctcagcgaaggaagaatccgcaagaggggctttataacgaactccagaaagataaaatggcagaagcctatagtgagattgggatgaagggagaaaggaggaggggtaaaggtcacgatgggttgtaccaaggattgagcacagccactaaagatacctatgatgcgctccacatgcaggccctgccgccaaga

SEQ ID NO: 2744 - DNA, 3228 bp, Artificial Sequence
  Synthetic Polynucloetide
atggccttaccagtgaccgccttgctcctgccgctggccttgctgctccacgccgccaggccggaagtgcagctggttgaatctggcggaggactggttcagcctggcggatctctgagactgtcttgtgccgccagcggcttcagcttcagcgacttttggatgagctgggtccgacaggcccctggcaaaggacttgaatgggtcgccacaatcagccaggccggcagcgagaaggactacgtggactctgtgaagggcagattcaccatcagccgggacaacgccaagaagtccctgtacctccagatgaacagcctgagagccgaggacaccgccgtgtactattgtgcctctggcgtgtacagcttcgactacagaggccagggcaccctggtcacagtctcttctggtaccggcggaggcggatctggcggcggaggtagcggtggcggaggatctgaattcgacatccagatgacccagagccccagcagcctgtctgccagcgtgggcgacagagtgaccatcacctgtcaggccagccaggacatcaacaactacctgaactggtatcagcagaagcccggcaaggcccccaagctgctgatctacgacgccagcaatctgcagaccggcgtgcccagcagattttccggctctggcagcggcaccgacttcaccttcaccatcgaggacattgccacctactactgccagcagtacaccttcggccctggcaccaaggtggacatcaaactcgaggacctgaagaacgtgttcccacctgaggtggccgtgttcgagcctagcgaggccgagatcagccacacccagaaagccaccctcgtgtgcctggctaccggcttctaccccgaccatgtggaactgtcttggtgggtcaacggcaaagaggtgcacagcggcgtgtctaccgacccccagccactgaaagaacagcccgccctgaacgacagccggtactgcctgagcagcagactgagagtgtccgccaccttctggcagaacccccggaaccacttcagatgccaggtgcagttctacggcctgagcgagaacgacgagtggacccaggacagagccaagcccgtgacccagatcgtgtctgccgaagcctggggcagagccgattgcggatcccagagcttcggcctgctggaccccaagctgtgctacctgctggatggcatcctgttcatctacggcgtgatcctgaccgccctgttcctgagagtgaagttcagcagaagcgccgacgcccctgcctaccagcagggacagaaccaactgtacaacgagctgaacctgggcagacgggaagagtacgacgtgctggacaagcggagaggcagggaccctgagatgggcggaaagccccagcggagaaagaacccccaggaaggactgtataacgaactccagaaagacaagatggccgaagcctacagcgagatcggcatgaagggcgagcggagaagaggcaagggccacgatggcctgtaccagggcctgagcaccgccaccaaggacacctatgacgccctgcacatgcaggccctgcctccaagaagggccaagcgatctggatctggagcaacaaacttctcactactcaaacaagcaggtgacgtggaggagaatcccgggcctactagtatggactggatttggcgcatccttttccttgtcggcgctgctaccggcgcgcattccgggccccagctccagctgcaagagtctggacctggcctggtcaagcctagcgagacactgagcctgacctgtaccgtgtccggcgatagcatcagcagcggcgattactactggggctggatcagacagcctcctggcaaaggactggaatggatcggccacatctactacagcggcgtgacctactacaaccccagcctgaagtccagagtgaccatcagcgtggacaccagccggaaccagttctccctgaagctgtctagcgtgacagccgccgataccgccgtgtactactgcaccagagaggacagcagcaactggcggagtagaggccagggaacactggtcacagttagctctggatccggcggaggcggaagtggaggcggaggatctggcggcggaggctctttcgaagaagtgcaactgctggaatctggcggcggactggtgcagcctggcggatctctgagactgagctgtgccgccagcggcttcacctttagctggtacagcatgacctgggtgcgccaggcccctggcaaaggactggaatgggtgtccagcatcgtgccctggggcgatttcacccagtacgccgatagcgtgaagggccggttcaccatcagccgggacaacagcaagaacaccctgtacctgcagatgaacagcctgcgggccgaggacaccgccgtgtactattgtgccaagggacctggctggggcagcttcgatctgtggggcagaggaacccttgtgaccgtgtccagcacgcgtatccagaaccctgatcctgccgtgtaccagctgcgggatagcaagagcagcgacaagagcgtgtgtctgttcaccgacttcgacagccagaccaacgtgtcccagagcaaggactccgacgtgtacatcaccgataagaccgtgctggacatgcggagcatggacttcaagagcaactccgccgtggcctggtccaacaagtccgatttcgcctgcgccaacgccttcaacaacagcattatccccgaggacacattcttcccaagccccgagagcagctgcggtacccagagttttgggttgttggaccctaaattgtgctatctgttggacggaatcctgttcatttacggagtgatcctgaccgcattgttcctgcgggttaagttttccagatccgcagacgcacccgcttaccaacaagggcagaaccaactctacaatgaacttaatttggggcggagggaagagtacgacgttctggacaaaaggaggggacgagatcccgagatgggcggaaagcctcagcgaaggaagaatccgcaagaggggctttataacgaactccagaaagataaaatggcagaagcctatagtgagattgggatgaagggagaaaggaggaggggtaaaggtcacgatgggttgtaccaaggattgagcacagccactaaagatacctatgatgcgctccacatgcaggccctgccgccaaga

SEQ ID NO: 2745 - DNA, 3258 bp, Artificial Sequence
  Synthetic Polynucloetide
atggccttaccagtgaccgccttgctcctgccgctggccttgctgctccacgccgccaggccggaagtgcagctggttgaatctggcggaggactggttcagcctggcggatctctgagactgtcttgtgccgccagcggcttcagcttcagcgacttttggatgagctgggtccgacaggcccctggcaaaggacttgaatgggtcgccacaatcagccaggccggcagcgagaaggactacgtggactctgtgaagggcagattcaccatcagccgggacaacgccaagaagtccctgtacctccagatgaacagcctgagagccgaggacaccgccgtgtactattgtgcctctggcgtgtacagcttcgactacagaggccagggcaccctggtcacagtctcttctggtaccggcggaggcggatctggcggcggaggtagcggtggcggaggatctgaattcgacatccagatgacccagagccccagcagcctgtctgccagcgtgggcgacagagtgaccatcacctgtaccgccagcctgagcgtgtccagcacctacctgcactggtatcagcagaagcccggcagcagccccaagctgtggatctacagcaccagcaacctggcctccggcgtgcccagcagattttctggcagcggctctggcaccagctacaccctgaccatcagctccctccagcccgaggacttcgccacctactactgccaccagtaccacagaagccccctgacctttggcggaggcaccaaggtggaaatcaagagactcgaggacctgaagaacgtgttcccacctgaggtggccgtgttcgagcctagcgaggccgagatcagccacacccagaaagccaccctcgtgtgcctggctaccggcttctaccccgaccatgtggaactgtcttggtgggtcaacggcaaagaggtgcacagcggcgtgtctaccgacccccagccactgaaagaacagcccgccctgaacgacagccggtactgcctgagcagcagactgagagtgtccgccaccttctggcagaacccccggaaccacttcagatgccaggtgcagttctacggcctgagcgagaacgacgagtggacccaggacagagccaagcccgtgacccagatcgtgtctgccgaagcctggggcagagccgattgcggatcccagagcttcggcctgctggaccccaagctgtgctacctgctggatggcatcctgttcatctacggcgtgatcctgaccgccctgttcctgagagtgaagttcagcagaagcgccgacgcccctgcctaccagcagggacagaaccaactgtacaacgagctgaacctgggcagacgggaagagtacgacgtgctggacaagcggagaggcagggaccctgagatgggcggaaagccccagcggagaaagaacccccaggaaggactgtataacgaactccagaaagacaagatggccgaagcctacagcgagatcggcatgaagggcgagcggagaagaggcaagggccacgatggcctgtaccagggcctgagcaccgccaccaaggacacctatgacgccctgcacatgcaggccctgcctccaagaagggccaagcgatctggatctggagcaacaaacttctcactactcaaacaagcaggtgacgtggaggagaatcccgggcctactagtatggactggatttggcgcatccttttccttgtcggcgctgctaccggcgcgcattccgggccccagctccagctgcaagagtctggacctggcctggtcaagcctagcgagacactgagcctgacctgtaccgtgtccggcgatagcatcagcagcggcgattactactggggctggatcagacagcctcctggcaaaggactggaatggatcggccacatctactacagcggcgtgacctactacaaccccagcctgaagtccagagtgaccatcagcgtggacaccagccggaaccagttctccctgaagctgtctagcgtgacagccgccgataccgccgtgtactactgcaccagagaggacagcagcaactggcggagtagaggccagggaacactggtcacagttagctctggatccggcggaggcggaagtggaggcggaggatctggcggcggaggctctttcgaagaagtgcaactggtggaatctggcggcggactggtgcagcctggcggatctctgagactgagctgtgccgccagcggcttcagcctgaccaaatacggcgtgcactgggtgcgccaggcccctggaaaaggactggaatgggtgggagtgaagtgggctggcggctccaccgactacaacagcgccctgatgagccggttcaccatcagcaaggacaacgccaagaacagcctgtacctccagatgaactccctgcgggccgaggacaccgccgtgtactactgtgccagagatcaccgggacgctatggactactggggccagggaacactcgtgaccgtgtcctctacgcgtatccagaaccctgatcctgccgtgtaccagctgcgggatagcaagagcagcgacaagagcgtgtgtctgttcaccgacttcgacagccagaccaacgtgtcccagagcaaggactccgacgtgtacatcaccgataagaccgtgctggacatgcggagcatggacttcaagagcaactccgccgtggcctggtccaacaagtccgatttcgcctgcgccaacgccttcaacaacagcattatccccgaggacacattcttcccaagccccgagagcagctgcggtacccagagttttgggttgttggaccctaaattgtgctatctgttggacggaatcctgttcatttacggagtgatcctgaccgcattgttcctgcgggttaagttttccagatccgcagacgcacccgcttaccaacaagggcagaaccaactctacaatgaacttaatttggggcggagggaagagtacgacgttctggacaaaaggaggggacgagatcccgagatgggcggaaagcctcagcgaaggaagaatccgcaagaggggctttataacgaactccagaaagataaaatggcagaagcctatagtgagattgggatgaagggagaaaggaggaggggtaaaggtcacgatgggttgtaccaaggattgagcacagccactaaagatacctatgatgcgctccacatgcaggccctgccgccaaga

SEQ ID NO: 2746 - DNA, 3270 bp, Artificial Sequence
  Synthetic Polynucloetide
atggccttaccagtgaccgccttgctcctgccgctggccttgctgctccacgccgccaggccggaagtgcagctggttgaatctggcggaggactggttcagcctggcggatctctgagactgtcttgtgccgccagcggcttcagcttcagcgacttttggatgagctgggtccgacaggcccctggcaaaggacttgaatgggtcgccacaatcagccaggccggcagcgagaaggactacgtggactctgtgaagggcagattcaccatcagccgggacaacgccaagaagtccctgtacctccagatgaacagcctgagagccgaggacaccgccgtgtactattgtgcctctggcgtgtacagcttcgactacagaggccagggcaccctggtcacagtctcttctggtaccggcggaggcggatctggcggcggaggtagcggtggcggaggatctgaattcgacatccagatgacccagagccccagcagcctgtctgccagcgtgggcgacagagtgaccatcacatgcaaggccagccaggacgtgggaacagccgtggcctggtatcagcagaagcctggcaaggcccccaagctgctgatctacagcgccagctacagatccaccggcgtgcccagcagattttccggctctggcagcggcaccgacttcaccctgaccatctctagcctccagcccgaggacttcgccacctactactgccagcaccactactccgccccctggacatttggcggaggcaccaaggtggaaatcaagctcgaggacctgaagaacgtgttcccacctgaggtggccgtgttcgagcctagcgaggccgagatcagccacacccagaaagccaccctcgtgtgcctggctaccggcttctaccccgaccatgtggaactgtcttggtgggtcaacggcaaagaggtgcacagcggcgtgtctaccgacccccagccactgaaagaacagcccgccctgaacgacagccggtactgcctgagcagcagactgagagtgtccgccaccttctggcagaacccccggaaccacttcagatgccaggtgcagttctacggcctgagcgagaacgacgagtggacccaggacagagccaagcccgtgacccagatcgtgtctgccgaagcctggggcagagccgattgcggatcccagagcttcggcctgctggaccccaagctgtgctacctgctggatggcatcctgttcatctacggcgtgatcctgaccgccctgttcctgagagtgaagttcagcagaagcgccgacgcccctgcctaccagcagggacagaaccaactgtacaacgagctgaacctgggcagacgggaagagtacgacgtgctggacaagcggagaggcagggaccctgagatgggcggaaagccccagcggagaaagaacccccaggaaggactgtataacgaactccagaaagacaagatggccgaagcctacagcgagatcggcatgaagggcgagcggagaagaggcaagggccacgatggcctgtaccagggcctgagcaccgccaccaaggacacctatgacgccctgcacatgcaggccctgcctccaagaagggccaagcgatctggatctggagcaacaaacttctcactactcaaacaagcaggtgacgtggaggagaatcccgggcctactagtatggactggatttggcgcatccttttccttgtcggcgctgctaccggcgcgcattccgggccccagctccagctgcaagagtctggacctggcctggtcaagcctagcgagacactgagcctgacctgtaccgtgtccggcgatagcatcagcagcggcgattactactggggctggatcagacagcctcctggcaaaggactggaatggatcggccacatctactacagcggcgtgacctactacaaccccagcctgaagtccagagtgaccatcagcgtggacaccagccggaaccagttctccctgaagctgtctagcgtgacagccgccgataccgccgtgtactactgcaccagagaggacagcagcaactggcggagtagaggccagggaacactggtcacagttagctctggatccggcggaggcggaagtggaggcggaggatctggcggcggaggctctttcgaagaagtgcaactggtggaatcaggcggcggactggtgcagcctggcggatctctgagactgagctgtgccgccagcggcttcaccttcagcagaaacggcatgagctgggtgcgccaggcccctggaaaaggactggaatgggtggcaaccgtgtccagcggcggcagctacatctactacgccgacagcgtgaagggccggttcaccatctccagagacaacgccaagaacagcctgtacctccagatgaactccctgcgggccgaggacaccgccgtgtactattgtgccagacagggcaccaccgccctggctaccagattcttcgatgtgtggggccagggcaccctcgtgaccgtgtcatctacgcgtatccagaaccctgatcctgccgtgtaccagctgcgggatagcaagagcagcgacaagagcgtgtgtctgttcaccgacttcgacagccagaccaacgtgtcccagagcaaggactccgacgtgtacatcaccgataagaccgtgctggacatgcggagcatggacttcaagagcaactccgccgtggcctggtccaacaagtccgatttcgcctgcgccaacgccttcaacaacagcattatccccgaggacacattcttcccaagccccgagagcagctgcggtacccagagttttgggttgttggaccctaaattgtgctatctgttggacggaatcctgttcatttacggagtgatcctgaccgcattgttcctgcgggttaagttttccagatccgcagacgcacccgcttaccaacaagggcagaaccaactctacaatgaacttaatttggggcggagggaagagtacgacgttctggacaaaaggaggggacgagatcccgagatgggcggaaagcctcagcgaaggaagaatccgcaagaggggctttataacgaactccagaaagataaaatggcagaagcctatagtgagattgggatgaagggagaaaggaggaggggtaaaggtcacgatgggttgtaccaaggattgagcacagccactaaagatacctatgatgcgctccacatgcaggccctgccgccaaga

SEQ ID NO: 2747 - DNA, 3258 bp, Artificial Sequence
  Synthetic Polynucloetide
atggccttaccagtgaccgccttgctcctgccgctggccttgctgctccacgccgccaggccggaagtgcagctggttgaatctggcggaggactggttcagcctggcggatctctgagactgtcttgtgccgccagcggcttcagcttcagcgacttttggatgagctgggtccgacaggcccctggcaaaggacttgaatgggtcgccacaatcagccaggccggcagcgagaaggactacgtggactctgtgaagggcagattcaccatcagccgggacaacgccaagaagtccctgtacctccagatgaacagcctgagagccgaggacaccgccgtgtactattgtgcctctggcgtgtacagcttcgactacagaggccagggcaccctggtcacagtctcttctggtaccggcggaggcggatctggcggcggaggtagcggtggcggaggatctgaattcgacatccagatgacccagagcccccctagcctgtctgcctctgtgggcggcaaagtgaccatcacatgcaaggccagccaggacatcgaccgctacatggcctggtatcaggacaagcccggcaagggacccaagctgctgatccacgataccagcaccctccagcccggcatccccagcagattttctggcagcggctccggcagagactacagcttcagcatcagcaacctggaacccgaggacattgccacctactactgcctccagtacgacaacctgtggaccttcggcggaggcaccaagctggaaatcaagagactcgaggacctgaagaacgtgttcccacctgaggtggccgtgttcgagcctagcgaggccgagatcagccacacccagaaagccaccctcgtgtgcctggctaccggcttctaccccgaccatgtggaactgtcttggtgggtcaacggcaaagaggtgcacagcggcgtgtctaccgacccccagccactgaaagaacagcccgccctgaacgacagccggtactgcctgagcagcagactgagagtgtccgccaccttctggcagaacccccggaaccacttcagatgccaggtgcagttctacggcctgagcgagaacgacgagtggacccaggacagagccaagcccgtgacccagatcgtgtctgccgaagcctggggcagagccgattgcggatcccagagcttcggcctgctggaccccaagctgtgctacctgctggatggcatcctgttcatctacggcgtgatcctgaccgccctgttcctgagagtgaagttcagcagaagcgccgacgcccctgcctaccagcagggacagaaccaactgtacaacgagctgaacctgggcagacgggaagagtacgacgtgctggacaagcggagaggcagggaccctgagatgggcggaaagccccagcggagaaagaacccccaggaaggactgtataacgaactccagaaagacaagatggccgaagcctacagcgagatcggcatgaagggcgagcggagaagaggcaagggccacgatggcctgtaccagggcctgagcaccgccaccaaggacacctatgacgccctgcacatgcaggccctgcctccaagaagggccaagcgatctggatctggagcaacaaacttctcactactcaaacaagcaggtgacgtggaggagaatcccgggcctactagtatggactggatttggcgcatccttttccttgtcggcgctgctaccggcgcgcattccgggccccagctccagctgcaagagtctggacctggcctggtcaagcctagcgagacactgagcctgacctgtaccgtgtccggcgatagcatcagcagcggcgattactactggggctggatcagacagcctcctggcaaaggactggaatggatcggccacatctactacagcggcgtgacctactacaaccccagcctgaagtccagagtgaccatcagcgtggacaccagccggaaccagttctccctgaagctgtctagcgtgacagccgccgataccgccgtgtactactgcaccagagaggacagcagcaactggcggagtagaggccagggaacactggtcacagttagctctggatccggcggaggcggaagtggaggcggaggatctggcggcggaggctctttcgaacaggtgcaactggtgcagagcggagccgagcttgtgaagcctggcgcttccgtgaagatgagctgcaaagccagcggctacatcttcaccaactacaacatccactgggtcaagaagtccccaggccagggcctggaatggatcggagccatctaccccggaaacggcgacgccccttacagccagaagttccaggacagagccaccctgaccgccgacaccagcagcagcaccacctacatggaactgagcagcctgaccagcgaggacagcgccgtgtactattgcgtgcgggccaactgggatgtggccttcgcctattggggccagggcacactggtgtccgtgtcctctacgcgtatccagaaccctgatcctgccgtgtaccagctgcgggatagcaagagcagcgacaagagcgtgtgtctgttcaccgacttcgacagccagaccaacgtgtcccagagcaaggactccgacgtgtacatcaccgataagaccgtgctggacatgcggagcatggacttcaagagcaactccgccgtggcctggtccaacaagtccgatttcgcctgcgccaacgccttcaacaacagcattatccccgaggacacattcttcccaagccccgagagcagctgcggtacccagagttttgggttgttggaccctaaattgtgctatctgttggacggaatcctgttcatttacggagtgatcctgaccgcattgttcctgcgggttaagttttccagatccgcagacgcacccgcttaccaacaagggcagaaccaactctacaatgaacttaatttggggcggagggaagagtacgacgttctggacaaaaggaggggacgagatcccgagatgggcggaaagcctcagcgaaggaagaatccgcaagaggggctttataacgaactccagaaagataaaatggcagaagcctatagtgagattgggatgaagggagaaaggaggaggggtaaaggtcacgatgggttgtaccaaggattgagcacagccactaaagatacctatgatgcgctccacatgcaggccctgccgccaaga

SEQ ID NO: 2748 - DNA, 3261 bp, Artificial Sequence
  Synthetic Polynucloetide
atggccttaccagtgaccgccttgctcctgccgctggccttgctgctccacgccgccaggccggaagtgcagctggttgaatctggcggaggactggttcagcctggcggatctctgagactgtcttgtgccgccagcggcttcagcttcagcgacttttggatgagctgggtccgacaggcccctggcaaaggacttgaatgggtcgccacaatcagccaggccggcagcgagaaggactacgtggactctgtgaagggcagattcaccatcagccgggacaacgccaagaagtccctgtacctccagatgaacagcctgagagccgaggacaccgccgtgtactattgtgcctctggcgtgtacagcttcgactacagaggccagggcaccctggtcacagtctcttctggtaccggcggaggcggatctggcggcggaggtagcggtggcggaggatctgaattcgacatccagatgacccagagccctgccagcctgtctgcctctgtgggcgagacagtgaccatcacctgtcgggtgtccggcaacatccacaactacctggcctggtatcagcagaagcagggcaagagcccccaactgctggtgtacaacgccaagaccctggccgatggcgtgcccagcagattttctggctctggcagcggcacccagtacagcctgaagatcaacagcctccagcccgaggacttcggcagctactactgccagcacttctggtccaacccctacaccttcggcggaggcaccaagctggaaatcaagctcgaggacctgaagaacgtgttcccacctgaggtggccgtgttcgagcctagcgaggccgagatcagccacacccagaaagccaccctcgtgtgcctggctaccggcttctaccccgaccatgtggaactgtcttggtgggtcaacggcaaagaggtgcacagcggcgtgtctaccgacccccagccactgaaagaacagcccgccctgaacgacagccggtactgcctgagcagcagactgagagtgtccgccaccttctggcagaacccccggaaccacttcagatgccaggtgcagttctacggcctgagcgagaacgacgagtggacccaggacagagccaagcccgtgacccagatcgtgtctgccgaagcctggggcagagccgattgcggatcccagagcttcggcctgctggaccccaagctgtgctacctgctggatggcatcctgttcatctacggcgtgatcctgaccgccctgttcctgagagtgaagttcagcagaagcgccgacgcccctgcctaccagcagggacagaaccaactgtacaacgagctgaacctgggcagacgggaagagtacgacgtgctggacaagcggagaggcagggaccctgagatgggcggaaagccccagcggagaaagaacccccaggaaggactgtataacgaactccagaaagacaagatggccgaagcctacagcgagatcggcatgaagggcgagcggagaagaggcaagggccacgatggcctgtaccagggcctgagcaccgccaccaaggacacctatgacgccctgcacatgcaggccctgcctccaagaagggccaagcgatctggatctggagcaacaaacttctcactactcaaacaagcaggtgacgtggaggagaatcccgggcctactagtatggactggatttggcgcatccttttccttgtcggcgctgctaccggcgcgcattccgggccccagctccagctgcaagagtctggacctggcctggtcaagcctagcgagacactgagcctgacctgtaccgtgtccggcgatagcatcagcagcggcgattactactggggctggatcagacagcctcctggcaaaggactggaatggatcggccacatctactacagcggcgtgacctactacaaccccagcctgaagtccagagtgaccatcagcgtggacaccagccggaaccagttctccctgaagctgtctagcgtgacagccgccgataccgccgtgtactactgcaccagagaggacagcagcaactggcggagtagaggccagggaacactggtcacagttagctctggatccggcggaggcggaagtggaggcggaggatctggcggcggaggctctttcgaacaggtgcaactccagcagtctggcgcttccgtgaaggtgtcctgcaaggccagcgaactcgtgcggcctggcacaggctacgccttcaccaattacctgatcgagtgggtcaagcagaggcccggacagggcctggaatggatcggagtgattaacccaggcagcggcggcaccaactacaacgagaagttcaagggcaaggccaccctgaccgccgacaagagcagcagcacagcctacatgcaactgagcagcctgaccagcgacgacagcgccgtgtacttctgcgcccggtacagaagctacgactggtacttcgacgtgtggggagccggcaccaccgtgacagtgtcatctacgcgtatccagaaccctgatcctgccgtgtaccagctgcgggatagcaagagcagcgacaagagcgtgtgtctgttcaccgacttcgacagccagaccaacgtgtcccagagcaaggactccgacgtgtacatcaccgataagaccgtgctggacatgcggagcatggacttcaagagcaactccgccgtggcctggtccaacaagtccgatttcgcctgcgccaacgccttcaacaacagcattatccccgaggacacattcttcccaagccccgagagcagctgcggtacccagagttttgggttgttggaccctaaattgtgctatctgttggacggaatcctgttcatttacggagtgatcctgaccgcattgttcctgcgggttaagttttccagatccgcagacgcacccgcttaccaacaagggcagaaccaactctacaatgaacttaatttggggcggagggaagagtacgacgttctggacaaaaggaggggacgagatcccgagatgggcggaaagcctcagcgaaggaagaatccgcaagaggggctttataacgaactccagaaagataaaatggcagaagcctatagtgagattgggatgaagggagaaaggaggaggggtaaaggtcacgatgggttgtaccaaggattgagcacagccactaaagatacctatgatgcgctccacatgcaggccctgccgccaaga

SEQ ID NO: 2749 - DNA, 3258 bp, Artificial Sequence
  Synthetic Polynucloetide
atggccttaccagtgaccgccttgctcctgccgctggccttgctgctccacgccgccaggccggaagtgcagctggttgaatctggcggaggactggttcagcctggcggatctctgagactgtcttgtgccgccagcggcttcagcttcagcgacttttggatgagctgggtccgacaggcccctggcaaaggacttgaatgggtcgccacaatcagccaggccggcagcgagaaggactacgtggactctgtgaagggcagattcaccatcagccgggacaacgccaagaagtccctgtacctccagatgaacagcctgagagccgaggacaccgccgtgtactattgtgcctctggcgtgtacagcttcgactacagaggccagggcaccctggtcacagtctcttctggtaccggcggaggcggatctggcggcggaggtagcggtggcggaggatctgaattcgacatccagatgacccagagcttcagcagcctgagcgccagcgtgggcgacagagtgaccatcacctgtagagccagccaggacatcagcaactacctgaactggtatcagcagaagcccggcaaggcccccaagctgctgatctactacaccagcagactgcacagcggcgtgcccagcagattttctggcagcggctccggcaccgactacaccctgacaatcagctccctgcagcccgaggacttcgctacctacttctgtcagcaaggcaacaccctgccctggacctttggcggaggcaccaagctggaaatcaagagactcgaggacctgaagaacgtgttcccacctgaggtggccgtgttcgagcctagcgaggccgagatcagccacacccagaaagccaccctcgtgtgcctggctaccggcttctaccccgaccatgtggaactgtcttggtgggtcaacggcaaagaggtgcacagcggcgtgtctaccgacccccagccactgaaagaacagcccgccctgaacgacagccggtactgcctgagcagcagactgagagtgtccgccaccttctggcagaacccccggaaccacttcagatgccaggtgcagttctacggcctgagcgagaacgacgagtggacccaggacagagccaagcccgtgacccagatcgtgtctgccgaagcctggggcagagccgattgcggatcccagagcttcggcctgctggaccccaagctgtgctacctgctggatggcatcctgttcatctacggcgtgatcctgaccgccctgttcctgagagtgaagttcagcagaagcgccgacgcccctgcctaccagcagggacagaaccaactgtacaacgagctgaacctgggcagacgggaagagtacgacgtgctggacaagcggagaggcagggaccctgagatgggcggaaagccccagcggagaaagaacccccaggaaggactgtataacgaactccagaaagacaagatggccgaagcctacagcgagatcggcatgaagggcgagcggagaagaggcaagggccacgatggcctgtaccagggcctgagcaccgccaccaaggacacctatgacgccctgcacatgcaggccctgcctccaagaagggccaagcgatctggatctggagcaacaaacttctcactactcaaacaagcaggtgacgtggaggagaatcccgggcctactagtatggactggatttggcgcatccttttccttgtcggcgctgctaccggcgcgcattccgggccccagctccagctgcaagagtctggacctggcctggtcaagcctagcgagacactgagcctgacctgtaccgtgtccggcgatagcatcagcagcggcgattactactggggctggatcagacagcctcctggcaaaggactggaatggatcggccacatctactacagcggcgtgacctactacaaccccagcctgaagtccagagtgaccatcagcgtggacaccagccggaaccagttctccctgaagctgtctagcgtgacagccgccgataccgccgtgtactactgcaccagagaggacagcagcaactggcggagtagaggccagggaacactggtcacagttagctctggatccggcggaggcggaagtggaggcggaggatctggcggcggaggctctttcgaagaagtgcaactggtgcagtccggcggagggctggtgcagagcggaggatctctgagactgagctgcagagccagcggctacaccttcacccggtactggatgctgtgggtgcgccagaggccaggcaagggactggaatgggtggccgagatcaacccccggaacgaccggaccaactacaacgagaagttcaagacccggttcaccatcagcgtggacagaagcaagaacaccctgtacctgcagatggacagcctgcgggccgaggataccgccgtgtacttttgtgctctgggaggcggctacgctatggactactggggccagggaacccttgtgaccgtgtcctctacgcgtatccagaaccctgatcctgccgtgtaccagctgcgggatagcaagagcagcgacaagagcgtgtgtctgttcaccgacttcgacagccagaccaacgtgtcccagagcaaggactccgacgtgtacatcaccgataagaccgtgctggacatgcggagcatggacttcaagagcaactccgccgtggcctggtccaacaagtccgatttcgcctgcgccaacgccttcaacaacagcattatccccgaggacacattcttcccaagccccgagagcagctgcggtacccagagttttgggttgttggaccctaaattgtgctatctgttggacggaatcctgttcatttacggagtgatcctgaccgcattgttcctgcgggttaagttttccagatccgcagacgcacccgcttaccaacaagggcagaaccaactctacaatgaacttaatttggggcggagggaagagtacgacgttctggacaaaaggaggggacgagatcccgagatgggcggaaagcctcagcgaaggaagaatccgcaagaggggctttataacgaactccagaaagataaaatggcagaagcctatagtgagattgggatgaagggagaaaggaggaggggtaaaggtcacgatgggttgtaccaaggattgagcacagccactaaagatacctatgatgcgctccacatgcaggccctgccgccaaga

SEQ ID NO: 2750 - DNA, 3261 bp, Artificial Sequence
  Synthetic Polynucloetide
atggccttaccagtgaccgccttgctcctgccgctggccttgctgctccacgccgccaggccggaagtgcagctggttgaatctggcggaggactggttcagcctggcggatctctgagactgtcttgtgccgccagcggcttcagcttcagcgacttttggatgagctgggtccgacaggcccctggcaaaggacttgaatgggtcgccacaatcagccaggccggcagcgagaaggactacgtggactctgtgaagggcagattcaccatcagccgggacaacgccaagaagtccctgtacctccagatgaacagcctgagagccgaggacaccgccgtgtactattgtgcctctggcgtgtacagcttcgactacagaggccagggcaccctggtcacagtctcttctggtaccggcggaggcggatctggcggcggaggtagcggtggcggaggatctgaattcgacatccagatgacacagtctccggcgtcactgtccgcctccgtgggggagactgtgactattatttgtagggcatcagttaacatctactcttatttggcctggtaccagcagaagcaaggcaagagtcctcagctgctggtgtataatgcgaagatcctggcagagggcgtgccgagccggttctccggcagcggctcaggtacccaattttccctcaagatcaattcactgcagccagaggactttggcagttactattgtcaacaccactacggcacattcactttcgggtccggtacaaaattggagattaagcgactcgaggacctgaagaacgtgttcccacctgaggtggccgtgttcgagcctagcgaggccgagatcagccacacccagaaagccaccctcgtgtgcctggctaccggcttctaccccgaccatgtggaactgtcttggtgggtcaacggcaaagaggtgcacagcggcgtgtctaccgacccccagccactgaaagaacagcccgccctgaacgacagccggtactgcctgagcagcagactgagagtgtccgccaccttctggcagaacccccggaaccacttcagatgccaggtgcagttctacggcctgagcgagaacgacgagtggacccaggacagagccaagcccgtgacccagatcgtgtctgccgaagcctggggcagagccgattgcggatcccagagcttcggcctgctggaccccaagctgtgctacctgctggatggcatcctgttcatctacggcgtgatcctgaccgccctgttcctgagagtgaagttcagcagaagcgccgacgcccctgcctaccagcagggacagaaccaactgtacaacgagctgaacctgggcagacgggaagagtacgacgtgctggacaagcggagaggcagggaccctgagatgggcggaaagccccagcggagaaagaacccccaggaaggactgtataacgaactccagaaagacaagatggccgaagcctacagcgagatcggcatgaagggcgagcggagaagaggcaagggccacgatggcctgtaccagggcctgagcaccgccaccaaggacacctatgacgccctgcacatgcaggccctgcctccaagaagggccaagcgatctggatctggagcaacaaacttctcactactcaaacaagcaggtgacgtggaggagaatcccgggcctactagtatggactggatttggcgcatccttttccttgtcggcgctgctaccggcgcgcattccgggccccagctccagctgcaagagtctggacctggcctggtcaagcctagcgagacactgagcctgacctgtaccgtgtccggcgatagcatcagcagcggcgattactactggggctggatcagacagcctcctggcaaaggactggaatggatcggccacatctactacagcggcgtgacctactacaaccccagcctgaagtccagagtgaccatcagcgtggacaccagccggaaccagttctccctgaagctgtctagcgtgacagccgccgataccgccgtgtactactgcaccagagaggacagcagcaactggcggagtagaggccagggaacactggtcacagttagctctggatccggcggaggcggaagtggaggcggaggatctggcggcggaggctctttcgaacaggtacagttgaaagaaagcgggcctggactggtagcgccttcccaatctctctccatcacgtgcaccatctctggcttctccctgacttcctatggagttcactgggtgaggcagccccccggcaagggactggaatggctggtcgtcatctggtccgacgggtccacaacctacaactccgctctgaaaagtcggctctctatttctaaagataatagcaagagccaggtgtttctgaaaatgaactctctgcagaccgatgatacggccatttactactgcgcttcacactatggctcaaccttggcattcgcttcctggggccacggaacactggtgaccgtttccgcagccacgcgtatccagaaccctgatcctgccgtgtaccagctgcgggatagcaagagcagcgacaagagcgtgtgtctgttcaccgacttcgacagccagaccaacgtgtcccagagcaaggactccgacgtgtacatcaccgataagaccgtgctggacatgcggagcatggacttcaagagcaactccgccgtggcctggtccaacaagtccgatttcgcctgcgccaacgccttcaacaacagcattatccccgaggacacattcttcccaagccccgagagcagctgcggtacccagagttttgggttgttggaccctaaattgtgctatctgttggacggaatcctgttcatttacggagtgatcctgaccgcattgttcctgcgggttaagttttccagatccgcagacgcacccgcttaccaacaagggcagaaccaactctacaatgaacttaatttggggcggagggaagagtacgacgttctggacaaaaggaggggacgagatcccgagatgggcggaaagcctcagcgaaggaagaatccgcaagaggggctttataacgaactccagaaagataaaatggcagaagcctatagtgagattgggatgaagggagaaaggaggaggggtaaaggtcacgatgggttgtaccaaggattgagcacagccactaaagatacctatgatgcgctccacatgcaggccctgccgccaaga

SEQ ID NO: 2751 - DNA, 3285 bp, Artificial Sequence
  Synthetic Polynucloetide
atggccttaccagtgaccgccttgctcctgccgctggccttgctgctccacgccgccaggccggaagtgcagctggttgaatctggcggaggactggttcagcctggcggatctctgagactgtcttgtgccgccagcggcttcagcttcagcgacttttggatgagctgggtccgacaggcccctggcaaaggacttgaatgggtcgccacaatcagccaggccggcagcgagaaggactacgtggactctgtgaagggcagattcaccatcagccgggacaacgccaagaagtccctgtacctccagatgaacagcctgagagccgaggacaccgccgtgtactattgtgcctctggcgtgtacagcttcgactacagaggccagggcaccctggtcacagtctcttctggtaccggcggaggcggatctggcggcggaggtagcggtggcggaggatctgaattcgacattgtgatgacccagtctcacaaattcatgtccacatcagtaggagacagggtcagcgtcacctgcaaggccagtcagaatgtgggtaataatgtagcctggtatcaacagaaaccagggcaatctcctaaagtactgatttactcggcatcctaccggtacagtggagtccctgatcgcttcacaggcagtggatctgggacagatttcactctcaccatcagtaatgtgcagtctgaagacttggcagagtatttctgtcagcaatataacacctatccattcacgttcggctcggggacaaagttggaaataaaactcgaggacctgaagaacgtgttcccacctgaggtggccgtgttcgagcctagcgaggccgagatcagccacacccagaaagccaccctcgtgtgcctggctaccggcttctaccccgaccatgtggaactgtcttggtgggtcaacggcaaagaggtgcacagcggcgtgtctaccgacccccagccactgaaagaacagcccgccctgaacgacagccggtactgcctgagcagcagactgagagtgtccgccaccttctggcagaacccccggaaccacttcagatgccaggtgcagttctacggcctgagcgagaacgacgagtggacccaggacagagccaagcccgtgacccagatcgtgtctgccgaagcctggggcagagccgattgcggatcccagagcttcggcctgctggaccccaagctgtgctacctgctggatggcatcctgttcatctacggcgtgatcctgaccgccctgttcctgagagtgaagttcagcagaagcgccgacgcccctgcctaccagcagggacagaaccaactgtacaacgagctgaacctgggcagacgggaagagtacgacgtgctggacaagcggagaggcagggaccctgagatgggcggaaagccccagcggagaaagaacccccaggaaggactgtataacgaactccagaaagacaagatggccgaagcctacagcgagatcggcatgaagggcgagcggagaagaggcaagggccacgatggcctgtaccagggcctgagcaccgccaccaaggacacctatgacgccctgcacatgcaggccctgcctccaagaagggccaagcgatctggatctggagcaacaaacttctcactactcaaacaagcaggtgacgtggaggagaatcccgggcctactagtatggactggatttggcgcatccttttccttgtcggcgctgctaccggcgcgcattccgggccccagctccagctgcaagagtctggacctggcctggtcaagcctagcgagacactgagcctgacctgtaccgtgtccggcgatagcatcagcagcggcgattactactggggctggatcagacagcctcctggcaaaggactggaatggatcggccacatctactacagcggcgtgacctactacaaccccagcctgaagtccagagtgaccatcagcgtggacaccagccggaaccagttctccctgaagctgtctagcgtgacagccgccgataccgccgtgtactactgcaccagagaggacagcagcaactggcggagtagaggccagggaacactggtcacagttagctctggatccggcggaggcggaagtggaggcggaggatctggcggcggaggctctttcgaagaggtacagctggaggaaagcggtggaggactggtgcaacctggagggtctatgaagctctcttgcgtagcttctgggttcacgttctccaattactggatgaactgggtgcggcagtcccccgagaaaggcctggaatgggtagcagaaattcggttcaagtcccataactatgctacacactttgccgagtctgtcaaaggccggttcactattagtcgagacgacagcaagtcttcagtctacctgcagatgaataacttgcgggcagaggacacaggtatctactactgcaccaggagaatcggcaactccgactatgactggtggtactttgacgtctggggagcaggcaccagcgtgacggtgagttcagcctcaacgcgtatccagaaccctgatcctgccgtgtaccagctgcgggatagcaagagcagcgacaagagcgtgtgtctgttcaccgacttcgacagccagaccaacgtgtcccagagcaaggactccgacgtgtacatcaccgataagaccgtgctggacatgcggagcatggacttcaagagcaactccgccgtggcctggtccaacaagtccgatttcgcctgcgccaacgccttcaacaacagcattatccccgaggacacattcttcccaagccccgagagcagctgcggtacccagagttttgggttgttggaccctaaattgtgctatctgttggacggaatcctgttcatttacggagtgatcctgaccgcattgttcctgcgggttaagttttccagatccgcagacgcacccgcttaccaacaagggcagaaccaactctacaatgaacttaatttggggcggagggaagagtacgacgttctggacaaaaggaggggacgagatcccgagatgggcggaaagcctcagcgaaggaagaatccgcaagaggggctttataacgaactccagaaagataaaatggcagaagcctatagtgagattgggatgaagggagaaaggaggaggggtaaaggtcacgatgggttgtaccaaggattgagcacagccactaaagatacctatgatgcgctccacatgcaggccctgccgccaaga

SEQ ID NO: 2752 - DNA, 3264 bp, Artificial Sequence
  Synthetic Polynucloetide
atggccttaccagtgaccgccttgctcctgccgctggccttgctgctccacgccgccaggccggaagtgcagctggttgaatctggcggaggactggttcagcctggcggatctctgagactgtcttgtgccgccagcggcttcagcttcagcgacttttggatgagctgggtccgacaggcccctggcaaaggacttgaatgggtcgccacaatcagccaggccggcagcgagaaggactacgtggactctgtgaagggcagattcaccatcagccgggacaacgccaagaagtccctgtacctccagatgaacagcctgagagccgaggacaccgccgtgtactattgtgcctctggcgtgtacagcttcgactacagaggccagggcaccctggtcacagtctcttctggtaccggcggaggcggatctggcggcggaggtagcggtggcggaggatctgaattcgaccagatcgtgctgacccagtcccccgctattatgtccgcatcaccgggcgaaaaagtgacgatctcctgtagcgcttcatctagcgtctcctacatgtattggtatcaacagaaacctgggtctagcccaaagccgtggatctacagaaccagtaaccttgccagtggggtgccagcccgcttcagcggtagtggcagtggaacttcctatagcctcacaataagcaacatggaggctgaagatgccgctgcctattactgccagcagtaccacagttacccaaccacgttcggcgggggaactaagctcgaagtaaaactcgaggacctgaagaacgtgttcccacctgaggtggccgtgttcgagcctagcgaggccgagatcagccacacccagaaagccaccctcgtgtgcctggctaccggcttctaccccgaccatgtggaactgtcttggtgggtcaacggcaaagaggtgcacagcggcgtgtctaccgacccccagccactgaaagaacagcccgccctgaacgacagccggtactgcctgagcagcagactgagagtgtccgccaccttctggcagaacccccggaaccacttcagatgccaggtgcagttctacggcctgagcgagaacgacgagtggacccaggacagagccaagcccgtgacccagatcgtgtctgccgaagcctggggcagagccgattgcggatcccagagcttcggcctgctggaccccaagctgtgctacctgctggatggcatcctgttcatctacggcgtgatcctgaccgccctgttcctgagagtgaagttcagcagaagcgccgacgcccctgcctaccagcagggacagaaccaactgtacaacgagctgaacctgggcagacgggaagagtacgacgtgctggacaagcggagaggcagggaccctgagatgggcggaaagccccagcggagaaagaacccccaggaaggactgtataacgaactccagaaagacaagatggccgaagcctacagcgagatcggcatgaagggcgagcggagaagaggcaagggccacgatggcctgtaccagggcctgagcaccgccaccaaggacacctatgacgccctgcacatgcaggccctgcctccaagaagggccaagcgatctggatctggagcaacaaacttctcactactcaaacaagcaggtgacgtggaggagaatcccgggcctactagtatggactggatttggcgcatccttttccttgtcggcgctgctaccggcgcgcattccgggccccagctccagctgcaagagtctggacctggcctggtcaagcctagcgagacactgagcctgacctgtaccgtgtccggcgatagcatcagcagcggcgattactactggggctggatcagacagcctcctggcaaaggactggaatggatcggccacatctactacagcggcgtgacctactacaaccccagcctgaagtccagagtgaccatcagcgtggacaccagccggaaccagttctccctgaagctgtctagcgtgacagccgccgataccgccgtgtactactgcaccagagaggacagcagcaactggcggagtagaggccagggaacactggtcacagttagctctggatccggcggaggcggaagtggaggcggaggatctggcggcggaggctctttcgaagaggtgcagctggtggaatctgggggcggcctggtccaacctaagggatcactcaagctctcttgtgcggccagcggattctctttcaatacctatgctatgaattgggtgagacaggcgcccggaaagggcctcgaatggatagcccatatccggtcaaaatcaaacaatttcgcaacctactatgcggactccgtgaaggaccgattttccatctcccgagatgcctccgagaatattctgttcctgcagatgaataacctcaagacagaggacaccgccatgtactactgtgtgcgccagggcggtgactttcccatggattactgggggcaggggaccagcgtgaccgtgagctctacgcgtatccagaaccctgatcctgccgtgtaccagctgcgggatagcaagagcagcgacaagagcgtgtgtctgttcaccgacttcgacagccagaccaacgtgtcccagagcaaggactccgacgtgtacatcaccgataagaccgtgctggacatgcggagcatggacttcaagagcaactccgccgtggcctggtccaacaagtccgatttcgcctgcgccaacgccttcaacaacagcattatccccgaggacacattcttcccaagccccgagagcagctgcggtacccagagttttgggttgttggaccctaaattgtgctatctgttggacggaatcctgttcatttacggagtgatcctgaccgcattgttcctgcgggttaagttttccagatccgcagacgcacccgcttaccaacaagggcagaaccaactctacaatgaacttaatttggggcggagggaagagtacgacgttctggacaaaaggaggggacgagatcccgagatgggcggaaagcctcagcgaaggaagaatccgcaagaggggctttataacgaactccagaaagataaaatggcagaagcctatagtgagattgggatgaagggagaaaggaggaggggtaaaggtcacgatgggttgtaccaaggattgagcacagccactaaagatacctatgatgcgctccacatgcaggccctgccgccaaga

SEQ ID NO: 2753 - DNA, 3261 bp, Artificial Sequence
  Synthetic Polynucloetide
atggccttaccagtgaccgccttgctcctgccgctggccttgctgctccacgccgccaggccggaagtgcagctggttgaatctggcggaggactggttcagcctggcggatctctgagactgtcttgtgccgccagcggcttcagcttcagcgacttttggatgagctgggtccgacaggcccctggcaaaggacttgaatgggtcgccacaatcagccaggccggcagcgagaaggactacgtggactctgtgaagggcagattcaccatcagccgggacaacgccaagaagtccctgtacctccagatgaacagcctgagagccgaggacaccgccgtgtactattgtgcctctggcgtgtacagcttcgactacagaggccagggcaccctggtcacagtctcttctggtaccggcggaggcggatctggcggcggaggtagcggtggcggaggatctgaattcgacgacatccagatgacccagagcagcagcagcttcagcgtgagcctgggcgacagagtgaccatcacctgcatggccagcgaggacatctacatcagactggcctggtaccagcagaagcccggcaacgcccccagactgctgatcagcgccgccaccagcctggagaccggcgtgcccagcagattcagcggcagcggcagcggcaaggactacaccctgagcatcaccagcctgcagaccgaggacgtgggcacctactactgccagcagtactggagcagcccctggaccttcggcggcggcaccaagctggagatcaacctcgaggacctgaagaacgtgttcccacctgaggtggccgtgttcgagcctagcgaggccgagatcagccacacccagaaagccaccctcgtgtgcctggctaccggcttctaccccgaccatgtggaactgtcttggtgggtcaacggcaaagaggtgcacagcggcgtgtctaccgacccccagccactgaaagaacagcccgccctgaacgacagccggtactgcctgagcagcagactgagagtgtccgccaccttctggcagaacccccggaaccacttcagatgccaggtgcagttctacggcctgagcgagaacgacgagtggacccaggacagagccaagcccgtgacccagatcgtgtctgccgaagcctggggcagagccgattgcggatcccagagcttcggcctgctggaccccaagctgtgctacctgctggatggcatcctgttcatctacggcgtgatcctgaccgccctgttcctgagagtgaagttcagcagaagcgccgacgcccctgcctaccagcagggacagaaccaactgtacaacgagctgaacctgggcagacgggaagagtacgacgtgctggacaagcggagaggcagggaccctgagatgggcggaaagccccagcggagaaagaacccccaggaaggactgtataacgaactccagaaagacaagatggccgaagcctacagcgagatcggcatgaagggcgagcggagaagaggcaagggccacgatggcctgtaccagggcctgagcaccgccaccaaggacacctatgacgccctgcacatgcaggccctgcctccaagaagggccaagcgatctggatctggagcaacaaacttctcactactcaaacaagcaggtgacgtggaggagaatcccgggcctactagtatggactggatttggcgcatccttttccttgtcggcgctgctaccggcgcgcattccgggccccagctccagctgcaagagtctggacctggcctggtcaagcctagcgagacactgagcctgacctgtaccgtgtccggcgatagcatcagcagcggcgattactactggggctggatcagacagcctcctggcaaaggactggaatggatcggccacatctactacagcggcgtgacctactacaaccccagcctgaagtccagagtgaccatcagcgtggacaccagccggaaccagttctccctgaagctgtctagcgtgacagccgccgataccgccgtgtactactgcaccagagaggacagcagcaactggcggagtagaggccagggaacactggtcacagttagctctggatccggcggaggcggaagtggaggcggaggatctggcggcggaggctctttcgaagacgtgcagctgcaggagagcggccccggcctggtgaagcccagccagagcctgagcctgacctgcaccgtgaccggctacagcatcaccagcgactacacctggaactggatcagacagttccccggcaacaagctggagtggatgggctacatcacctacagcggcagcaccagctacaaccccagcctgaagagcagaaacagcatcaccagagacaccagcaagaaccagttcttcctgcagctgaacagcgtgaccaccgaggacaccgccacctactactgcgccagactgggcagaagatacacaatggactactggggccagggcaccagcgtgaccgtgagcagcacgcgtatccagaaccctgatcctgccgtgtaccagctgcgggatagcaagagcagcgacaagagcgtgtgtctgttcaccgacttcgacagccagaccaacgtgtcccagagcaaggactccgacgtgtacatcaccgataagaccgtgctggacatgcggagcatggacttcaagagcaactccgccgtggcctggtccaacaagtccgatttcgcctgcgccaacgccttcaacaacagcattatccccgaggacacattcttcccaagccccgagagcagctgcggtacccagagttttgggttgttggaccctaaattgtgctatctgttggacggaatcctgttcatttacggagtgatcctgaccgcattgttcctgcgggttaagttttccagatccgcagacgcacccgcttaccaacaagggcagaaccaactctacaatgaacttaatttggggcggagggaagagtacgacgttctggacaaaaggaggggacgagatcccgagatgggcggaaagcctcagcgaaggaagaatccgcaagaggggctttataacgaactccagaaagataaaatggcagaagcctatagtgagattgggatgaagggagaaaggaggaggggtaaaggtcacgatgggttgtaccaaggattgagcacagccactaaagatacctatgatgcgctccacatgcaggccctgccgccaaga

SEQ ID NO: 2754 - DNA, 3270 bp, Artificial Sequence
  Synthetic Polynucloetide
atggccttaccagtgaccgccttgctcctgccgctggccttgctgctccacgccgccaggccggaagtgcagctggttgaatctggcggaggactggttcagcctggcggatctctgagactgtcttgtgccgccagcggcttcagcttcagcgacttttggatgagctgggtccgacaggcccctggcaaaggacttgaatgggtcgccacaatcagccaggccggcagcgagaaggactacgtggactctgtgaagggcagattcaccatcagccgggacaacgccaagaagtccctgtacctccagatgaacagcctgagagccgaggacaccgccgtgtactattgtgcctctggcgtgtacagcttcgactacagaggccagggcaccctggtcacagtctcttctggtaccggcggaggcggatctggcggcggaggtagcggtggcggaggatctgaattcgacgacatccagatgacccagagccccagcagcctgtctgccagcgtgggcgacagagtgaccatcacctgtagagccagccagagcatcagcagctacctgaactggtatcagcagaagcccggcaaggcccccaaactgctgatctacgacgccagcaacctggaaaccggcgtgcccagcagattttccggcagcggctctggcaccgacttcaccttcaccatcagctccctccagcccgaggacattgccacctactactgccagcagtacgacaacctgcccctgacctttggcggaggcaccaaggtggacatcaagagactcgaggacctgaagaacgtgttcccacctgaggtggccgtgttcgagcctagcgaggccgagatcagccacacccagaaagccaccctcgtgtgcctggctaccggcttctaccccgaccatgtggaactgtcttggtgggtcaacggcaaagaggtgcacagcggcgtgtctaccgacccccagccactgaaagaacagcccgccctgaacgacagccggtactgcctgagcagcagactgagagtgtccgccaccttctggcagaacccccggaaccacttcagatgccaggtgcagttctacggcctgagcgagaacgacgagtggacccaggacagagccaagcccgtgacccagatcgtgtctgccgaagcctggggcagagccgattgcggatcccagagcttcggcctgctggaccccaagctgtgctacctgctggatggcatcctgttcatctacggcgtgatcctgaccgccctgttcctgagagtgaagttcagcagaagcgccgacgcccctgcctaccagcagggacagaaccaactgtacaacgagctgaacctgggcagacgggaagagtacgacgtgctggacaagcggagaggcagggaccctgagatgggcggaaagccccagcggagaaagaacccccaggaaggactgtataacgaactccagaaagacaagatggccgaagcctacagcgagatcggcatgaagggcgagcggagaagaggcaagggccacgatggcctgtaccagggcctgagcaccgccaccaaggacacctatgacgccctgcacatgcaggccctgcctccaagaagggccaagcgatctggatctggagcaacaaacttctcactactcaaacaagcaggtgacgtggaggagaatcccgggcctactagtatggactggatttggcgcatccttttccttgtcggcgctgctaccggcgcgcattccgggccccagctccagctgcaagagtctggacctggcctggtcaagcctagcgagacactgagcctgacctgtaccgtgtccggcgatagcatcagcagcggcgattactactggggctggatcagacagcctcctggcaaaggactggaatggatcggccacatctactacagcggcgtgacctactacaaccccagcctgaagtccagagtgaccatcagcgtggacaccagccggaaccagttctccctgaagctgtctagcgtgacagccgccgataccgccgtgtactactgcaccagagaggacagcagcaactggcggagtagaggccagggaacactggtcacagttagctctggatccggcggaggcggaagtggaggcggaggatctggcggcggaggctctttcgaacaggtgcaactggtggaatctggcggcggagtggtgcagcctggcagaagcctgagactgagctgtgccgccagcggcttcacctttagcagctacgccatgcactgggtgcgccaggcccctggaaaaggcctggaatgggtggccgtgatctcctacgacggctccaacaagtattacgccgacagcgtgaagggccggttcaccatctccagagacaacagcaagaacaccctgtacctccagatgaacagcctgcgggccgaggacaccgccgtgtactattgtgccagggctcacaacagcagctcttggagcttcgactactggggccagggcaccctcgtgaccgtgtcatctacgcgtatccagaaccctgatcctgccgtgtaccagctgcgggatagcaagagcagcgacaagagcgtgtgtctgttcaccgacttcgacagccagaccaacgtgtcccagagcaaggactccgacgtgtacatcaccgataagaccgtgctggacatgcggagcatggacttcaagagcaactccgccgtggcctggtccaacaagtccgatttcgcctgcgccaacgccttcaacaacagcattatccccgaggacacattcttcccaagccccgagagcagctgcggtacccagagttttgggttgttggaccctaaattgtgctatctgttggacggaatcctgttcatttacggagtgatcctgaccgcattgttcctgcgggttaagttttccagatccgcagacgcacccgcttaccaacaagggcagaaccaactctacaatgaacttaatttggggcggagggaagagtacgacgttctggacaaaaggaggggacgagatcccgagatgggcggaaagcctcagcgaaggaagaatccgcaagaggggctttataacgaactccagaaagataaaatggcagaagcctatagtgagattgggatgaagggagaaaggaggaggggtaaaggtcacgatgggttgtaccaaggattgagcacagccactaaagatacctatgatgcgctccacatgcaggccctgccgccaaga

SEQ ID NO: 2755 - DNA, 3297 bp, Artificial Sequence
  Synthetic Polynucloetide
atggccttaccagtgaccgccttgctcctgccgctggccttgctgctccacgccgccaggccggaagtgcagctggttgaatctggcggaggactggttcagcctggcggatctctgagactgtcttgtgccgccagcggcttcagcttcagcgacttttggatgagctgggtccgacaggcccctggcaaaggacttgaatgggtcgccacaatcagccaggccggcagcgagaaggactacgtggactctgtgaagggcagattcaccatcagccgggacaacgccaagaagtccctgtacctccagatgaacagcctgagagccgaggacaccgccgtgtactattgtgcctctggcgtgtacagcttcgactacagaggccagggcaccctggtcacagtctcttctggtaccggcggaggcggatctggcggcggaggtagcggtggcggaggatctgaattcgacgacgtcgtgatgacccagagccctctgagcctgcctgtgtccctgggcgatcaggccagcatctcctgcagatccagccagagactggtgcacagcaacggcaacacctacctgcactggtatctgcagaagcccggccagagccccaagctgctgatctaccgggtgtccaacagattccccggcgtgcccgatagattcagcggctctggcagcggcaccgacttcaccctgaagatcagccgggtggaagccgaggacctgggcatctatttctgcagccagagcacccacgtgccctacacctttggcggaggcaccaagctggaaatcaagcggctcgaggacctgaagaacgtgttcccacctgaggtggccgtgttcgagcctagcgaggccgagatcagccacacccagaaagccaccctcgtgtgcctggctaccggcttctaccccgaccatgtggaactgtcttggtgggtcaacggcaaagaggtgcacagcggcgtgtctaccgacccccagccactgaaagaacagcccgccctgaacgacagccggtactgcctgagcagcagactgagagtgtccgccaccttctggcagaacccccggaaccacttcagatgccaggtgcagttctacggcctgagcgagaacgacgagtggacccaggacagagccaagcccgtgacccagatcgtgtctgccgaagcctggggcagagccgattgcggatcccagagcttcggcctgctggaccccaagctgtgctacctgctggatggcatcctgttcatctacggcgtgatcctgaccgccctgttcctgagagtgaagttcagcagaagcgccgacgcccctgcctaccagcagggacagaaccaactgtacaacgagctgaacctgggcagacgggaagagtacgacgtgctggacaagcggagaggcagggaccctgagatgggcggaaagccccagcggagaaagaacccccaggaaggactgtataacgaactccagaaagacaagatggccgaagcctacagcgagatcggcatgaagggcgagcggagaagaggcaagggccacgatggcctgtaccagggcctgagcaccgccaccaaggacacctatgacgccctgcacatgcaggccctgcctccaagaagggccaagcgatctggatctggagcaacaaacttctcactactcaaacaagcaggtgacgtggaggagaatcccgggcctactagtatggactggatttggcgcatccttttccttgtcggcgctgctaccggcgcgcattccgggccccagctccagctgcaagagtctggacctggcctggtcaagcctagcgagacactgagcctgacctgtaccgtgtccggcgatagcatcagcagcggcgattactactggggctggatcagacagcctcctggcaaaggactggaatggatcggccacatctactacagcggcgtgacctactacaaccccagcctgaagtccagagtgaccatcagcgtggacaccagccggaaccagttctccctgaagctgtctagcgtgacagccgccgataccgccgtgtactactgcaccagagaggacagcagcaactggcggagtagaggccagggaacactggtcacagttagctctggatccggcggaggcggaagtggaggcggaggatctggcggcggaggctctttcgaagaagtgcggctgcagcagtctggccccgacctgattaagcctggggccagcgtgaagatgagctgcaaggccagcggctacaccttcaccggctacgtgatgcactgggtcaagcagaggccaggccagggcctggaatggatcggcttcatcaacccctacaacgacgacatccagagcaacgagcggttccggggcaaggccaccctgaccagcgataagagcagcaccaccgcctacatggaactgagcagcctgacctccgaggacagcgccgtgtactactgtgctaggggagccggctacaacttcgacggggcctacagattcttcgacttttggggccagggcaccacactgaccgtgtcctctacgcgtatccagaaccctgatcctgccgtgtaccagctgcgggatagcaagagcagcgacaagagcgtgtgtctgttcaccgacttcgacagccagaccaacgtgtcccagagcaaggactccgacgtgtacatcaccgataagaccgtgctggacatgcggagcatggacttcaagagcaactccgccgtggcctggtccaacaagtccgatttcgcctgcgccaacgccttcaacaacagcattatccccgaggacacattcttcccaagccccgagagcagctgcggtacccagagttttgggttgttggaccctaaattgtgctatctgttggacggaatcctgttcatttacggagtgatcctgaccgcattgttcctgcgggttaagttttccagatccgcagacgcacccgcttaccaacaagggcagaaccaactctacaatgaacttaatttggggcggagggaagagtacgacgttctggacaaaaggaggggacgagatcccgagatgggcggaaagcctcagcgaaggaagaatccgcaagaggggctttataacgaactccagaaagataaaatggcagaagcctatagtgagattgggatgaagggagaaaggaggaggggtaaaggtcacgatgggttgtaccaaggattgagcacagccactaaagatacctatgatgcgctccacatgcaggccctgccgccaaga

SEQ ID NO: 2756 - DNA, 3270 bp, Artificial Sequence
  Synthetic Polynucloetide
atggccttaccagtgaccgccttgctcctgccgctggccttgctgctccacgccgccaggccggaagtgcagctggttgaatctggcggaggactggttcagcctggcggatctctgagactgtcttgtgccgccagcggcttcagcttcagcgacttttggatgagctgggtccgacaggcccctggcaaaggacttgaatgggtcgccacaatcagccaggccggcagcgagaaggactacgtggactctgtgaagggcagattcaccatcagccgggacaacgccaagaagtccctgtacctccagatgaacagcctgagagccgaggacaccgccgtgtactattgtgcctctggcgtgtacagcttcgactacagaggccagggcaccctggtcacagtctcttctggtaccggcggaggcggatctggcggcggaggtagcggtggcggaggatctgaattcgacagctacgagctgacccagcctcctagcgtgtccgtgtctcctggacagaccgccaccatctcttgcagcggcgatcaactgggcgggaagtacggccactggtatcagaagaagcccggccagagccccgtgctggtgctgtaccaggacagaaaacggcctgccggcatccccgagagattcagcggaagcagcagcggcaacaccatcaccctgaccatcagcggcacccaggccgtggatgaggccgactactactgccaggcttgggacaccaatctgggcggcgtgttcggcggaggcaccaaagtgacagtgctgggacagctcgaggacctgaagaacgtgttcccacctgaggtggccgtgttcgagcctagcgaggccgagatcagccacacccagaaagccaccctcgtgtgcctggctaccggcttctaccccgaccatgtggaactgtcttggtgggtcaacggcaaagaggtgcacagcggcgtgtctaccgacccccagccactgaaagaacagcccgccctgaacgacagccggtactgcctgagcagcagactgagagtgtccgccaccttctggcagaacccccggaaccacttcagatgccaggtgcagttctacggcctgagcgagaacgacgagtggacccaggacagagccaagcccgtgacccagatcgtgtctgccgaagcctggggcagagccgattgcggatcccagagcttcggcctgctggaccccaagctgtgctacctgctggatggcatcctgttcatctacggcgtgatcctgaccgccctgttcctgagagtgaagttcagcagaagcgccgacgcccctgcctaccagcagggacagaaccaactgtacaacgagctgaacctgggcagacgggaagagtacgacgtgctggacaagcggagaggcagggaccctgagatgggcggaaagccccagcggagaaagaacccccaggaaggactgtataacgaactccagaaagacaagatggccgaagcctacagcgagatcggcatgaagggcgagcggagaagaggcaagggccacgatggcctgtaccagggcctgagcaccgccaccaaggacacctatgacgccctgcacatgcaggccctgcctccaagaagggccaagcgatctggatctggagcaacaaacttctcactactcaaacaagcaggtgacgtggaggagaatcccgggcctactagtatggactggatttggcgcatccttttccttgtcggcgctgctaccggcgcgcattccgggccccagctccagctgcaagagtctggacctggcctggtcaagcctagcgagacactgagcctgacctgtaccgtgtccggcgatagcatcagcagcggcgattactactggggctggatcagacagcctcctggcaaaggactggaatggatcggccacatctactacagcggcgtgacctactacaaccccagcctgaagtccagagtgaccatcagcgtggacaccagccggaaccagttctccctgaagctgtctagcgtgacagccgccgataccgccgtgtactactgcaccagagaggacagcagcaactggcggagtagaggccagggaacactggtcacagttagctctggatccggcggaggcggaagtggaggcggaggatctggcggcggaggctctttcgaacaggtgcaactggtggaaagcggagccgaagtgaagaaacctggggccagcgtgaaggtgtcctgcaaggccagcggctacacctttaccggctactacatgcactgggtgcgccaggctccaggccagggactggaatggatgggccggatcaaccccaatagcggcggcaccaactacgcccagaaattccagggcagagtgaccatgaccagagacaccagcatcagcaccgcctacatggaactgagccggctgagaagcgacgacaccgccgtgtactactgcgccagccctagaggcagaggcagcgccttcgatatttggggccagggcacactcgtgaccgtgtcctctacgcgtatccagaaccctgatcctgccgtgtaccagctgcgggatagcaagagcagcgacaagagcgtgtgtctgttcaccgacttcgacagccagaccaacgtgtcccagagcaaggactccgacgtgtacatcaccgataagaccgtgctggacatgcggagcatggacttcaagagcaactccgccgtggcctggtccaacaagtccgatttcgcctgcgccaacgccttcaacaacagcattatccccgaggacacattcttcccaagccccgagagcagctgcggtacccagagttttgggttgttggaccctaaattgtgctatctgttggacggaatcctgttcatttacggagtgatcctgaccgcattgttcctgcgggttaagttttccagatccgcagacgcacccgcttaccaacaagggcagaaccaactctacaatgaacttaatttggggcggagggaagagtacgacgttctggacaaaaggaggggacgagatcccgagatgggcggaaagcctcagcgaaggaagaatccgcaagaggggctttataacgaactccagaaagataaaatggcagaagcctatagtgagattgggatgaagggagaaaggaggaggggtaaaggtcacgatgggttgtaccaaggattgagcacagccactaaagatacctatgatgcgctccacatgcaggccctgccgccaaga

SEQ ID NO: 2757 - DNA, 3279 bp, Artificial Sequence
  Synthetic Polynucloetide
atggccttaccagtgaccgccttgctcctgccgctggccttgctgctccacgccgccaggccggaagtgcagctggttgaatctggcggaggactggttcagcctggcggatctctgagactgtcttgtgccgccagcggcttcagcttcagcgacttttggatgagctgggtccgacaggcccctggcaaaggacttgaatgggtcgccacaatcagccaggccggcagcgagaaggactacgtggactctgtgaagggcagattcaccatcagccgggacaacgccaagaagtccctgtacctccagatgaacagcctgagagccgaggacaccgccgtgtactattgtgcctctggcgtgtacagcttcgactacagaggccagggcaccctggtcacagtctcttctggtaccggcggaggcggatctggcggcggaggtagcggtggcggaggatctgaattcgacaacttcatgctgacccagccccacagcgtgtccgagagccctggcaagaccgtgaccatctcctgcaccagaagcagcggctctatcgccagcaaatacgtgcagtggtatcagcagaggcccggcagcagccctaccaccgtgatctacgaggacaaccagaggcctagcggcgtgcccgatagattcagcggcagcatcgacaccagcagcaacagcgccagcctgaccatcagcggcctgagaacagaggacgaggccgactactactgccacagctacgacagcaacaaccactccgtgttcggcggaggcaccaaagtgacagtgctgggacagctcgaggacctgaagaacgtgttcccacctgaggtggccgtgttcgagcctagcgaggccgagatcagccacacccagaaagccaccctcgtgtgcctggctaccggcttctaccccgaccatgtggaactgtcttggtgggtcaacggcaaagaggtgcacagcggcgtgtctaccgacccccagccactgaaagaacagcccgccctgaacgacagccggtactgcctgagcagcagactgagagtgtccgccaccttctggcagaacccccggaaccacttcagatgccaggtgcagttctacggcctgagcgagaacgacgagtggacccaggacagagccaagcccgtgacccagatcgtgtctgccgaagcctggggcagagccgattgcggatcccagagcttcggcctgctggaccccaagctgtgctacctgctggatggcatcctgttcatctacggcgtgatcctgaccgccctgttcctgagagtgaagttcagcagaagcgccgacgcccctgcctaccagcagggacagaaccaactgtacaacgagctgaacctgggcagacgggaagagtacgacgtgctggacaagcggagaggcagggaccctgagatgggcggaaagccccagcggagaaagaacccccaggaaggactgtataacgaactccagaaagacaagatggccgaagcctacagcgagatcggcatgaagggcgagcggagaagaggcaagggccacgatggcctgtaccagggcctgagcaccgccaccaaggacacctatgacgccctgcacatgcaggccctgcctccaagaagggccaagcgatctggatctggagcaacaaacttctcactactcaaacaagcaggtgacgtggaggagaatcccgggcctactagtatggactggatttggcgcatccttttccttgtcggcgctgctaccggcgcgcattccgggccccagctccagctgcaagagtctggacctggcctggtcaagcctagcgagacactgagcctgacctgtaccgtgtccggcgatagcatcagcagcggcgattactactggggctggatcagacagcctcctggcaaaggactggaatggatcggccacatctactacagcggcgtgacctactacaaccccagcctgaagtccagagtgaccatcagcgtggacaccagccggaaccagttctccctgaagctgtctagcgtgacagccgccgataccgccgtgtactactgcaccagagaggacagcagcaactggcggagtagaggccagggaacactggtcacagttagctctggatccggcggaggcggaagtggaggcggaggatctggcggcggaggctctttcgaagaagtgcaactggtggaaagcgggggaggcgtggtgcagccaggcggatctctgagactgagctgtgccgccagcggcttcaccttcagcagctacgccatgagctgggtgcgccaggcccctggaaaaggcctggaatgggtgtccgccatctctggctctggcggcagcacctactacgccgatagcgtgaagggccggttcagcatcagccgggacaacagcaagaacaccctgtacctccagatgaacagcctgcgggccgaggacaccgccgtgtactactgtgccagaaccagaagctccggggccttcgacatctggggccagggaacactcgtgaccgtgtcctctacgcgtatccagaaccctgatcctgccgtgtaccagctgcgggatagcaagagcagcgacaagagcgtgtgtctgttcaccgacttcgacagccagaccaacgtgtcccagagcaaggactccgacgtgtacatcaccgataagaccgtgctggacatgcggagcatggacttcaagagcaactccgccgtggcctggtccaacaagtccgatttcgcctgcgccaacgccttcaacaacagcattatccccgaggacacattcttcccaagccccgagagcagctgcggtacccagagttttgggttgttggaccctaaattgtgctatctgttggacggaatcctgttcatttacggagtgatcctgaccgcattgttcctgcgggttaagttttccagatccgcagacgcacccgcttaccaacaagggcagaaccaactctacaatgaacttaatttggggcggagggaagagtacgacgttctggacaaaaggaggggacgagatcccgagatgggcggaaagcctcagcgaaggaagaatccgcaagaggggctttataacgaactccagaaagataaaatggcagaagcctatagtgagattgggatgaagggagaaaggaggaggggtaaaggtcacgatgggttgtaccaaggattgagcacagccactaaagatacctatgatgcgctccacatgcaggccctgccgccaaga

SEQ ID NO: 2758 - DNA, 3264 bp, Artificial Sequence
  Synthetic Polynucloetide
atggccttaccagtgaccgccttgctcctgccgctggccttgctgctccacgccgccaggccggaagtgcagctggttgaatctggcggaggactggttcagcctggcggatctctgagactgtcttgtgccgccagcggcttcagcttcagcgacttttggatgagctgggtccgacaggcccctggcaaaggacttgaatgggtcgccacaatcagccaggccggcagcgagaaggactacgtggactctgtgaagggcagattcaccatcagccgggacaacgccaagaagtccctgtacctccagatgaacagcctgagagccgaggacaccgccgtgtactattgtgcctctggcgtgtacagcttcgactacagaggccagggcaccctggtcacagtctcttctggtaccggcggaggcggatctggcggcggaggtagcggtggcggaggatctgaattcgacatccagatgaaccagagccccagcagcctgagcgccagcctgggcgataccatcaccatcacctgtcacgccagccagaacatcaacgtgtggctgagctggtatcagcagaagcccggcaacatccccaagctgctgatctacaaggccagcaacctgcacaccggcgtgcccagcagattttctggcagcggctctggcaccggcttcaccattaccatcagctccctccagcccgaggacattgccacctactactgccagcagggccagagctacccctggacatttggcggaggcaccaagctggaaatcaagagactcgaggacctgaagaacgtgttcccacctgaggtggccgtgttcgagcctagcgaggccgagatcagccacacccagaaagccaccctcgtgtgcctggctaccggcttctaccccgaccatgtggaactgtcttggtgggtcaacggcaaagaggtgcacagcggcgtgtctaccgacccccagccactgaaagaacagcccgccctgaacgacagccggtactgcctgagcagcagactgagagtgtccgccaccttctggcagaacccccggaaccacttcagatgccaggtgcagttctacggcctgagcgagaacgacgagtggacccaggacagagccaagcccgtgacccagatcgtgtctgccgaagcctggggcagagccgattgcggatcccagagcttcggcctgctggaccccaagctgtgctacctgctggatggcatcctgttcatctacggcgtgatcctgaccgccctgttcctgagagtgaagttcagcagaagcgccgacgcccctgcctaccagcagggacagaaccaactgtacaacgagctgaacctgggcagacgggaagagtacgacgtgctggacaagcggagaggcagggaccctgagatgggcggaaagccccagcggagaaagaacccccaggaaggactgtataacgaactccagaaagacaagatggccgaagcctacagcgagatcggcatgaagggcgagcggagaagaggcaagggccacgatggcctgtaccagggcctgagcaccgccaccaaggacacctatgacgccctgcacatgcaggccctgcctccaagaagggccaagcgatctggatctggagcaacaaacttctcactactcaaacaagcaggtgacgtggaggagaatcccgggcctactagtatggactggatttggcgcatccttttccttgtcggcgctgctaccggcgcgcattccgggccccagctccagctgcaagagtctggacctggcctggtcaagcctagcgagacactgagcctgacctgtaccgtgtccggcgatagcatcagcagcggcgattactactggggctggatcagacagcctcctggcaaaggactggaatggatcggccacatctactacagcggcgtgacctactacaaccccagcctgaagtccagagtgaccatcagcgtggacaccagccggaaccagttctccctgaagctgtctagcgtgacagccgccgataccgccgtgtactactgcaccagagaggacagcagcaactggcggagtagaggccagggaacactggtcacagttagctctggatccggcggaggcggaagtggaggcggaggatctggcggcggaggctctttcgaagaagtgcaactccagcagagcggcccagagcttgtgaagcctggcgcttccgtgaagattagctgcaaagccagcggctacagcttcaccggctacttcatgaactgggtcaagcagagccacggcaagagcctggagtacatcggcagattcaacccctacaacggcgagacactgtacaaccagaagttcaagggcaaggccaccctgaccgtggacaagagcagcagcaccgtgcacatggaactgctgagcgtgaccagcgaggacagcgccgtgtactactgtggcagaagcggcaacgacgacgctatggactattggggccagggcaccagcgtgaccgtgtctagtgctacgcgtatccagaaccctgatcctgccgtgtaccagctgcgggatagcaagagcagcgacaagagcgtgtgtctgttcaccgacttcgacagccagaccaacgtgtcccagagcaaggactccgacgtgtacatcaccgataagaccgtgctggacatgcggagcatggacttcaagagcaactccgccgtggcctggtccaacaagtccgatttcgcctgcgccaacgccttcaacaacagcattatccccgaggacacattcttcccaagccccgagagcagctgcggtacccagagttttgggttgttggaccctaaattgtgctatctgttggacggaatcctgttcatttacggagtgatcctgaccgcattgttcctgcgggttaagttttccagatccgcagacgcacccgcttaccaacaagggcagaaccaactctacaatgaacttaatttggggcggagggaagagtacgacgttctggacaaaaggaggggacgagatcccgagatgggcggaaagcctcagcgaaggaagaatccgcaagaggggctttataacgaactccagaaagataaaatggcagaagcctatagtgagattgggatgaagggagaaaggaggaggggtaaaggtcacgatgggttgtaccaaggattgagcacagccactaaagatacctatgatgcgctccacatgcaggccctgccgccaaga

SEQ ID NO: 2759 - DNA, 3267 bp, Artificial Sequence
  Synthetic Polynucloetide
atggccttaccagtgaccgccttgctcctgccgctggccttgctgctccacgccgccaggccggaagtgcagctggttgaatctggcggaggactggttcagcctggcggatctctgagactgtcttgtgccgccagcggcttcagcttcagcgacttttggatgagctgggtccgacaggcccctggcaaaggacttgaatgggtcgccacaatcagccaggccggcagcgagaaggactacgtggactctgtgaagggcagattcaccatcagccgggacaacgccaagaagtccctgtacctccagatgaacagcctgagagccgaggacaccgccgtgtactattgtgcctctggcgtgtacagcttcgactacagaggccagggcaccctggtcacagtctcttctggtaccggcggaggcggatctggcggcggaggtagcggtggcggaggatctgaattcgagatcgtgctgacacagagccctgccaccctgtctctgagccctggcgaaagagccaccctgagctgtagagccagccagagcgtgcggagctacctggcctggtatcagcagaagcctggacaggcccccagactgctgatctacgacgccagcaatcgggccacaggcatccccgccagattttctggctctggcagcggcaccgacttcaccctgacaatcagcagcctggaacccgaggacttcgccgtgtactactgccagcagcggagcaactggccccctacctttggacagggcaccaaggtggaaatcaagctcgaggacctgaagaacgtgttcccacctgaggtggccgtgttcgagcctagcgaggccgagatcagccacacccagaaagccaccctcgtgtgcctggctaccggcttctaccccgaccatgtggaactgtcttggtgggtcaacggcaaagaggtgcacagcggcgtgtctaccgacccccagccactgaaagaacagcccgccctgaacgacagccggtactgcctgagcagcagactgagagtgtccgccaccttctggcagaacccccggaaccacttcagatgccaggtgcagttctacggcctgagcgagaacgacgagtggacccaggacagagccaagcccgtgacccagatcgtgtctgccgaagcctggggcagagccgattgcggatcccagagcttcggcctgctggaccccaagctgtgctacctgctggatggcatcctgttcatctacggcgtgatcctgaccgccctgttcctgagagtgaagttcagcagaagcgccgacgcccctgcctaccagcagggacagaaccaactgtacaacgagctgaacctgggcagacgggaagagtacgacgtgctggacaagcggagaggcagggaccctgagatgggcggaaagccccagcggagaaagaacccccaggaaggactgtataacgaactccagaaagacaagatggccgaagcctacagcgagatcggcatgaagggcgagcggagaagaggcaagggccacgatggcctgtaccagggcctgagcaccgccaccaaggacacctatgacgccctgcacatgcaggccctgcctccaagaagggccaagcgatctggatctggagcaacaaacttctcactactcaaacaagcaggtgacgtggaggagaatcccgggcctactagtatggactggatttggcgcatccttttccttgtcggcgctgctaccggcgcgcattccgggccccagctccagctgcaagagtctggacctggcctggtcaagcctagcgagacactgagcctgacctgtaccgtgtccggcgatagcatcagcagcggcgattactactggggctggatcagacagcctcctggcaaaggactggaatggatcggccacatctactacagcggcgtgacctactacaaccccagcctgaagtccagagtgaccatcagcgtggacaccagccggaaccagttctccctgaagctgtctagcgtgacagccgccgataccgccgtgtactactgcaccagagaggacagcagcaactggcggagtagaggccagggaacactggtcacagttagctctggatccggcggaggcggaagtggaggcggaggatctggcggcggaggctctttcgaacaactccaggtgcaggaatctggccccggactcgtgaagcccagcgagacactgagcctgacctgtaccgtgtccggcggcagcatcagcaacagctacttctcctggggctggatcagacagccccctggcaagggcctggaatggatcggcagcttctactacggcgagaaaacctactacaaccccagcctgaagtccagagccaccatcagcatcgacaccagcaagagccagttctccctgaagctgagcagcgtgacagccgccgacaccgccgtgtattattgccccagaggccccaccatgatccggggcgtgatcgactcttggggccagggaacactcgtgaccgtgtcctctacgcgtatccagaaccctgatcctgccgtgtaccagctgcgggatagcaagagcagcgacaagagcgtgtgtctgttcaccgacttcgacagccagaccaacgtgtcccagagcaaggactccgacgtgtacatcaccgataagaccgtgctggacatgcggagcatggacttcaagagcaactccgccgtggcctggtccaacaagtccgatttcgcctgcgccaacgccttcaacaacagcattatccccgaggacacattcttcccaagccccgagagcagctgcggtacccagagttttgggttgttggaccctaaattgtgctatctgttggacggaatcctgttcatttacggagtgatcctgaccgcattgttcctgcgggttaagttttccagatccgcagacgcacccgcttaccaacaagggcagaaccaactctacaatgaacttaatttggggcggagggaagagtacgacgttctggacaaaaggaggggacgagatcccgagatgggcggaaagcctcagcgaaggaagaatccgcaagaggggctttataacgaactccagaaagataaaatggcagaagcctatagtgagattgggatgaagggagaaaggaggaggggtaaaggtcacgatgggttgtaccaaggattgagcacagccactaaagatacctatgatgcgctccacatgcaggccctgccgccaaga

SEQ ID NO: 2760 - DNA, 3294 bp, Artificial Sequence
  Synthetic Polynucloetide
atggccttaccagtgaccgccttgctcctgccgctggccttgctgctccacgccgccaggccggaagtgcagctggttgaatctggcggaggactggttcagcctggcggatctctgagactgtcttgtgccgccagcggcttcagcttcagcgacttttggatgagctgggtccgacaggcccctggcaaaggacttgaatgggtcgccacaatcagccaggccggcagcgagaaggactacgtggactctgtgaagggcagattcaccatcagccgggacaacgccaagaagtccctgtacctccagatgaacagcctgagagccgaggacaccgccgtgtactattgtgcctctggcgtgtacagcttcgactacagaggccagggcaccctggtcacagtctcttctggtaccggcggaggcggatctggcggcggaggtagcggtggcggaggatctgaattcgacatcgtgatgacccagacccccctgagcctgcctgtgacacctggcgagcctgccagcatctcctgcagaagcagcagaagcctgctggacagcgacgacggcaacacctacctggactggtatctgcagaaacccggccagagcccccaactgctgatctacaccctgagctacagagccagcggcgtgcccgatagattttccggctctggcagcggcaccgacttcaccctgaagatcagccgggtggaagccgaggacgtgggcgtgtactactgtatgcagcgggtggaatttcccatcaccttcggccagggcaccagactggaaatcaagagactcgaggacctgaagaacgtgttcccacctgaggtggccgtgttcgagcctagcgaggccgagatcagccacacccagaaagccaccctcgtgtgcctggctaccggcttctaccccgaccatgtggaactgtcttggtgggtcaacggcaaagaggtgcacagcggcgtgtctaccgacccccagccactgaaagaacagcccgccctgaacgacagccggtactgcctgagcagcagactgagagtgtccgccaccttctggcagaacccccggaaccacttcagatgccaggtgcagttctacggcctgagcgagaacgacgagtggacccaggacagagccaagcccgtgacccagatcgtgtctgccgaagcctggggcagagccgattgcggatcccagagcttcggcctgctggaccccaagctgtgctacctgctggatggcatcctgttcatctacggcgtgatcctgaccgccctgttcctgagagtgaagttcagcagaagcgccgacgcccctgcctaccagcagggacagaaccaactgtacaacgagctgaacctgggcagacgggaagagtacgacgtgctggacaagcggagaggcagggaccctgagatgggcggaaagccccagcggagaaagaacccccaggaaggactgtataacgaactccagaaagacaagatggccgaagcctacagcgagatcggcatgaagggcgagcggagaagaggcaagggccacgatggcctgtaccagggcctgagcaccgccaccaaggacacctatgacgccctgcacatgcaggccctgcctccaagaagggccaagcgatctggatctggagcaacaaacttctcactactcaaacaagcaggtgacgtggaggagaatcccgggcctactagtatggactggatttggcgcatccttttccttgtcggcgctgctaccggcgcgcattccgggccccagctccagctgcaagagtctggacctggcctggtcaagcctagcgagacactgagcctgacctgtaccgtgtccggcgatagcatcagcagcggcgattactactggggctggatcagacagcctcctggcaaaggactggaatggatcggccacatctactacagcggcgtgacctactacaaccccagcctgaagtccagagtgaccatcagcgtggacaccagccggaaccagttctccctgaagctgtctagcgtgacagccgccgataccgccgtgtactactgcaccagagaggacagcagcaactggcggagtagaggccagggaacactggtcacagttagctctggatccggcggaggcggaagtggaggcggaggatctggcggcggaggctctttcgaacaggtgcaactggtggaatctggcgggggagtggtgcagcctggcagatccctgagactgagctgtgccgccagcggcttcatcttcagcagatacggaatgcactgggtgcgccaggcccctggcaagggactgaaatgggtggccgtgatttggtacgacggcagcaacaagctgtacgccgacagcgtgaagggccggttcaccatcagcagagacaacagcaagaacaccctgtacctgcagatgaacagcctgcgggccgaggacaccgccgtgtactattgcgccagagactactacgacaacagccggcaccactggggcttcgactattggggccagggaacccttgtgaccgtgtcctctacgcgtatccagaaccctgatcctgccgtgtaccagctgcgggatagcaagagcagcgacaagagcgtgtgtctgttcaccgacttcgacagccagaccaacgtgtcccagagcaaggactccgacgtgtacatcaccgataagaccgtgctggacatgcggagcatggacttcaagagcaactccgccgtggcctggtccaacaagtccgatttcgcctgcgccaacgccttcaacaacagcattatccccgaggacacattcttcccaagccccgagagcagctgcggtacccagagttttgggttgttggaccctaaattgtgctatctgttggacggaatcctgttcatttacggagtgatcctgaccgcattgttcctgcgggttaagttttccagatccgcagacgcacccgcttaccaacaagggcagaaccaactctacaatgaacttaatttggggcggagggaagagtacgacgttctggacaaaaggaggggacgagatcccgagatgggcggaaagcctcagcgaaggaagaatccgcaagaggggctttataacgaactccagaaagataaaatggcagaagcctatagtgagattgggatgaagggagaaaggaggaggggtaaaggtcacgatgggttgtaccaaggattgagcacagccactaaagatacctatgatgcgctccacatgcaggccctgccgccaaga

SEQ ID NO: 2761 - DNA, 3264 bp, Artificial Sequence
  Synthetic Polynucloetide
atggccttaccagtgaccgccttgctcctgccgctggccttgctgctccacgccgccaggccggaagtgcagctggttgaatctggcggaggactggttcagcctggcggatctctgagactgtcttgtgccgccagcggcttcagcttcagcgacttttggatgagctgggtccgacaggcccctggcaaaggacttgaatgggtcgccacaatcagccaggccggcagcgagaaggactacgtggactctgtgaagggcagattcaccatcagccgggacaacgccaagaagtccctgtacctccagatgaacagcctgagagccgaggacaccgccgtgtactattgtgcctctggcgtgtacagcttcgactacagaggccagggcaccctggtcacagtctcttctggtaccggcggaggcggatctggcggcggaggtagcggtggcggaggatctgaattcgagatccagatgacccagagccccagcagcatgtctgccagcctgggcgacaccatcaccatcacatgccaggccacccaggacatcttcaagaacctgaactggtatcagcagaagcccggcaagccccccagcctgctgatctactatgccaccgaactggccgagggcgtgcccagcagattttctggcagcggcagcggctccgactacagcctgaccatcagcaacctggaaagcgaggacttcgccgcctactactgcctccagttcttcgagttcccattcaccttcggctccggcaccaagctggaaatgaagctcgaggacctgaagaacgtgttcccacctgaggtggccgtgttcgagcctagcgaggccgagatcagccacacccagaaagccaccctcgtgtgcctggctaccggcttctaccccgaccatgtggaactgtcttggtgggtcaacggcaaagaggtgcacagcggcgtgtctaccgacccccagccactgaaagaacagcccgccctgaacgacagccggtactgcctgagcagcagactgagagtgtccgccaccttctggcagaacccccggaaccacttcagatgccaggtgcagttctacggcctgagcgagaacgacgagtggacccaggacagagccaagcccgtgacccagatcgtgtctgccgaagcctggggcagagccgattgcggatcccagagcttcggcctgctggaccccaagctgtgctacctgctggatggcatcctgttcatctacggcgtgatcctgaccgccctgttcctgagagtgaagttcagcagaagcgccgacgcccctgcctaccagcagggacagaaccaactgtacaacgagctgaacctgggcagacgggaagagtacgacgtgctggacaagcggagaggcagggaccctgagatgggcggaaagccccagcggagaaagaacccccaggaaggactgtataacgaactccagaaagacaagatggccgaagcctacagcgagatcggcatgaagggcgagcggagaagaggcaagggccacgatggcctgtaccagggcctgagcaccgccaccaaggacacctatgacgccctgcacatgcaggccctgcctccaagaagggccaagcgatctggatctggagcaacaaacttctcactactcaaacaagcaggtgacgtggaggagaatcccgggcctactagtatggactggatttggcgcatccttttccttgtcggcgctgctaccggcgcgcattccgggccccagctccagctgcaagagtctggacctggcctggtcaagcctagcgagacactgagcctgacctgtaccgtgtccggcgatagcatcagcagcggcgattactactggggctggatcagacagcctcctggcaaaggactggaatggatcggccacatctactacagcggcgtgacctactacaaccccagcctgaagtccagagtgaccatcagcgtggacaccagccggaaccagttctccctgaagctgtctagcgtgacagccgccgataccgccgtgtactactgcaccagagaggacagcagcaactggcggagtagaggccagggaacactggtcacagttagctctggatccggcggaggcggaagtggaggcggaggatctggcggcggaggctctttcgaacaggtgcaactccagcagtctggcgctgagcttgtgcggcctggcacctctgtgaaggtgtcctgtaaagccagcggctacgtgttcaccaactactggatcgagtggatcaagcagcggccaggccagggcctggaatggatcggcgtgatgaatccaggcagcggcgagacaacctacaacgagaagttcaagggcaaggccaccctgaccgccgacaagagcagcagcacagcctacatgcaactgtcctccctgaccagcgtggacagcgccgtgtacttctgcgccagggaccacgaccgggactactacgctatggactactggggccagggcaccagcgtgaccgtgtcatctacgcgtatccagaaccctgatcctgccgtgtaccagctgcgggatagcaagagcagcgacaagagcgtgtgtctgttcaccgacttcgacagccagaccaacgtgtcccagagcaaggactccgacgtgtacatcaccgataagaccgtgctggacatgcggagcatggacttcaagagcaactccgccgtggcctggtccaacaagtccgatttcgcctgcgccaacgccttcaacaacagcattatccccgaggacacattcttcccaagccccgagagcagctgcggtacccagagttttgggttgttggaccctaaattgtgctatctgttggacggaatcctgttcatttacggagtgatcctgaccgcattgttcctgcgggttaagttttccagatccgcagacgcacccgcttaccaacaagggcagaaccaactctacaatgaacttaatttggggcggagggaagagtacgacgttctggacaaaaggaggggacgagatcccgagatgggcggaaagcctcagcgaaggaagaatccgcaagaggggctttataacgaactccagaaagataaaatggcagaagcctatagtgagattgggatgaagggagaaaggaggaggggtaaaggtcacgatgggttgtaccaaggattgagcacagccactaaagatacctatgatgcgctccacatgcaggccctgccgccaaga

SEQ ID NO: 2762 - DNA, 3255 bp, Artificial Sequence
  Synthetic Polynucloetide
atggccttaccagtgaccgccttgctcctgccgctggccttgctgctccacgccgccaggccggaagtgcagctggttgaatctggcggaggactggttcagcctggcggatctctgagactgtcttgtgccgccagcggcttcagcttcagcgacttttggatgagctgggtccgacaggcccctggcaaaggacttgaatgggtcgccacaatcagccaggccggcagcgagaaggactacgtggactctgtgaagggcagattcaccatcagccgggacaacgccaagaagtccctgtacctccagatgaacagcctgagagccgaggacaccgccgtgtactattgtgcctctggcgtgtacagcttcgactacagaggccagggcaccctggtcacagtctcttctggtaccggcggaggcggatctggcggcggaggtagcggtggcggaggatctgaattcgacatcctgctgacacagagccccgccatcctgtccgtgtctccaggcgagagagtgtcctttagctgccgggccagccagaacatcggcaccagcatccactggtatcagcagcggaccaacggcagccccagactgctgattaagtacgccagcgagtccgtgtccggcatccccagcagattttctggcagcggctccggcaccgacttcaccctgagcatcaacagcgtggaaagcgaggacattgccgactactactgccagcacaccaatagctggcccaccacctttggcggaggcaccaagctggaaatcaagagactcgaggacctgaagaacgtgttcccacctgaggtggccgtgttcgagcctagcgaggccgagatcagccacacccagaaagccaccctcgtgtgcctggctaccggcttctaccccgaccatgtggaactgtcttggtgggtcaacggcaaagaggtgcacagcggcgtgtctaccgacccccagccactgaaagaacagcccgccctgaacgacagccggtactgcctgagcagcagactgagagtgtccgccaccttctggcagaacccccggaaccacttcagatgccaggtgcagttctacggcctgagcgagaacgacgagtggacccaggacagagccaagcccgtgacccagatcgtgtctgccgaagcctggggcagagccgattgcggatcccagagcttcggcctgctggaccccaagctgtgctacctgctggatggcatcctgttcatctacggcgtgatcctgaccgccctgttcctgagagtgaagttcagcagaagcgccgacgcccctgcctaccagcagggacagaaccaactgtacaacgagctgaacctgggcagacgggaagagtacgacgtgctggacaagcggagaggcagggaccctgagatgggcggaaagccccagcggagaaagaacccccaggaaggactgtataacgaactccagaaagacaagatggccgaagcctacagcgagatcggcatgaagggcgagcggagaagaggcaagggccacgatggcctgtaccagggcctgagcaccgccaccaaggacacctatgacgccctgcacatgcaggccctgcctccaagaagggccaagcgatctggatctggagcaacaaacttctcactactcaaacaagcaggtgacgtggaggagaatcccgggcctactagtatggactggatttggcgcatccttttccttgtcggcgctgctaccggcgcgcattccgggccccagctccagctgcaagagtctggacctggcctggtcaagcctagcgagacactgagcctgacctgtaccgtgtccggcgatagcatcagcagcggcgattactactggggctggatcagacagcctcctggcaaaggactggaatggatcggccacatctactacagcggcgtgacctactacaaccccagcctgaagtccagagtgaccatcagcgtggacaccagccggaaccagttctccctgaagctgtctagcgtgacagccgccgataccgccgtgtactactgcaccagagaggacagcagcaactggcggagtagaggccagggaacactggtcacagttagctctggatccggcggaggcggaagtggaggcggaggatctggcggcggaggctctttcgaacaggtgcaactccagcagtccgacgccgagcttgtgaagcctggcgcttccgtgaagattagctgcaaggccagcggctacaccttcaccgaccacgccattcactgggtcaagcagaagcccgagcagggcctggaatggatcggctacttcagccccggcaacggcgacatcaagtacaacgagaagttcaagggcaaggccaccctgaccgccgacaagagcagcagcacagcctacatgcaactgaacagcctgaccagcgaggactccgccgtgtacttctgcaagcggagctacggcaactacgactactggggccagggcaccacactgaccgtgtctagtacgcgtatccagaaccctgatcctgccgtgtaccagctgcgggatagcaagagcagcgacaagagcgtgtgtctgttcaccgacttcgacagccagaccaacgtgtcccagagcaaggactccgacgtgtacatcaccgataagaccgtgctggacatgcggagcatggacttcaagagcaactccgccgtggcctggtccaacaagtccgatttcgcctgcgccaacgccttcaacaacagcattatccccgaggacacattcttcccaagccccgagagcagctgcggtacccagagttttgggttgttggaccctaaattgtgctatctgttggacggaatcctgttcatttacggagtgatcctgaccgcattgttcctgcgggttaagttttccagatccgcagacgcacccgcttaccaacaagggcagaaccaactctacaatgaacttaatttggggcggagggaagagtacgacgttctggacaaaaggaggggacgagatcccgagatgggcggaaagcctcagcgaaggaagaatccgcaagaggggctttataacgaactccagaaagataaaatggcagaagcctatagtgagattgggatgaagggagaaaggaggaggggtaaaggtcacgatgggttgtaccaaggattgagcacagccactaaagatacctatgatgcgctccacatgcaggccctgccgccaaga

SEQ ID NO: 2763 - DNA, 3270 bp, Artificial Sequence
  Synthetic Polynucloetide
atggccttaccagtgaccgccttgctcctgccgctggccttgctgctccacgccgccaggccggaagtgcagctggttgaatctggcggaggactggttcagcctggcggatctctgagactgtcttgtgccgccagcggcttcagcttcagcgacttttggatgagctgggtccgacaggcccctggcaaaggacttgaatgggtcgccacaatcagccaggccggcagcgagaaggactacgtggactctgtgaagggcagattcaccatcagccgggacaacgccaagaagtccctgtacctccagatgaacagcctgagagccgaggacaccgccgtgtactattgtgcctctggcgtgtacagcttcgactacagaggccagggcaccctggtcacagtctcttctggtaccggcggaggcggatctggcggcggaggtagcggtggcggaggatctgaattcgacatcgtgatgacccagagccccgatagcctggccgtgtctctgggagagagagccaccatcaactgcaagagcagccagagcctgctgaacagcggcgaccagaagaactacctgacctggtatcagcagaagcccggccagccccccaagctgctgatctactgggccagcaccagagaaagcggcgtgcccgatagattcagcggcagcggaagtggcaccgacttcaccctgaccatcagttctcttcaggccgaggacgtggccgtgtactactgccagaacgactacagctaccccctgaccttcggccagggcaccaaggtggaaatcaagctcgaggacctgaagaacgtgttcccacctgaggtggccgtgttcgagcctagcgaggccgagatcagccacacccagaaagccaccctcgtgtgcctggctaccggcttctaccccgaccatgtggaactgtcttggtgggtcaacggcaaagaggtgcacagcggcgtgtctaccgacccccagccactgaaagaacagcccgccctgaacgacagccggtactgcctgagcagcagactgagagtgtccgccaccttctggcagaacccccggaaccacttcagatgccaggtgcagttctacggcctgagcgagaacgacgagtggacccaggacagagccaagcccgtgacccagatcgtgtctgccgaagcctggggcagagccgattgcggatcccagagcttcggcctgctggaccccaagctgtgctacctgctggatggcatcctgttcatctacggcgtgatcctgaccgccctgttcctgagagtgaagttcagcagaagcgccgacgcccctgcctaccagcagggacagaaccaactgtacaacgagctgaacctgggcagacgggaagagtacgacgtgctggacaagcggagaggcagggaccctgagatgggcggaaagccccagcggagaaagaacccccaggaaggactgtataacgaactccagaaagacaagatggccgaagcctacagcgagatcggcatgaagggcgagcggagaagaggcaagggccacgatggcctgtaccagggcctgagcaccgccaccaaggacacctatgacgccctgcacatgcaggccctgcctccaagaagggccaagcgatctggatctggagcaacaaacttctcactactcaaacaagcaggtgacgtggaggagaatcccgggcctactagtatggactggatttggcgcatccttttccttgtcggcgctgctaccggcgcgcattccgggccccagctccagctgcaagagtctggacctggcctggtcaagcctagcgagacactgagcctgacctgtaccgtgtccggcgatagcatcagcagcggcgattactactggggctggatcagacagcctcctggcaaaggactggaatggatcggccacatctactacagcggcgtgacctactacaaccccagcctgaagtccagagtgaccatcagcgtggacaccagccggaaccagttctccctgaagctgtctagcgtgacagccgccgataccgccgtgtactactgcaccagagaggacagcagcaactggcggagtagaggccagggaacactggtcacagttagctctggatccggcggaggcggaagtggaggcggaggatctggcggcggaggctctttcgaacaggtgcagctggtgcagtctggggccgaagtgaagaaaaccggcagcagcgtgaaggtgtcctgcaaggccagcggctacacctttaccgaccacgccattcacgtgtggcggcaggctccaggacaggccctggaatggatgggccacttcagccccggcaacaccgacatcaagtacaacgacaagttcaagggcagagtgaccctgaccgtggaccgcagcatgagcaccgcctacatggaactgagcagcctgcggagcgaggacaccgccatgtactattgcaagaccagcaccttctttttcgactactggggccagggaacaatggtcaccgtgtccagcacgcgtatccagaaccctgatcctgccgtgtaccagctgcgggatagcaagagcagcgacaagagcgtgtgtctgttcaccgacttcgacagccagaccaacgtgtcccagagcaaggactccgacgtgtacatcaccgataagaccgtgctggacatgcggagcatggacttcaagagcaactccgccgtggcctggtccaacaagtccgatttcgcctgcgccaacgccttcaacaacagcattatccccgaggacacattcttcccaagccccgagagcagctgcggtacccagagttttgggttgttggaccctaaattgtgctatctgttggacggaatcctgttcatttacggagtgatcctgaccgcattgttcctgcgggttaagttttccagatccgcagacgcacccgcttaccaacaagggcagaaccaactctacaatgaacttaatttggggcggagggaagagtacgacgttctggacaaaaggaggggacgagatcccgagatgggcggaaagcctcagcgaaggaagaatccgcaagaggggctttataacgaactccagaaagataaaatggcagaagcctatagtgagattgggatgaagggagaaaggaggaggggtaaaggtcacgatgggttgtaccaaggattgagcacagccactaaagatacctatgatgcgctccacatgcaggccctgccgccaaga

SEQ ID NO: 2764 - DNA, 3267 bp, Artificial Sequence
  Synthetic Polynucloetide
atggccttaccagtgaccgccttgctcctgccgctggccttgctgctccacgccgccaggccggaagtgcagctggttgaatctggcggaggactggttcagcctggcggatctctgagactgtcttgtgccgccagcggcttcagcttcagcgacttttggatgagctgggtccgacaggcccctggcaaaggacttgaatgggtcgccacaatcagccaggccggcagcgagaaggactacgtggactctgtgaagggcagattcaccatcagccgggacaacgccaagaagtccctgtacctccagatgaacagcctgagagccgaggacaccgccgtgtactattgtgcctctggcgtgtacagcttcgactacagaggccagggcaccctggtcacagtctcttctggtaccggcggaggcggatctggcggcggaggtagcggtggcggaggatctgaattcgacatccagatgacccagagccccagcagcctgtctgccagcgtgggcgacagagtgaccatcacatgcaaggccagccaggacgtgtccattgccgtggcctggtatcagcagaagcccggcaaggcccccaaggtgctgatctacagcgccagctacagatacaccggcgtgcccgacagattcagcggctctggcagcggcaccgacttcaccttcaccatcagctccctccagcccgaggatattgccgtgtactactgccagcagcactacatcacccccctgacctttggcggaggcaccaaggtggaaatcaagctcgaggacctgaagaacgtgttcccacctgaggtggccgtgttcgagcctagcgaggccgagatcagccacacccagaaagccaccctcgtgtgcctggctaccggcttctaccccgaccatgtggaactgtcttggtgggtcaacggcaaagaggtgcacagcggcgtgtctaccgacccccagccactgaaagaacagcccgccctgaacgacagccggtactgcctgagcagcagactgagagtgtccgccaccttctggcagaacccccggaaccacttcagatgccaggtgcagttctacggcctgagcgagaacgacgagtggacccaggacagagccaagcccgtgacccagatcgtgtctgccgaagcctggggcagagccgattgcggatcccagagcttcggcctgctggaccccaagctgtgctacctgctggatggcatcctgttcatctacggcgtgatcctgaccgccctgttcctgagagtgaagttcagcagaagcgccgacgcccctgcctaccagcagggacagaaccaactgtacaacgagctgaacctgggcagacgggaagagtacgacgtgctggacaagcggagaggcagggaccctgagatgggcggaaagccccagcggagaaagaacccccaggaaggactgtataacgaactccagaaagacaagatggccgaagcctacagcgagatcggcatgaagggcgagcggagaagaggcaagggccacgatggcctgtaccagggcctgagcaccgccaccaaggacacctatgacgccctgcacatgcaggccctgcctccaagaagggccaagcgatctggatctggagcaacaaacttctcactactcaaacaagcaggtgacgtggaggagaatcccgggcctactagtatggactggatttggcgcatccttttccttgtcggcgctgctaccggcgcgcattccgggccccagctccagctgcaagagtctggacctggcctggtcaagcctagcgagacactgagcctgacctgtaccgtgtccggcgatagcatcagcagcggcgattactactggggctggatcagacagcctcctggcaaaggactggaatggatcggccacatctactacagcggcgtgacctactacaaccccagcctgaagtccagagtgaccatcagcgtggacaccagccggaaccagttctccctgaagctgtctagcgtgacagccgccgataccgccgtgtactactgcaccagagaggacagcagcaactggcggagtagaggccagggaacactggtcacagttagctctggatccggcggaggcggaagtggaggcggaggatctggcggcggaggctctttcgaacagatccaactggtgcagagcggccacgaagtgaagaaacctggggccagcgtgaaggtgtcctgcaaagccagcggctacacctttaccaactacggcatgaactgggtgcgccaggcccctggacagggcctggaatggatgggctggatcaacaccaagaccggcgagcccacctacgccgaagagttcaagggcagattcgtgttcagcctggaaaccagcgcctccaccgcctacctccagatcagctctctgaaggccgaggacaccgccatgtacttttgcggcagaggcggctacggcagcagctactggtacttcgatgtgtggggccagggcaccaccgtgaccgtgtcatctacgcgtatccagaaccctgatcctgccgtgtaccagctgcgggatagcaagagcagcgacaagagcgtgtgtctgttcaccgacttcgacagccagaccaacgtgtcccagagcaaggactccgacgtgtacatcaccgataagaccgtgctggacatgcggagcatggacttcaagagcaactccgccgtggcctggtccaacaagtccgatttcgcctgcgccaacgccttcaacaacagcattatccccgaggacacattcttcccaagccccgagagcagctgcggtacccagagttttgggttgttggaccctaaattgtgctatctgttggacggaatcctgttcatttacggagtgatcctgaccgcattgttcctgcgggttaagttttccagatccgcagacgcacccgcttaccaacaagggcagaaccaactctacaatgaacttaatttggggcggagggaagagtacgacgttctggacaaaaggaggggacgagatcccgagatgggcggaaagcctcagcgaaggaagaatccgcaagaggggctttataacgaactccagaaagataaaatggcagaagcctatagtgagattgggatgaagggagaaaggaggaggggtaaaggtcacgatgggttgtaccaaggattgagcacagccactaaagatacctatgatgcgctccacatgcaggccctgccgccaaga

SEQ ID NO: 2765 - DNA, 3273 bp, Artificial Sequence
  Synthetic Polynucloetide
atggccttaccagtgaccgccttgctcctgccgctggccttgctgctccacgccgccaggccggaagtgcagctggttgaatctggcggaggactggttcagcctggcggatctctgagactgtcttgtgccgccagcggcttcagcttcagcgacttttggatgagctgggtccgacaggcccctggcaaaggacttgaatgggtcgccacaatcagccaggccggcagcgagaaggactacgtggactctgtgaagggcagattcaccatcagccgggacaacgccaagaagtccctgtacctccagatgaacagcctgagagccgaggacaccgccgtgtactattgtgcctctggcgtgtacagcttcgactacagaggccagggcaccctggtcacagtctcttctggtaccggcggaggcggatctggcggcggaggtagcggtggcggaggatctgaattcgacatcgtgatgacccagagccccgatagcctggccgtgtctctgggagagagagccaccatcaactgccgggccagcaagagcgtgtccaccagcggctacagctacatgcactggtatcagcagaagcccggccagccccccaagctgctgatctacctggcctccaacctggaaagcggcgtgcccgatagattcagcggcagcggctctggcaccgacttcaccctgaccatcagttctcttcaggccgaggacgtggccgtgtactactgccagcacagcagagagctgccctacaccttcggccagggcaccaagctggaaatcaagctcgaggacctgaagaacgtgttcccacctgaggtggccgtgttcgagcctagcgaggccgagatcagccacacccagaaagccaccctcgtgtgcctggctaccggcttctaccccgaccatgtggaactgtcttggtgggtcaacggcaaagaggtgcacagcggcgtgtctaccgacccccagccactgaaagaacagcccgccctgaacgacagccggtactgcctgagcagcagactgagagtgtccgccaccttctggcagaacccccggaaccacttcagatgccaggtgcagttctacggcctgagcgagaacgacgagtggacccaggacagagccaagcccgtgacccagatcgtgtctgccgaagcctggggcagagccgattgcggatcccagagcttcggcctgctggaccccaagctgtgctacctgctggatggcatcctgttcatctacggcgtgatcctgaccgccctgttcctgagagtgaagttcagcagaagcgccgacgcccctgcctaccagcagggacagaaccaactgtacaacgagctgaacctgggcagacgggaagagtacgacgtgctggacaagcggagaggcagggaccctgagatgggcggaaagccccagcggagaaagaacccccaggaaggactgtataacgaactccagaaagacaagatggccgaagcctacagcgagatcggcatgaagggcgagcggagaagaggcaagggccacgatggcctgtaccagggcctgagcaccgccaccaaggacacctatgacgccctgcacatgcaggccctgcctccaagaagggccaagcgatctggatctggagcaacaaacttctcactactcaaacaagcaggtgacgtggaggagaatcccgggcctactagtatggactggatttggcgcatccttttccttgtcggcgctgctaccggcgcgcattccgggccccagctccagctgcaagagtctggacctggcctggtcaagcctagcgagacactgagcctgacctgtaccgtgtccggcgatagcatcagcagcggcgattactactggggctggatcagacagcctcctggcaaaggactggaatggatcggccacatctactacagcggcgtgacctactacaaccccagcctgaagtccagagtgaccatcagcgtggacaccagccggaaccagttctccctgaagctgtctagcgtgacagccgccgataccgccgtgtactactgcaccagagaggacagcagcaactggcggagtagaggccagggaacactggtcacagttagctctggatccggcggaggcggaagtggaggcggaggatctggcggcggaggctctttcgaacaggtgcaactccaggaatctggccctggccttgtgaagcccagcgagacactgagcctgacctgtaccgtgtccggcggcagcatcagctcttacggcgtgcactggattcggcagcctccaggcaagggcctggaatggatcggcgtgatctggacctccggcgtgaccgactacaacagcgccctgatgggcagagtgaccatctccgtggacaccagcaagaaccagttcagcctgaagctgagcagcgtgacagccgccgataccgccgtgtattattgcgccagagatggcgactacgaccgctacacaatggactactggggccagggaacccttgtgaccgtgtcctctacgcgtatccagaaccctgatcctgccgtgtaccagctgcgggatagcaagagcagcgacaagagcgtgtgtctgttcaccgacttcgacagccagaccaacgtgtcccagagcaaggactccgacgtgtacatcaccgataagaccgtgctggacatgcggagcatggacttcaagagcaactccgccgtggcctggtccaacaagtccgatttcgcctgcgccaacgccttcaacaacagcattatccccgaggacacattcttcccaagccccgagagcagctgcggtacccagagttttgggttgttggaccctaaattgtgctatctgttggacggaatcctgttcatttacggagtgatcctgaccgcattgttcctgcgggttaagttttccagatccgcagacgcacccgcttaccaacaagggcagaaccaactctacaatgaacttaatttggggcggagggaagagtacgacgttctggacaaaaggaggggacgagatcccgagatgggcggaaagcctcagcgaaggaagaatccgcaagaggggctttataacgaactccagaaagataaaatggcagaagcctatagtgagattgggatgaagggagaaaggaggaggggtaaaggtcacgatgggttgtaccaaggattgagcacagccactaaagatacctatgatgcgctccacatgcaggccctgccgccaaga

SEQ ID NO: 2766 - DNA, 3273 bp, Artificial Sequence
  Synthetic Polynucloetide
atggccttaccagtgaccgccttgctcctgccgctggccttgctgctccacgccgccaggccggaagtgcagctggttgaatctggcggaggactggttcagcctggcggatctctgagactgtcttgtgccgccagcggcttcagcttcagcgacttttggatgagctgggtccgacaggcccctggcaaaggacttgaatgggtcgccacaatcagccaggccggcagcgagaaggactacgtggactctgtgaagggcagattcaccatcagccgggacaacgccaagaagtccctgtacctccagatgaacagcctgagagccgaggacaccgccgtgtactattgtgcctctggcgtgtacagcttcgactacagaggccagggcaccctggtcacagtctcttctggtaccggcggaggcggatctggcggcggaggtagcggtggcggaggatctgaattcgacatccagatgacccagagccccagcagcctgtctgccagcgtgggcgacagagtgaccatcacctgtagagccagccagagcatcggcaccagcctgcactggtatcagcagaagcctggcaaggcccccaagctgctgattaagttcgccagcagactgcagagcggcgtgcccagcagattttctggcagcggctccggcaccgacttcaccctgacaatcagctccctgcagcccgaggacttcgccacctactactgccagcagagccccggcttccctccaacctttggacagggcaccaagctggaaatcaagcggctcgaggacctgaagaacgtgttcccacctgaggtggccgtgttcgagcctagcgaggccgagatcagccacacccagaaagccaccctcgtgtgcctggctaccggcttctaccccgaccatgtggaactgtcttggtgggtcaacggcaaagaggtgcacagcggcgtgtctaccgacccccagccactgaaagaacagcccgccctgaacgacagccggtactgcctgagcagcagactgagagtgtccgccaccttctggcagaacccccggaaccacttcagatgccaggtgcagttctacggcctgagcgagaacgacgagtggacccaggacagagccaagcccgtgacccagatcgtgtctgccgaagcctggggcagagccgattgcggatcccagagcttcggcctgctggaccccaagctgtgctacctgctggatggcatcctgttcatctacggcgtgatcctgaccgccctgttcctgagagtgaagttcagcagaagcgccgacgcccctgcctaccagcagggacagaaccaactgtacaacgagctgaacctgggcagacgggaagagtacgacgtgctggacaagcggagaggcagggaccctgagatgggcggaaagccccagcggagaaagaacccccaggaaggactgtataacgaactccagaaagacaagatggccgaagcctacagcgagatcggcatgaagggcgagcggagaagaggcaagggccacgatggcctgtaccagggcctgagcaccgccaccaaggacacctatgacgccctgcacatgcaggccctgcctccaagaagggccaagcgatctggatctggagcaacaaacttctcactactcaaacaagcaggtgacgtggaggagaatcccgggcctactagtatggactggatttggcgcatccttttccttgtcggcgctgctaccggcgcgcattccgggccccagctccagctgcaagagtctggacctggcctggtcaagcctagcgagacactgagcctgacctgtaccgtgtccggcgatagcatcagcagcggcgattactactggggctggatcagacagcctcctggcaaaggactggaatggatcggccacatctactacagcggcgtgacctactacaaccccagcctgaagtccagagtgaccatcagcgtggacaccagccggaaccagttctccctgaagctgtctagcgtgacagccgccgataccgccgtgtactactgcaccagagaggacagcagcaactggcggagtagaggccagggaacactggtcacagttagctctggatccggcggaggcggaagtggaggcggaggatctggcggcggaggctctttcgaacaggtgcaactggtggaatctggcggcggacttgtgaagccaggcggcagcctgagactgagctgtgccgccagcggcttcagcatcaccaccagcggctactactggacctggatcagacagttccccggcaagggcctggaatggatgggctacatcggctacaacagcaagacctactacaaccccgccctgaagtcccggatcaccatcagcagagacaacgccaagaacagcctgtacctgcagatgaactccctgagagccgaggataccgccgtgtactactgcgccagatccctgtacggcggctacaaggacgccttcgatagctggggccagggaacccttgtgaccgtgtctagcacgcgtatccagaaccctgatcctgccgtgtaccagctgcgggatagcaagagcagcgacaagagcgtgtgtctgttcaccgacttcgacagccagaccaacgtgtcccagagcaaggactccgacgtgtacatcaccgataagaccgtgctggacatgcggagcatggacttcaagagcaactccgccgtggcctggtccaacaagtccgatttcgcctgcgccaacgccttcaacaacagcattatccccgaggacacattcttcccaagccccgagagcagctgcggtacccagagttttgggttgttggaccctaaattgtgctatctgttggacggaatcctgttcatttacggagtgatcctgaccgcattgttcctgcgggttaagttttccagatccgcagacgcacccgcttaccaacaagggcagaaccaactctacaatgaacttaatttggggcggagggaagagtacgacgttctggacaaaaggaggggacgagatcccgagatgggcggaaagcctcagcgaaggaagaatccgcaagaggggctttataacgaactccagaaagataaaatggcagaagcctatagtgagattgggatgaagggagaaaggaggaggggtaaaggtcacgatgggttgtaccaaggattgagcacagccactaaagatacctatgatgcgctccacatgcaggccctgccgccaaga

SEQ ID NO: 2767 - DNA, 3288 bp, Artificial Sequence
  Synthetic Polynucloetide
atggccttaccagtgaccgccttgctcctgccgctggccttgctgctccacgccgccaggccggaagtgcagctggttgaatctggcggaggactggttcagcctggcggatctctgagactgtcttgtgccgccagcggcttcagcttcagcgacttttggatgagctgggtccgacaggcccctggcaaaggacttgaatgggtcgccacaatcagccaggccggcagcgagaaggactacgtggactctgtgaagggcagattcaccatcagccgggacaacgccaagaagtccctgtacctccagatgaacagcctgagagccgaggacaccgccgtgtactattgtgcctctggcgtgtacagcttcgactacagaggccagggcaccctggtcacagtctcttctggtaccggcggaggcggatctggcggcggaggtagcggtggcggaggatctgaattcgacgagatcgtgctgacccagagccctctgagcctgcctgtgacacctggcgagcctgccagcatctcctgtagaagcagccagagcctgctgcacagcatcggctacaactacctggactggtatctccagaagcccggccagagcccccaactgctgatctacctgggcagcaacagagccagcggcgtgcccgatagattttccggcagcggctccggcaccgacttcaccctgaagatcagccgggtggaagccgaggacgtgggcgtgtactactgtatgcaggccctccagacccccctgacctttggcggaggcaccaaggtggaaatcaagcggctcgaggacctgaagaacgtgttcccacctgaggtggccgtgttcgagcctagcgaggccgagatcagccacacccagaaagccaccctcgtgtgcctggctaccggcttctaccccgaccatgtggaactgtcttggtgggtcaacggcaaagaggtgcacagcggcgtgtctaccgacccccagccactgaaagaacagcccgccctgaacgacagccggtactgcctgagcagcagactgagagtgtccgccaccttctggcagaacccccggaaccacttcagatgccaggtgcagttctacggcctgagcgagaacgacgagtggacccaggacagagccaagcccgtgacccagatcgtgtctgccgaagcctggggcagagccgattgcggatcccagagcttcggcctgctggaccccaagctgtgctacctgctggatggcatcctgttcatctacggcgtgatcctgaccgccctgttcctgagagtgaagttcagcagaagcgccgacgcccctgcctaccagcagggacagaaccaactgtacaacgagctgaacctgggcagacgggaagagtacgacgtgctggacaagcggagaggcagggaccctgagatgggcggaaagccccagcggagaaagaacccccaggaaggactgtataacgaactccagaaagacaagatggccgaagcctacagcgagatcggcatgaagggcgagcggagaagaggcaagggccacgatggcctgtaccagggcctgagcaccgccaccaaggacacctatgacgccctgcacatgcaggccctgcctccaagaagggccaagcgatctggatctggagcaacaaacttctcactactcaaacaagcaggtgacgtggaggagaatcccgggcctactagtatggactggatttggcgcatccttttccttgtcggcgctgctaccggcgcgcattccgggccccagctccagctgcaagagtctggacctggcctggtcaagcctagcgagacactgagcctgacctgtaccgtgtccggcgatagcatcagcagcggcgattactactggggctggatcagacagcctcctggcaaaggactggaatggatcggccacatctactacagcggcgtgacctactacaaccccagcctgaagtccagagtgaccatcagcgtggacaccagccggaaccagttctccctgaagctgtctagcgtgacagccgccgataccgccgtgtactactgcaccagagaggacagcagcaactggcggagtagaggccagggaacactggtcacagttagctctggatccggcggaggcggaagtggaggcggaggatctggcggcggaggctctttcgaagaagtgcaactggtggaaagcggaggcggcgtggtgcagcctggaagaagcctgagactgagctgtgccgccagcggcttcaccttccggtcctacggaatgcactgggtgcgccaggcccctggcaaaggactggaatgggtggccgtgatctcctacgacggctccaacaagtactacaccgacagcgtgaacggcagattcaccatcagcagagacaacagcaagaacaccctgtacctccagatgaacagcctgcgggccgaggacaccgccgtgtactattgtgctagaggcggaggctactacgagacaagcggccctgattactggggccagggcacactcgtgaccgtgtctagtacgcgtatccagaaccctgatcctgccgtgtaccagctgcgggatagcaagagcagcgacaagagcgtgtgtctgttcaccgacttcgacagccagaccaacgtgtcccagagcaaggactccgacgtgtacatcaccgataagaccgtgctggacatgcggagcatggacttcaagagcaactccgccgtggcctggtccaacaagtccgatttcgcctgcgccaacgccttcaacaacagcattatccccgaggacacattcttcccaagccccgagagcagctgcggtacccagagttttgggttgttggaccctaaattgtgctatctgttggacggaatcctgttcatttacggagtgatcctgaccgcattgttcctgcgggttaagttttccagatccgcagacgcacccgcttaccaacaagggcagaaccaactctacaatgaacttaatttggggcggagggaagagtacgacgttctggacaaaaggaggggacgagatcccgagatgggcggaaagcctcagcgaaggaagaatccgcaagaggggctttataacgaactccagaaagataaaatggcagaagcctatagtgagattgggatgaagggagaaaggaggaggggtaaaggtcacgatgggttgtaccaaggattgagcacagccactaaagatacctatgatgcgctccacatgcaggccctgccgccaaga

SEQ ID NO: 2768 - DNA, 3282 bp, Artificial Sequence
  Synthetic Polynucloetide
atggccttaccagtgaccgccttgctcctgccgctggccttgctgctccacgccgccaggccggaagtgcagctggttgaatctggcggaggactggttcagcctggcggatctctgagactgtcttgtgccgccagcggcttcagcttcagcgacttttggatgagctgggtccgacaggcccctggcaaaggacttgaatgggtcgccacaatcagccaggccggcagcgagaaggactacgtggactctgtgaagggcagattcaccatcagccgggacaacgccaagaagtccctgtacctccagatgaacagcctgagagccgaggacaccgccgtgtactattgtgcctctggcgtgtacagcttcgactacagaggccagggcaccctggtcacagtctcttctggtaccggcggaggcggatctggcggcggaggtagcggtggcggaggatctgaattcgacgacgtcgtgatgacccagagccctctgagcctgcctgtgacacctggcgagcctgccagcatctcctgtagaagcagccagagcctgctgcacagcatcggctacaactacctgcactggtttctccagaagcccggccagagcccccaactgctgatctacctgggcagcaacagagccagcggcgtgcccgatagattttccggcagcggctccggcaccgacttcaccctgaagatcagccgggtggaagccgaggacgtgggcgtgtactactgtatgcaggccctccagacccctcccacctttggacagggcaccagactggaaatcaagcggctcgaggacctgaagaacgtgttcccacctgaggtggccgtgttcgagcctagcgaggccgagatcagccacacccagaaagccaccctcgtgtgcctggctaccggcttctaccccgaccatgtggaactgtcttggtgggtcaacggcaaagaggtgcacagcggcgtgtctaccgacccccagccactgaaagaacagcccgccctgaacgacagccggtactgcctgagcagcagactgagagtgtccgccaccttctggcagaacccccggaaccacttcagatgccaggtgcagttctacggcctgagcgagaacgacgagtggacccaggacagagccaagcccgtgacccagatcgtgtctgccgaagcctggggcagagccgattgcggatcccagagcttcggcctgctggaccccaagctgtgctacctgctggatggcatcctgttcatctacggcgtgatcctgaccgccctgttcctgagagtgaagttcagcagaagcgccgacgcccctgcctaccagcagggacagaaccaactgtacaacgagctgaacctgggcagacgggaagagtacgacgtgctggacaagcggagaggcagggaccctgagatgggcggaaagccccagcggagaaagaacccccaggaaggactgtataacgaactccagaaagacaagatggccgaagcctacagcgagatcggcatgaagggcgagcggagaagaggcaagggccacgatggcctgtaccagggcctgagcaccgccaccaaggacacctatgacgccctgcacatgcaggccctgcctccaagaagggccaagcgatctggatctggagcaacaaacttctcactactcaaacaagcaggtgacgtggaggagaatcccgggcctactagtatggactggatttggcgcatccttttccttgtcggcgctgctaccggcgcgcattccgggccccagctccagctgcaagagtctggacctggcctggtcaagcctagcgagacactgagcctgacctgtaccgtgtccggcgatagcatcagcagcggcgattactactggggctggatcagacagcctcctggcaaaggactggaatggatcggccacatctactacagcggcgtgacctactacaaccccagcctgaagtccagagtgaccatcagcgtggacaccagccggaaccagttctccctgaagctgtctagcgtgacagccgccgataccgccgtgtactactgcaccagagaggacagcagcaactggcggagtagaggccagggaacactggtcacagttagctctggatccggcggaggcggaagtggaggcggaggatctggcggcggaggctctttcgaacaactccaactccaggaaagcggccctggcctcgtgaagcctagcggcacactgagcctgacatgtgccgtgtctggcggcagcatcagcagcagcaactggtggtcttgggtgcgccagcctcctggcaagggcctggaatggatcggcgaaatctaccacagcggcagcaccaactacaaccccagcctgaagtccagagtgaccatcagcgtggacaagagcaagaaccagttctccctgaagctgagcagcgtgacagccgccgataccgccgtgtactattgcgtgggcagcccctacggcgactacgtgctggattattggggccagggcaccctcgtgaccgtgtctagtacgcgtatccagaaccctgatcctgccgtgtaccagctgcgggatagcaagagcagcgacaagagcgtgtgtctgttcaccgacttcgacagccagaccaacgtgtcccagagcaaggactccgacgtgtacatcaccgataagaccgtgctggacatgcggagcatggacttcaagagcaactccgccgtggcctggtccaacaagtccgatttcgcctgcgccaacgccttcaacaacagcattatccccgaggacacattcttcccaagccccgagagcagctgcggtacccagagttttgggttgttggaccctaaattgtgctatctgttggacggaatcctgttcatttacggagtgatcctgaccgcattgttcctgcgggttaagttttccagatccgcagacgcacccgcttaccaacaagggcagaaccaactctacaatgaacttaatttggggcggagggaagagtacgacgttctggacaaaaggaggggacgagatcccgagatgggcggaaagcctcagcgaaggaagaatccgcaagaggggctttataacgaactccagaaagataaaatggcagaagcctatagtgagattgggatgaagggagaaaggaggaggggtaaaggtcacgatgggttgtaccaaggattgagcacagccactaaagatacctatgatgcgctccacatgcaggccctgccgccaaga

SEQ ID NO: 2769 - DNA, 3276 bp, Artificial Sequence
  Synthetic Polynucloetide
atggccttaccagtgaccgccttgctcctgccgctggccttgctgctccacgccgccaggccggaagtgcagctggttgaatctggcggaggactggttcagcctggcggatctctgagactgtcttgtgccgccagcggcttcagcttcagcgacttttggatgagctgggtccgacaggcccctggcaaaggacttgaatgggtcgccacaatcagccaggccggcagcgagaaggactacgtggactctgtgaagggcagattcaccatcagccgggacaacgccaagaagtccctgtacctccagatgaacagcctgagagccgaggacaccgccgtgtactattgtgcctctggcgtgtacagcttcgactacagaggccagggcaccctggtcacagtctcttctggtaccggcggaggcggatctggcggcggaggtagcggtggcggaggatctgaattcgacgagatcgtgctgacacagagccctggcaccctgagcctgtctctgggagagagagccacactgagctgtcgggccagccagtctatcagcagcagcttcctggcctggtatcagcagaagcccggccaggcccctaagctgctgatctacgccgccagcacaagagccaccggcatccccgatagattcagcggctctggcagcggcaccgacttcaccctgaccatcagcagactggaacccgaggacttcgccgtgtactactgccagcagtacggcagaagcctgagcttcggcggaggcaccaaggtggaagtgaagctcgaggacctgaagaacgtgttcccacctgaggtggccgtgttcgagcctagcgaggccgagatcagccacacccagaaagccaccctcgtgtgcctggctaccggcttctaccccgaccatgtggaactgtcttggtgggtcaacggcaaagaggtgcacagcggcgtgtctaccgacccccagccactgaaagaacagcccgccctgaacgacagccggtactgcctgagcagcagactgagagtgtccgccaccttctggcagaacccccggaaccacttcagatgccaggtgcagttctacggcctgagcgagaacgacgagtggacccaggacagagccaagcccgtgacccagatcgtgtctgccgaagcctggggcagagccgattgcggatcccagagcttcggcctgctggaccccaagctgtgctacctgctggatggcatcctgttcatctacggcgtgatcctgaccgccctgttcctgagagtgaagttcagcagaagcgccgacgcccctgcctaccagcagggacagaaccaactgtacaacgagctgaacctgggcagacgggaagagtacgacgtgctggacaagcggagaggcagggaccctgagatgggcggaaagccccagcggagaaagaacccccaggaaggactgtataacgaactccagaaagacaagatggccgaagcctacagcgagatcggcatgaagggcgagcggagaagaggcaagggccacgatggcctgtaccagggcctgagcaccgccaccaaggacacctatgacgccctgcacatgcaggccctgcctccaagaagggccaagcgatctggatctggagcaacaaacttctcactactcaaacaagcaggtgacgtggaggagaatcccgggcctactagtatggactggatttggcgcatccttttccttgtcggcgctgctaccggcgcgcattccgggccccagctccagctgcaagagtctggacctggcctggtcaagcctagcgagacactgagcctgacctgtaccgtgtccggcgatagcatcagcagcggcgattactactggggctggatcagacagcctcctggcaaaggactggaatggatcggccacatctactacagcggcgtgacctactacaaccccagcctgaagtccagagtgaccatcagcgtggacaccagccggaaccagttctccctgaagctgtctagcgtgacagccgccgataccgccgtgtactactgcaccagagaggacagcagcaactggcggagtagaggccagggaacactggtcacagttagctctggatccggcggaggcggaagtggaggcggaggatctggcggcggaggctctttcgaacaggtgcaactccagcagtctggccccggactcgtgaagcctagccagacactgagcctgacctgcgccatcagcggcgatagcgtgtccggcaatagcgccacctggaactggatcagacagagcccatctcggggcctggaatggctgggccggacctactaccgcagcaagtggaaccacgactacgccgagagcgtgaagtcccggatcaccatcaaccccgacaccagcaagaaccagttctccttgcaactgaacagcgtgacccccgaggacacagccgtgtattattgcgccagaggcgacagcagctcttggtacgccttcgactattggggccagggcaccctcgtgaccgtgtctagtacgcgtatccagaaccctgatcctgccgtgtaccagctgcgggatagcaagagcagcgacaagagcgtgtgtctgttcaccgacttcgacagccagaccaacgtgtcccagagcaaggactccgacgtgtacatcaccgataagaccgtgctggacatgcggagcatggacttcaagagcaactccgccgtggcctggtccaacaagtccgatttcgcctgcgccaacgccttcaacaacagcattatccccgaggacacattcttcccaagccccgagagcagctgcggtacccagagttttgggttgttggaccctaaattgtgctatctgttggacggaatcctgttcatttacggagtgatcctgaccgcattgttcctgcgggttaagttttccagatccgcagacgcacccgcttaccaacaagggcagaaccaactctacaatgaacttaatttggggcggagggaagagtacgacgttctggacaaaaggaggggacgagatcccgagatgggcggaaagcctcagcgaaggaagaatccgcaagaggggctttataacgaactccagaaagataaaatggcagaagcctatagtgagattgggatgaagggagaaaggaggaggggtaaaggtcacgatgggttgtaccaaggattgagcacagccactaaagatacctatgatgcgctccacatgcaggccctgccgccaaga

SEQ ID NO: 2770 - DNA, 3273 bp, Artificial Sequence
  Synthetic Polynucloetide
atggccttaccagtgaccgccttgctcctgccgctggccttgctgctccacgccgccaggccggaagtgcagctggttgaatctggcggaggactggttcagcctggcggatctctgagactgtcttgtgccgccagcggcttcagcttcagcgacttttggatgagctgggtccgacaggcccctggcaaaggacttgaatgggtcgccacaatcagccaggccggcagcgagaaggactacgtggactctgtgaagggcagattcaccatcagccgggacaacgccaagaagtccctgtacctccagatgaacagcctgagagccgaggacaccgccgtgtactattgtgcctctggcgtgtacagcttcgactacagaggccagggcaccctggtcacagtctcttctggtaccggcggaggcggatctggcggcggaggtagcggtggcggaggatctgaattcgaccagagcgtcgtgacacagcctcctagcgtgtcagtggcccctggcaagaccgccagaatcacctgtggccggaacaacatcggcagcaagagcgtgcactggtatcagcagaagcccggccaggctcctgtgctggtggtgtacgacgacagcgacagacccagcggcatccccgagagattcagcggcagcaactccggcaataccgccaccctgaccatcagcagagtggaagccggcgacgaggccgactactactgccaagtgtgggacagcagcagcgatcacgtggtgtttggcggaggcaccaagctgacagtgctgggtctcgaggacctgaagaacgtgttcccacctgaggtggccgtgttcgagcctagcgaggccgagatcagccacacccagaaagccaccctcgtgtgcctggctaccggcttctaccccgaccatgtggaactgtcttggtgggtcaacggcaaagaggtgcacagcggcgtgtctaccgacccccagccactgaaagaacagcccgccctgaacgacagccggtactgcctgagcagcagactgagagtgtccgccaccttctggcagaacccccggaaccacttcagatgccaggtgcagttctacggcctgagcgagaacgacgagtggacccaggacagagccaagcccgtgacccagatcgtgtctgccgaagcctggggcagagccgattgcggatcccagagcttcggcctgctggaccccaagctgtgctacctgctggatggcatcctgttcatctacggcgtgatcctgaccgccctgttcctgagagtgaagttcagcagaagcgccgacgcccctgcctaccagcagggacagaaccaactgtacaacgagctgaacctgggcagacgggaagagtacgacgtgctggacaagcggagaggcagggaccctgagatgggcggaaagccccagcggagaaagaacccccaggaaggactgtataacgaactccagaaagacaagatggccgaagcctacagcgagatcggcatgaagggcgagcggagaagaggcaagggccacgatggcctgtaccagggcctgagcaccgccaccaaggacacctatgacgccctgcacatgcaggccctgcctccaagaagggccaagcgatctggatctggagcaacaaacttctcactactcaaacaagcaggtgacgtggaggagaatcccgggcctactagtatggactggatttggcgcatccttttccttgtcggcgctgctaccggcgcgcattccgggccccagctccagctgcaagagtctggacctggcctggtcaagcctagcgagacactgagcctgacctgtaccgtgtccggcgatagcatcagcagcggcgattactactggggctggatcagacagcctcctggcaaaggactggaatggatcggccacatctactacagcggcgtgacctactacaaccccagcctgaagtccagagtgaccatcagcgtggacaccagccggaaccagttctccctgaagctgtctagcgtgacagccgccgataccgccgtgtactactgcaccagagaggacagcagcaactggcggagtagaggccagggaacactggtcacagttagctctggatccggcggaggcggaagtggaggcggaggatctggcggcggaggctctttcgaagtgcaactggtgcagtctggcggaggggtcatgcggcctggcggatctctgagactgtcttgtgccgccagcggcttcaccttcgacgactacggcatgagctgggtgcgccaggcccctggaaaaggcctggaatgggtgtccggcatcaactggaatggcggcagcaccggctacgccgattctgtgcggggcagattcaccatcagccgggacaacgccaagaacagcctgtacctgcagatgaactccctgcgggccgaggacaccgccctgtactattgcgccagagagcggggctacggctaccacgaccctcacgattattggggccagggcacccttgttaccgtgtcctctacgcgtatccagaaccctgatcctgccgtgtaccagctgcgggatagcaagagcagcgacaagagcgtgtgtctgttcaccgacttcgacagccagaccaacgtgtcccagagcaaggactccgacgtgtacatcaccgataagaccgtgctggacatgcggagcatggacttcaagagcaactccgccgtggcctggtccaacaagtccgatttcgcctgcgccaacgccttcaacaacagcattatccccgaggacacattcttcccaagccccgagagcagctgcggtacccagagttttgggttgttggaccctaaattgtgctatctgttggacggaatcctgttcatttacggagtgatcctgaccgcattgttcctgcgggttaagttttccagatccgcagacgcacccgcttaccaacaagggcagaaccaactctacaatgaacttaatttggggcggagggaagagtacgacgttctggacaaaaggaggggacgagatcccgagatgggcggaaagcctcagcgaaggaagaatccgcaagaggggctttataacgaactccagaaagataaaatggcagaagcctatagtgagattgggatgaagggagaaaggaggaggggtaaaggtcacgatgggttgtaccaaggattgagcacagccactaaagatacctatgatgcgctccacatgcaggccctgccgccaaga

SEQ ID NO: 2771 - DNA, 3312 bp, Artificial Sequence
  Synthetic Polynucloetide
atggccttaccagtgaccgccttgctcctgccgctggccttgctgctccacgccgccaggccggaagtgcagctggttgaatctggcggaggactggttcagcctggcggatctctgagactgtcttgtgccgccagcggcttcagcttcagcgacttttggatgagctgggtccgacaggcccctggcaaaggacttgaatgggtcgccacaatcagccaggccggcagcgagaaggactacgtggactctgtgaagggcagattcaccatcagccgggacaacgccaagaagtccctgtacctccagatgaacagcctgagagccgaggacaccgccgtgtactattgtgcctctggcgtgtacagcttcgactacagaggccagggcaccctggtcacagtctcttctggtaccggcggaggcggatctggcggcggaggtagcggtggcggaggatctgaattcgaacagaaactcatcagtgaagaagacctggaattccaggctgtcgtgacacagcctcctagcgcctctggcacaccaggccagagagtgaccatctcctgtagcggcagcagcagcaacatcggcagcaacaccgtgaactggtatcagcaggtgcccggcaccgctcccaagctgctgatctacagcaacaaccagcggcccagcggcgtgcccgatagattttctggcagcaagagcggcaccagcgccagcctggctatctctggactccagtccgaggacgaggccgactactattgcgccgcctgggacgatagcctgaacggctgggtgttcggcggaggcaccaagctgacagtgctgctcgaggacctgaagaacgtgttcccacctgaggtggccgtgttcgagcctagcgaggccgagatcagccacacccagaaagccaccctcgtgtgcctggctaccggcttctaccccgaccatgtggaactgtcttggtgggtcaacggcaaagaggtgcacagcggcgtgtctaccgacccccagccactgaaagaacagcccgccctgaacgacagccggtactgcctgagcagcagactgagagtgtccgccaccttctggcagaacccccggaaccacttcagatgccaggtgcagttctacggcctgagcgagaacgacgagtggacccaggacagagccaagcccgtgacccagatcgtgtctgccgaagcctggggcagagccgattgcggatcccagagcttcggcctgctggaccccaagctgtgctacctgctggatggcatcctgttcatctacggcgtgatcctgaccgccctgttcctgagagtgaagttcagcagaagcgccgacgcccctgcctaccagcagggacagaaccaactgtacaacgagctgaacctgggcagacgggaagagtacgacgtgctggacaagcggagaggcagggaccctgagatgggcggaaagccccagcggagaaagaacccccaggaaggactgtataacgaactccagaaagacaagatggccgaagcctacagcgagatcggcatgaagggcgagcggagaagaggcaagggccacgatggcctgtaccagggcctgagcaccgccaccaaggacacctatgacgccctgcacatgcaggccctgcctccaagaagggccaagcgatctggatctggagcaacaaacttctcactactcaaacaagcaggtgacgtggaggagaatcccgggcctactagtatggactggatttggcgcatccttttccttgtcggcgctgctaccggcgcgcattccgggccccagctccagctgcaagagtctggacctggcctggtcaagcctagcgagacactgagcctgacctgtaccgtgtccggcgatagcatcagcagcggcgattactactggggctggatcagacagcctcctggcaaaggactggaatggatcggccacatctactacagcggcgtgacctactacaaccccagcctgaagtccagagtgaccatcagcgtggacaccagccggaaccagttctccctgaagctgtctagcgtgacagccgccgataccgccgtgtactactgcaccagagaggacagcagcaactggcggagtagaggccagggaacactggtcacagttagctctggatccggcggaggcggaagtggaggcggaggatctggcggcggaggctctttcgaacagatgcaactggtgcagagcggagccgaagtgaaagagcctggcgagagcctgcggatctcctgcaagggcagcggctacagcttcaccaatttctggatctcttgggtgcgccagatgcccggcaagggcctggaatggatgggcagagtggaccccggctactcctacagcacctacagccctagcttccagggccacgtgaccatcagcgccgacaagagcaccagcaccgcctacctccagtggaacagcctgaaggccagcgacaccgccatgtactactgcgccagagtgcagtacagcggctattacgattggttcgacccctggggccagggcacactcgtgacagtgtcaagcacgcgtatccagaaccctgatcctgccgtgtaccagctgcgggatagcaagagcagcgacaagagcgtgtgtctgttcaccgacttcgacagccagaccaacgtgtcccagagcaaggactccgacgtgtacatcaccgataagaccgtgctggacatgcggagcatggacttcaagagcaactccgccgtggcctggtccaacaagtccgatttcgcctgcgccaacgccttcaacaacagcattatccccgaggacacattcttcccaagccccgagagcagctgcggtacccagagttttgggttgttggaccctaaattgtgctatctgttggacggaatcctgttcatttacggagtgatcctgaccgcattgttcctgcgggttaagttttccagatccgcagacgcacccgcttaccaacaagggcagaaccaactctacaatgaacttaatttggggcggagggaagagtacgacgttctggacaaaaggaggggacgagatcccgagatgggcggaaagcctcagcgaaggaagaatccgcaagaggggctttataacgaactccagaaagataaaatggcagaagcctatagtgagattgggatgaagggagaaaggaggaggggtaaaggtcacgatgggttgtaccaaggattgagcacagccactaaagatacctatgatgcgctccacatgcaggccctgccgccaaga

SEQ ID NO: 2772 - DNA, 3294 bp, Artificial Sequence
  Synthetic Polynucloetide
atggccttaccagtgaccgccttgctcctgccgctggccttgctgctccacgccgccaggccggaagtgcagctggttgaatctggcggaggactggttcagcctggcggatctctgagactgtcttgtgccgccagcggcttcagcttcagcgacttttggatgagctgggtccgacaggcccctggcaaaggacttgaatgggtcgccacaatcagccaggccggcagcgagaaggactacgtggactctgtgaagggcagattcaccatcagccgggacaacgccaagaagtccctgtacctccagatgaacagcctgagagccgaggacaccgccgtgtactattgtgcctctggcgtgtacagcttcgactacagaggccagggcaccctggtcacagtctcttctggtaccggcggaggcggatctggcggcggaggtagcggtggcggaggatctgaattcgaacagaaactcatcagtgaagaagacctggaattcgacatccagatgacccagagccccagcacactgagcgccagcgtgggcgacagagtgaccatcacctgtcgggccagccagaacatcaacaagtggctggcctggtatcagcagaggcccggaaaagccccccagctgctgatctacaaggccagcagcctggaaagcggcgtgcccagcagattttctggcagcggctctggcaccgagtacaccctgaccatcagctccctccagcccgacgacttcgccacctactactgccagcagtacaacagctacgccaccttcggccagggcaccaaggtggaaatcaagagactcgaggacctgaagaacgtgttcccacctgaggtggccgtgttcgagcctagcgaggccgagatcagccacacccagaaagccaccctcgtgtgcctggctaccggcttctaccccgaccatgtggaactgtcttggtgggtcaacggcaaagaggtgcacagcggcgtgtctaccgacccccagccactgaaagaacagcccgccctgaacgacagccggtactgcctgagcagcagactgagagtgtccgccaccttctggcagaacccccggaaccacttcagatgccaggtgcagttctacggcctgagcgagaacgacgagtggacccaggacagagccaagcccgtgacccagatcgtgtctgccgaagcctggggcagagccgattgcggatcccagagcttcggcctgctggaccccaagctgtgctacctgctggatggcatcctgttcatctacggcgtgatcctgaccgccctgttcctgagagtgaagttcagcagaagcgccgacgcccctgcctaccagcagggacagaaccaactgtacaacgagctgaacctgggcagacgggaagagtacgacgtgctggacaagcggagaggcagggaccctgagatgggcggaaagccccagcggagaaagaacccccaggaaggactgtataacgaactccagaaagacaagatggccgaagcctacagcgagatcggcatgaagggcgagcggagaagaggcaagggccacgatggcctgtaccagggcctgagcaccgccaccaaggacacctatgacgccctgcacatgcaggccctgcctccaagaagggccaagcgatctggatctggagcaacaaacttctcactactcaaacaagcaggtgacgtggaggagaatcccgggcctactagtatggactggatttggcgcatccttttccttgtcggcgctgctaccggcgcgcattccgggccccagctccagctgcaagagtctggacctggcctggtcaagcctagcgagacactgagcctgacctgtaccgtgtccggcgatagcatcagcagcggcgattactactggggctggatcagacagcctcctggcaaaggactggaatggatcggccacatctactacagcggcgtgacctactacaaccccagcctgaagtccagagtgaccatcagcgtggacaccagccggaaccagttctccctgaagctgtctagcgtgacagccgccgataccgccgtgtactactgcaccagagaggacagcagcaactggcggagtagaggccagggaacactggtcacagttagctctggatccggcggaggcggaagtggaggcggaggatctggcggcggaggctctttcgaacaggtgcagctggtgcagtctggggccgaagtgaagaagcctggcgagagcctgaagatcagctgcaagggctccggctacaacttctctaacaagtggatcggctgggtgcgccagctgcctggcagaggactggaatggatcgccatcatctaccccggctacagcgacatcacctacagccccagcttccagggccgcgtgacaatcagcgccgacaccagcatcaacaccgcctacctgcactggcacagcctgaaggccagcgacaccgccatgtactactgcgtgcggcatacagccctggctggcttcgattattggggcctgggcaccctcgtgaccgtgtctagtacgcgtatccagaaccctgatcctgccgtgtaccagctgcgggatagcaagagcagcgacaagagcgtgtgtctgttcaccgacttcgacagccagaccaacgtgtcccagagcaaggactccgacgtgtacatcaccgataagaccgtgctggacatgcggagcatggacttcaagagcaactccgccgtggcctggtccaacaagtccgatttcgcctgcgccaacgccttcaacaacagcattatccccgaggacacattcttcccaagccccgagagcagctgcggtacccagagttttgggttgttggaccctaaattgtgctatctgttggacggaatcctgttcatttacggagtgatcctgaccgcattgttcctgcgggttaagttttccagatccgcagacgcacccgcttaccaacaagggcagaaccaactctacaatgaacttaatttggggcggagggaagagtacgacgttctggacaaaaggaggggacgagatcccgagatgggcggaaagcctcagcgaaggaagaatccgcaagaggggctttataacgaactccagaaagataaaatggcagaagcctatagtgagattgggatgaagggagaaaggaggaggggtaaaggtcacgatgggttgtaccaaggattgagcacagccactaaagatacctatgatgcgctccacatgcaggccctgccgccaaga

SEQ ID NO: 2773 - DNA, 3270 bp, Artificial Sequence
  Synthetic Polynucloetide
atggccttaccagtgaccgccttgctcctgccgctggccttgctgctccacgccgccaggccggaagtgcagctggttgaatctggcggaggactggttcagcctggcggatctctgagactgtcttgtgccgccagcggcttcagcttcagcgacttttggatgagctgggtccgacaggcccctggcaaaggacttgaatgggtcgccacaatcagccaggccggcagcgagaaggactacgtggactctgtgaagggcagattcaccatcagccgggacaacgccaagaagtccctgtacctccagatgaacagcctgagagccgaggacaccgccgtgtactattgtgcctctggcgtgtacagcttcgactacagaggccagggcaccctggtcacagtctcttctggtaccggcggaggcggatctggcggcggaggtagcggtggcggaggatctgaattcgacatcgtgctgacacagagccctgcttctctggccgtgtctctgggacagagagccaccatcagctgtagagccagcgagagcgtggacaactacggcaacaccttcatgcactggtatcagcagaagcccggccagcctcctaagctgctgatctacagagccagcaacctggaaagcggcatccccgccagattttctggcagcggcagcagaaccgacttcaccctgaccatcaatcccgtggaagccgacgacgtggcaacctactactgccagcagagcaacgaggaccctcctacatttggagccggcaccaagctggaactgaaactcgaggacctgaagaacgtgttcccacctgaggtggccgtgttcgagcctagcgaggccgagatcagccacacccagaaagccaccctcgtgtgcctggctaccggcttctaccccgaccatgtggaactgtcttggtgggtcaacggcaaagaggtgcacagcggcgtgtctaccgacccccagccactgaaagaacagcccgccctgaacgacagccggtactgcctgagcagcagactgagagtgtccgccaccttctggcagaacccccggaaccacttcagatgccaggtgcagttctacggcctgagcgagaacgacgagtggacccaggacagagccaagcccgtgacccagatcgtgtctgccgaagcctggggcagagccgattgcggatcccagagcttcggcctgctggaccccaagctgtgctacctgctggatggcatcctgttcatctacggcgtgatcctgaccgccctgttcctgagagtgaagttcagcagaagcgccgacgcccctgcctaccagcagggacagaaccaactgtacaacgagctgaacctgggcagacgggaagagtacgacgtgctggacaagcggagaggcagggaccctgagatgggcggaaagccccagcggagaaagaacccccaggaaggactgtataacgaactccagaaagacaagatggccgaagcctacagcgagatcggcatgaagggcgagcggagaagaggcaagggccacgatggcctgtaccagggcctgagcaccgccaccaaggacacctatgacgccctgcacatgcaggccctgcctccaagaagggccaagcgatctggatctggagcaacaaacttctcactactcaaacaagcaggtgacgtggaggagaatcccgggcctactagtatggactggatttggcgcatccttttccttgtcggcgctgctaccggcgcgcattccgggccccagctccagctgcaagagtctggacctggcctggtcaagcctagcgagacactgagcctgacctgtaccgtgtccggcgatagcatcagcagcggcgattactactggggctggatcagacagcctcctggcaaaggactggaatggatcggccacatctactacagcggcgtgacctactacaaccccagcctgaagtccagagtgaccatcagcgtggacaccagccggaaccagttctccctgaagctgtctagcgtgacagccgccgataccgccgtgtactactgcaccagagaggacagcagcaactggcggagtagaggccagggaacactggtcacagttagctctggatccggcggaggcggaagtggaggcggaggatctggcggcggaggctctttcgaacagattcagctggtgcagtctggccccgagctgaagaaacctggcgagacagtgaagatcagctgcaaggccagcggctacatcttcaccaattacggcatgaactgggtcaagcaggcccctggcaagagcttcaagtggatgggctggatcaacacctacaccggcgagagcacatacagcgccgacttcaagggcagattcgccttcagcctggaaaccagcgccagcacagcctacctgcacatcaacgacctgaagaacgaggacaccgccacctacttttgcgccagaagcggcggctacgaccctatggattattggggccagggcaccagcgtgaccgtttcttctacgcgtatccagaaccctgatcctgccgtgtaccagctgcgggatagcaagagcagcgacaagagcgtgtgtctgttcaccgacttcgacagccagaccaacgtgtcccagagcaaggactccgacgtgtacatcaccgataagaccgtgctggacatgcggagcatggacttcaagagcaactccgccgtggcctggtccaacaagtccgatttcgcctgcgccaacgccttcaacaacagcattatccccgaggacacattcttcccaagccccgagagcagctgcggtacccagagttttgggttgttggaccctaaattgtgctatctgttggacggaatcctgttcatttacggagtgatcctgaccgcattgttcctgcgggttaagttttccagatccgcagacgcacccgcttaccaacaagggcagaaccaactctacaatgaacttaatttggggcggagggaagagtacgacgttctggacaaaaggaggggacgagatcccgagatgggcggaaagcctcagcgaaggaagaatccgcaagaggggctttataacgaactccagaaagataaaatggcagaagcctatagtgagattgggatgaagggagaaaggaggaggggtaaaggtcacgatgggttgtaccaaggattgagcacagccactaaagatacctatgatgcgctccacatgcaggccctgccgccaaga

SEQ ID NO: 2774 - DNA, 3267 bp, Artificial Sequence
  Synthetic Polynucloetide
atggccttaccagtgaccgccttgctcctgccgctggccttgctgctccacgccgccaggccggaagtgcagctggttgaatctggcggaggactggttcagcctggcggatctctgagactgtcttgtgccgccagcggcttcagcttcagcgacttttggatgagctgggtccgacaggcccctggcaaaggacttgaatgggtcgccacaatcagccaggccggcagcgagaaggactacgtggactctgtgaagggcagattcaccatcagccgggacaacgccaagaagtccctgtacctccagatgaacagcctgagagccgaggacaccgccgtgtactattgtgcctctggcgtgtacagcttcgactacagaggccagggcaccctggtcacagtctcttctggtaccggcggaggcggatctggcggcggaggtagcggtggcggaggatctgaattcgacgagatcgtgctgacacagagccctggcaccctgagcctgtctccaggcgaaagagccacactgagctgtcgggccagccagagcgtgtccaatacctacctggcctggtatcaccagaggcccggacaggctccccggctgctgatctatggcgcttctagcagagccaccggcatccccgatagattcagcggctctggcagcggcaccgacttcgccctgacaatcagctccctggaacccgaggacttcgccgtgtactactgccagcagtacagcaactcctggaccttcggccagggcaccaaggtggaaatcaagagactcgaggacctgaagaacgtgttcccacctgaggtggccgtgttcgagcctagcgaggccgagatcagccacacccagaaagccaccctcgtgtgcctggctaccggcttctaccccgaccatgtggaactgtcttggtgggtcaacggcaaagaggtgcacagcggcgtgtctaccgacccccagccactgaaagaacagcccgccctgaacgacagccggtactgcctgagcagcagactgagagtgtccgccaccttctggcagaacccccggaaccacttcagatgccaggtgcagttctacggcctgagcgagaacgacgagtggacccaggacagagccaagcccgtgacccagatcgtgtctgccgaagcctggggcagagccgattgcggatcccagagcttcggcctgctggaccccaagctgtgctacctgctggatggcatcctgttcatctacggcgtgatcctgaccgccctgttcctgagagtgaagttcagcagaagcgccgacgcccctgcctaccagcagggacagaaccaactgtacaacgagctgaacctgggcagacgggaagagtacgacgtgctggacaagcggagaggcagggaccctgagatgggcggaaagccccagcggagaaagaacccccaggaaggactgtataacgaactccagaaagacaagatggccgaagcctacagcgagatcggcatgaagggcgagcggagaagaggcaagggccacgatggcctgtaccagggcctgagcaccgccaccaaggacacctatgacgccctgcacatgcaggccctgcctccaagaagggccaagcgatctggatctggagcaacaaacttctcactactcaaacaagcaggtgacgtggaggagaatcccgggcctactagtatggactggatttggcgcatccttttccttgtcggcgctgctaccggcgcgcattccgggccccagctccagctgcaagagtctggacctggcctggtcaagcctagcgagacactgagcctgacctgtaccgtgtccggcgatagcatcagcagcggcgattactactggggctggatcagacagcctcctggcaaaggactggaatggatcggccacatctactacagcggcgtgacctactacaaccccagcctgaagtccagagtgaccatcagcgtggacaccagccggaaccagttctccctgaagctgtctagcgtgacagccgccgataccgccgtgtactactgcaccagagaggacagcagcaactggcggagtagaggccagggaacactggtcacagttagctctggatccggcggaggcggaagtggaggcggaggatctggcggcggaggctctttcgaacaggtgcaactggtggaatctggcgggggagtggtgcagcctggcagaagcctgagactgtcttgtgccgccagcggcttcaccttcagcagctacgacatgcactgggtgcgccaggcccctggcaaaggactggaatgggtggccgtgatctcctacgacggcaccaacgagtattacgccgacagcgtgaagggccggttcaccatctccagagacaccagcaagaacaccctgtacctccagatgaacagcctgcgggccgaggacacagccgtgtattattgcgccagagagcggtacttcgactggtccttcgactactggggccagggaaccctggtgtccgtgtctagtacgcgtatccagaaccctgatcctgccgtgtaccagctgcgggatagcaagagcagcgacaagagcgtgtgtctgttcaccgacttcgacagccagaccaacgtgtcccagagcaaggactccgacgtgtacatcaccgataagaccgtgctggacatgcggagcatggacttcaagagcaactccgccgtggcctggtccaacaagtccgatttcgcctgcgccaacgccttcaacaacagcattatccccgaggacacattcttcccaagccccgagagcagctgcggtacccagagttttgggttgttggaccctaaattgtgctatctgttggacggaatcctgttcatttacggagtgatcctgaccgcattgttcctgcgggttaagttttccagatccgcagacgcacccgcttaccaacaagggcagaaccaactctacaatgaacttaatttggggcggagggaagagtacgacgttctggacaaaaggaggggacgagatcccgagatgggcggaaagcctcagcgaaggaagaatccgcaagaggggctttataacgaactccagaaagataaaatggcagaagcctatagtgagattgggatgaagggagaaaggaggaggggtaaaggtcacgatgggttgtaccaaggattgagcacagccactaaagatacctatgatgcgctccacatgcaggccctgccgccaaga

SEQ ID NO: 2775 - DNA, 3264 bp, Artificial Sequence
  Synthetic Polynucloetide
atggccttaccagtgaccgccttgctcctgccgctggccttgctgctccacgccgccaggccggaagtgcagctggttgaatctggcggaggactggttcagcctggcggatctctgagactgtcttgtgccgccagcggcttcagcttcagcgacttttggatgagctgggtccgacaggcccctggcaaaggacttgaatgggtcgccacaatcagccaggccggcagcgagaaggactacgtggactctgtgaagggcagattcaccatcagccgggacaacgccaagaagtccctgtacctccagatgaacagcctgagagccgaggacaccgccgtgtactattgtgcctctggcgtgtacagcttcgactacagaggccagggcaccctggtcacagtctcttctggtaccggcggaggcggatctggcggcggaggtagcggtggcggaggatctgaattcgacgagctgacacaggaccctgctgtgtctgttgccctgggccagacagtgcggattacctgtcaaggcgacagcctgagaagcaactacgccaactggtatcagcagaagcccggacaggctcccgtgctggttatctacggccagaacaacagacccagcggcatccccgatagattcagcggctctagctctggcaataccgccagcctgacaatcactggcgctcaggctgccgatgaggccgactactactgcgatagcagagtgtccaccggcaatcacgtggtgtttggcggcggaacaaagctgacagtgctcggacaactcgaggacctgaagaacgtgttcccacctgaggtggccgtgttcgagcctagcgaggccgagatcagccacacccagaaagccaccctcgtgtgcctggctaccggcttctaccccgaccatgtggaactgtcttggtgggtcaacggcaaagaggtgcacagcggcgtgtctaccgacccccagccactgaaagaacagcccgccctgaacgacagccggtactgcctgagcagcagactgagagtgtccgccaccttctggcagaacccccggaaccacttcagatgccaggtgcagttctacggcctgagcgagaacgacgagtggacccaggacagagccaagcccgtgacccagatcgtgtctgccgaagcctggggcagagccgattgcggatcccagagcttcggcctgctggaccccaagctgtgctacctgctggatggcatcctgttcatctacggcgtgatcctgaccgccctgttcctgagagtgaagttcagcagaagcgccgacgcccctgcctaccagcagggacagaaccaactgtacaacgagctgaacctgggcagacgggaagagtacgacgtgctggacaagcggagaggcagggaccctgagatgggcggaaagccccagcggagaaagaacccccaggaaggactgtataacgaactccagaaagacaagatggccgaagcctacagcgagatcggcatgaagggcgagcggagaagaggcaagggccacgatggcctgtaccagggcctgagcaccgccaccaaggacacctatgacgccctgcacatgcaggccctgcctccaagaagggccaagcgatctggatctggagcaacaaacttctcactactcaaacaagcaggtgacgtggaggagaatcccgggcctactagtatggactggatttggcgcatccttttccttgtcggcgctgctaccggcgcgcattccgggccccagctccagctgcaagagtctggacctggcctggtcaagcctagcgagacactgagcctgacctgtaccgtgtccggcgatagcatcagcagcggcgattactactggggctggatcagacagcctcctggcaaaggactggaatggatcggccacatctactacagcggcgtgacctactacaaccccagcctgaagtccagagtgaccatcagcgtggacaccagccggaaccagttctccctgaagctgtctagcgtgacagccgccgataccgccgtgtactactgcaccagagaggacagcagcaactggcggagtagaggccagggaacactggtcacagttagctctggatccggcggaggcggaagtggaggcggaggatctggcggcggaggctctttcgaagaagttcagctggtgcagagcggagccgaagtgaagaaacctggggcctctgtgaaggtgtcctgcaaggcttccggctacacctttaccagctacgccatgcactgggtccgacaggcacctggacaacggcttgaatggatgggctggatcaacgccggcaacggcaacaccaagtacagccagaaattccagggccgcgtgaccatcaccagagatacaagcgccagcaccgcctacatggaactgtctagcctgagatccgaggacaccgccgtgtactactgtgccagagacatcagctacggcagcttcgactattggggccagggcacactggtcaccgttagctctacgcgtatccagaaccctgatcctgccgtgtaccagctgcgggatagcaagagcagcgacaagagcgtgtgtctgttcaccgacttcgacagccagaccaacgtgtcccagagcaaggactccgacgtgtacatcaccgataagaccgtgctggacatgcggagcatggacttcaagagcaactccgccgtggcctggtccaacaagtccgatttcgcctgcgccaacgccttcaacaacagcattatccccgaggacacattcttcccaagccccgagagcagctgcggtacccagagttttgggttgttggaccctaaattgtgctatctgttggacggaatcctgttcatttacggagtgatcctgaccgcattgttcctgcgggttaagttttccagatccgcagacgcacccgcttaccaacaagggcagaaccaactctacaatgaacttaatttggggcggagggaagagtacgacgttctggacaaaaggaggggacgagatcccgagatgggcggaaagcctcagcgaaggaagaatccgcaagaggggctttataacgaactccagaaagataaaatggcagaagcctatagtgagattgggatgaagggagaaaggaggaggggtaaaggtcacgatgggttgtaccaaggattgagcacagccactaaagatacctatgatgcgctccacatgcaggccctgccgccaaga

SEQ ID NO: 2776 - DNA, 3270 bp, Artificial Sequence
  Synthetic Polynucloetide
atggccttaccagtgaccgccttgctcctgccgctggccttgctgctccacgccgccaggccggaagtgcagctggttgaatctggcggaggactggttcagcctggcggatctctgagactgtcttgtgccgccagcggcttcagcttcagcgacttttggatgagctgggtccgacaggcccctggcaaaggacttgaatgggtcgccacaatcagccaggccggcagcgagaaggactacgtggactctgtgaagggcagattcaccatcagccgggacaacgccaagaagtccctgtacctccagatgaacagcctgagagccgaggacaccgccgtgtactattgtgcctctggcgtgtacagcttcgactacagaggccagggcaccctggtcacagtctcttctggtaccggcggaggcggatctggcggcggaggtagcggtggcggaggatctgaattcgacgacatcgtgctgacacagacaccagccacactgagcgtgacacctggcgattctgtgtccctgagctgtagagccagccagagcatcagcaacaacctgcactggtatcagcagaagtcccacgagagccccagactgctgattaagaacgccagccagtctatcagcggcatccccagcaagtttagcggctctggcagcggcaccgacttcaccctgagaatcaacagcgtggaaaccgaggacttcgggatgtacttctgccagcagagcaatagctggccctacacatttggctccggcaccaagctggaaatcaaactcgaggacctgaagaacgtgttcccacctgaggtggccgtgttcgagcctagcgaggccgagatcagccacacccagaaagccaccctcgtgtgcctggctaccggcttctaccccgaccatgtggaactgtcttggtgggtcaacggcaaagaggtgcacagcggcgtgtctaccgacccccagccactgaaagaacagcccgccctgaacgacagccggtactgcctgagcagcagactgagagtgtccgccaccttctggcagaacccccggaaccacttcagatgccaggtgcagttctacggcctgagcgagaacgacgagtggacccaggacagagccaagcccgtgacccagatcgtgtctgccgaagcctggggcagagccgattgcggatcccagagcttcggcctgctggaccccaagctgtgctacctgctggatggcatcctgttcatctacggcgtgatcctgaccgccctgttcctgagagtgaagttcagcagaagcgccgacgcccctgcctaccagcagggacagaaccaactgtacaacgagctgaacctgggcagacgggaagagtacgacgtgctggacaagcggagaggcagggaccctgagatgggcggaaagccccagcggagaaagaacccccaggaaggactgtataacgaactccagaaagacaagatggccgaagcctacagcgagatcggcatgaagggcgagcggagaagaggcaagggccacgatggcctgtaccagggcctgagcaccgccaccaaggacacctatgacgccctgcacatgcaggccctgcctccaagaagggccaagcgatctggatctggagcaacaaacttctcactactcaaacaagcaggtgacgtggaggagaatcccgggcctactagtatggactggatttggcgcatccttttccttgtcggcgctgctaccggcgcgcattccgggccccagctccagctgcaagagtctggacctggcctggtcaagcctagcgagacactgagcctgacctgtaccgtgtccggcgatagcatcagcagcggcgattactactggggctggatcagacagcctcctggcaaaggactggaatggatcggccacatctactacagcggcgtgacctactacaaccccagcctgaagtccagagtgaccatcagcgtggacaccagccggaaccagttctccctgaagctgtctagcgtgacagccgccgataccgccgtgtactactgcaccagagaggacagcagcaactggcggagtagaggccagggaacactggtcacagttagctctggatccggcggaggcggaagtggaggcggaggatctggcggcggaggctctttcgaacaagtgaagctgcaacagagcggacccgagctggttaagccaggcgcttccgtgaagattagctgcaaggccagcggctacagcttcaccggctactacatgcactgggtcaagcagagccacggcaacatcctggactggatcggctacatctacccctacaacggcgtgtccagctacaaccagaagttcaagggcaaagccactctgaccgtggacaagagcagcagcaccgcctacatggaactgagaagcctgaccagcgaggacagcgccgtgtactattgtgccagagagcggggcctgtaccagctcagagcaatggattattggggccagggcaccagcgtgaccgtttcttctacgcgtatccagaaccctgatcctgccgtgtaccagctgcgggatagcaagagcagcgacaagagcgtgtgtctgttcaccgacttcgacagccagaccaacgtgtcccagagcaaggactccgacgtgtacatcaccgataagaccgtgctggacatgcggagcatggacttcaagagcaactccgccgtggcctggtccaacaagtccgatttcgcctgcgccaacgccttcaacaacagcattatccccgaggacacattcttcccaagccccgagagcagctgcggtacccagagttttgggttgttggaccctaaattgtgctatctgttggacggaatcctgttcatttacggagtgatcctgaccgcattgttcctgcgggttaagttttccagatccgcagacgcacccgcttaccaacaagggcagaaccaactctacaatgaacttaatttggggcggagggaagagtacgacgttctggacaaaaggaggggacgagatcccgagatgggcggaaagcctcagcgaaggaagaatccgcaagaggggctttataacgaactccagaaagataaaatggcagaagcctatagtgagattgggatgaagggagaaaggaggaggggtaaaggtcacgatgggttgtaccaaggattgagcacagccactaaagatacctatgatgcgctccacatgcaggccctgccgccaaga

SEQ ID NO: 2777 - DNA, 3243 bp, Artificial Sequence
  Synthetic Polynucloetide
atggccttaccagtgaccgccttgctcctgccgctggccttgctgctccacgccgccaggccggaagtgcagctggttgaatctggcggaggactggttcagcctggcggatctctgagactgtcttgtgccgccagcggcttcagcttcagcgacttttggatgagctgggtccgacaggcccctggcaaaggacttgaatgggtcgccacaatcagccaggccggcagcgagaaggactacgtggactctgtgaagggcagattcaccatcagccgggacaacgccaagaagtccctgtacctccagatgaacagcctgagagccgaggacaccgccgtgtactattgtgcctctggcgtgtacagcttcgactacagaggccagggcaccctggtcacagtctcttctggtaccggcggaggcggatctggcggcggaggtagcggtggcggaggatctgaattcgacgacatcgtgatgacacagacccctgccatcatgagcgcctctccaggccagaaagtgaccatcacatgtagcgccagcagcagcgtgaactacatgcactggtatcagcagaagctgggcagcagccccaagctgtggatctacgataccagcaaactggcccctggcgtgccagccagattttctggttctggcagcggcaccagctacagcctgacaatcagcagcatggaagccgaggatgccgccagctacttctgccatcagtggtctagctacccctacacctttggctccggcaccaagctggaaatcaaactcgaggacctgaagaacgtgttcccacctgaggtggccgtgttcgagcctagcgaggccgagatcagccacacccagaaagccaccctcgtgtgcctggctaccggcttctaccccgaccatgtggaactgtcttggtgggtcaacggcaaagaggtgcacagcggcgtgtctaccgacccccagccactgaaagaacagcccgccctgaacgacagccggtactgcctgagcagcagactgagagtgtccgccaccttctggcagaacccccggaaccacttcagatgccaggtgcagttctacggcctgagcgagaacgacgagtggacccaggacagagccaagcccgtgacccagatcgtgtctgccgaagcctggggcagagccgattgcggatcccagagcttcggcctgctggaccccaagctgtgctacctgctggatggcatcctgttcatctacggcgtgatcctgaccgccctgttcctgagagtgaagttcagcagaagcgccgacgcccctgcctaccagcagggacagaaccaactgtacaacgagctgaacctgggcagacgggaagagtacgacgtgctggacaagcggagaggcagggaccctgagatgggcggaaagccccagcggagaaagaacccccaggaaggactgtataacgaactccagaaagacaagatggccgaagcctacagcgagatcggcatgaagggcgagcggagaagaggcaagggccacgatggcctgtaccagggcctgagcaccgccaccaaggacacctatgacgccctgcacatgcaggccctgcctccaagaagggccaagcgatctggatctggagcaacaaacttctcactactcaaacaagcaggtgacgtggaggagaatcccgggcctactagtatggactggatttggcgcatccttttccttgtcggcgctgctaccggcgcgcattccgggccccagctccagctgcaagagtctggacctggcctggtcaagcctagcgagacactgagcctgacctgtaccgtgtccggcgatagcatcagcagcggcgattactactggggctggatcagacagcctcctggcaaaggactggaatggatcggccacatctactacagcggcgtgacctactacaaccccagcctgaagtccagagtgaccatcagcgtggacaccagccggaaccagttctccctgaagctgtctagcgtgacagccgccgataccgccgtgtactactgcaccagagaggacagcagcaactggcggagtagaggccagggaacactggtcacagttagctctggatccggcggaggcggaagtggaggcggaggatctggcggcggaggctctttcgaagaagttcagctccaagagtctggccccgacctggtcaagcctagccaaagcctgagcctgacctgtaccgtgaccggctacagcatcacaagcggctatggatggcactggatcagacagttccccggcaacaaactggaatggatgggctacatccactacagcggcagcaccacctacaatcccagcctgaagtcccggatcagcatcagcagagacaccagcaagaaccagttcttcctgcaactgaacagcgtgaccaccgaggacaccgccacctactattgtgctcggagcctgagatattggggccagggcacaaccctgaccgtgtcatctacgcgtatccagaaccctgatcctgccgtgtaccagctgcgggatagcaagagcagcgacaagagcgtgtgtctgttcaccgacttcgacagccagaccaacgtgtcccagagcaaggactccgacgtgtacatcaccgataagaccgtgctggacatgcggagcatggacttcaagagcaactccgccgtggcctggtccaacaagtccgatttcgcctgcgccaacgccttcaacaacagcattatccccgaggacacattcttcccaagccccgagagcagctgcggtacccagagttttgggttgttggaccctaaattgtgctatctgttggacggaatcctgttcatttacggagtgatcctgaccgcattgttcctgcgggttaagttttccagatccgcagacgcacccgcttaccaacaagggcagaaccaactctacaatgaacttaatttggggcggagggaagagtacgacgttctggacaaaaggaggggacgagatcccgagatgggcggaaagcctcagcgaaggaagaatccgcaagaggggctttataacgaactccagaaagataaaatggcagaagcctatagtgagattgggatgaagggagaaaggaggaggggtaaaggtcacgatgggttgtaccaaggattgagcacagccactaaagatacctatgatgcgctccacatgcaggccctgccgccaaga

SEQ ID NO: 2778 - DNA, 3252 bp, Artificial Sequence
  Synthetic Polynucloetide
atggccttaccagtgaccgccttgctcctgccgctggccttgctgctccacgccgccaggccggaagtgcagctggttgaatctggcggaggactggttcagcctggcggatctctgagactgtcttgtgccgccagcggcttcagcttcagcgacttttggatgagctgggtccgacaggcccctggcaaaggacttgaatgggtcgccacaatcagccaggccggcagcgagaaggactacgtggactctgtgaagggcagattcaccatcagccgggacaacgccaagaagtccctgtacctccagatgaacagcctgagagccgaggacaccgccgtgtactattgtgcctctggcgtgtacagcttcgactacagaggccagggcaccctggtcacagtctcttctggtaccggcggaggcggatctggcggcggaggtagcggtggcggaggatctgaattcgacgacatccagatgacacagagccctagcagcctgtctgccagcgtgggagacagagtgaccatcacctgtagcgccaccagcagcatcagctacatgcactggtatcagcagaagcccggcaaggcccctaaaggctggatctacgataccagcaaactggcccacggcgtgcccagcagattttctggttctggcagcggcaccgacttcaccctgacaatatctagcctccagcctgaggacttcgccacctactactgccaccagagaagaagctaccccttcaccttcggccagggcaccaaggtggaaatcaaactcgaggacctgaagaacgtgttcccacctgaggtggccgtgttcgagcctagcgaggccgagatcagccacacccagaaagccaccctcgtgtgcctggctaccggcttctaccccgaccatgtggaactgtcttggtgggtcaacggcaaagaggtgcacagcggcgtgtctaccgacccccagccactgaaagaacagcccgccctgaacgacagccggtactgcctgagcagcagactgagagtgtccgccaccttctggcagaacccccggaaccacttcagatgccaggtgcagttctacggcctgagcgagaacgacgagtggacccaggacagagccaagcccgtgacccagatcgtgtctgccgaagcctggggcagagccgattgcggatcccagagcttcggcctgctggaccccaagctgtgctacctgctggatggcatcctgttcatctacggcgtgatcctgaccgccctgttcctgagagtgaagttcagcagaagcgccgacgcccctgcctaccagcagggacagaaccaactgtacaacgagctgaacctgggcagacgggaagagtacgacgtgctggacaagcggagaggcagggaccctgagatgggcggaaagccccagcggagaaagaacccccaggaaggactgtataacgaactccagaaagacaagatggccgaagcctacagcgagatcggcatgaagggcgagcggagaagaggcaagggccacgatggcctgtaccagggcctgagcaccgccaccaaggacacctatgacgccctgcacatgcaggccctgcctccaagaagggccaagcgatctggatctggagcaacaaacttctcactactcaaacaagcaggtgacgtggaggagaatcccgggcctactagtatggactggatttggcgcatccttttccttgtcggcgctgctaccggcgcgcattccgggccccagctccagctgcaagagtctggacctggcctggtcaagcctagcgagacactgagcctgacctgtaccgtgtccggcgatagcatcagcagcggcgattactactggggctggatcagacagcctcctggcaaaggactggaatggatcggccacatctactacagcggcgtgacctactacaaccccagcctgaagtccagagtgaccatcagcgtggacaccagccggaaccagttctccctgaagctgtctagcgtgacagccgccgataccgccgtgtactactgcaccagagaggacagcagcaactggcggagtagaggccagggaacactggtcacagttagctctggatccggcggaggcggaagtggaggcggaggatctggcggcggaggctctttcgaagaagtgcaactggttcagagcggagccgaagtgaagaaacctggggcctctgtgaaggtgtcctgcaaggcttccggctacacctttaccaatttctggattcactgggtccgacaggctccaggccaaggactggaatggatcggagagatcgaccccagcgacagctacaccaactacaaccagaaattcaaaggccgggtcaccatcaccagagacaccagcacaagcaccgcctacctggaactgagcagcctgagaagcgaggacaccgccgtgtactactgcgccagggaaatcaccaccgtggattattggggccagggaaccctggtcaccgtgtcatctacgcgtatccagaaccctgatcctgccgtgtaccagctgcgggatagcaagagcagcgacaagagcgtgtgtctgttcaccgacttcgacagccagaccaacgtgtcccagagcaaggactccgacgtgtacatcaccgataagaccgtgctggacatgcggagcatggacttcaagagcaactccgccgtggcctggtccaacaagtccgatttcgcctgcgccaacgccttcaacaacagcattatccccgaggacacattcttcccaagccccgagagcagctgcggtacccagagttttgggttgttggaccctaaattgtgctatctgttggacggaatcctgttcatttacggagtgatcctgaccgcattgttcctgcgggttaagttttccagatccgcagacgcacccgcttaccaacaagggcagaaccaactctacaatgaacttaatttggggcggagggaagagtacgacgttctggacaaaaggaggggacgagatcccgagatgggcggaaagcctcagcgaaggaagaatccgcaagaggggctttataacgaactccagaaagataaaatggcagaagcctatagtgagattgggatgaagggagaaaggaggaggggtaaaggtcacgatgggttgtaccaaggattgagcacagccactaaagatacctatgatgcgctccacatgcaggccctgccgccaaga

SEQ ID NO: 2779 - DNA, 3273 bp, Artificial Sequence
  Synthetic Polynucloetide
atggccttaccagtgaccgccttgctcctgccgctggccttgctgctccacgccgccaggccggaagtgcagctggttgaatctggcggaggactggttcagcctggcggatctctgagactgtcttgtgccgccagcggcttcagcttcagcgacttttggatgagctgggtccgacaggcccctggcaaaggacttgaatgggtcgccacaatcagccaggccggcagcgagaaggactacgtggactctgtgaagggcagattcaccatcagccgggacaacgccaagaagtccctgtacctccagatgaacagcctgagagccgaggacaccgccgtgtactattgtgcctctggcgtgtacagcttcgactacagaggccagggcaccctggtcacagtctcttctggtaccggcggaggcggatctggcggcggaggtagcggtggcggaggatctgaattcgacgacatccagatgacacagagccctagcagcctgtctgccagcgtgggagacagagtgaccatcacatgcaaggccagccagggcttcaacaaatacgtggcctggtatcagcagaagcccggcaaggctcctaagctgctgatctactacaccagcacactccagcctggcgtgcccagcagattttctggctctggcagcggcagagactacaccctgacaatatccagcctccagccagaggacttcgccacctactactgtctccagtacggcaacctgctgtacgcctttggacagggcaccaaggtggaaatcaagagactcgaggacctgaagaacgtgttcccacctgaggtggccgtgttcgagcctagcgaggccgagatcagccacacccagaaagccaccctcgtgtgcctggctaccggcttctaccccgaccatgtggaactgtcttggtgggtcaacggcaaagaggtgcacagcggcgtgtctaccgacccccagccactgaaagaacagcccgccctgaacgacagccggtactgcctgagcagcagactgagagtgtccgccaccttctggcagaacccccggaaccacttcagatgccaggtgcagttctacggcctgagcgagaacgacgagtggacccaggacagagccaagcccgtgacccagatcgtgtctgccgaagcctggggcagagccgattgcggatcccagagcttcggcctgctggaccccaagctgtgctacctgctggatggcatcctgttcatctacggcgtgatcctgaccgccctgttcctgagagtgaagttcagcagaagcgccgacgcccctgcctaccagcagggacagaaccaactgtacaacgagctgaacctgggcagacgggaagagtacgacgtgctggacaagcggagaggcagggaccctgagatgggcggaaagccccagcggagaaagaacccccaggaaggactgtataacgaactccagaaagacaagatggccgaagcctacagcgagatcggcatgaagggcgagcggagaagaggcaagggccacgatggcctgtaccagggcctgagcaccgccaccaaggacacctatgacgccctgcacatgcaggccctgcctccaagaagggccaagcgatctggatctggagcaacaaacttctcactactcaaacaagcaggtgacgtggaggagaatcccgggcctactagtatggactggatttggcgcatccttttccttgtcggcgctgctaccggcgcgcattccgggccccagctccagctgcaagagtctggacctggcctggtcaagcctagcgagacactgagcctgacctgtaccgtgtccggcgatagcatcagcagcggcgattactactggggctggatcagacagcctcctggcaaaggactggaatggatcggccacatctactacagcggcgtgacctactacaaccccagcctgaagtccagagtgaccatcagcgtggacaccagccggaaccagttctccctgaagctgtctagcgtgacagccgccgataccgccgtgtactactgcaccagagaggacagcagcaactggcggagtagaggccagggaacactggtcacagttagctctggatccggcggaggcggaagtggaggcggaggatctggcggcggaggctctttcgaagaagttcagcttgtgcagagcggagccgaagtgaagaaacctggggcctctgtgaaggtgtcctgcaaagccagcggctacacctttaccagctactggatcggctgggtccgacaggctcctggacaaggactggaatggatcggcgacatctatcccggcggaggctacaccaactacaacgagaagttcaagggccgcgtgacaatcaccagagacacctctacaagcaccgcctacctggaactgagcagcctgagaagcgaggacaccgccgtgtactactgcgccagactggatggcagcagctacagaggcgctatggattcttggggccagggcacactggtcaccgtttcttctacgcgtatccagaaccctgatcctgccgtgtaccagctgcgggatagcaagagcagcgacaagagcgtgtgtctgttcaccgacttcgacagccagaccaacgtgtcccagagcaaggactccgacgtgtacatcaccgataagaccgtgctggacatgcggagcatggacttcaagagcaactccgccgtggcctggtccaacaagtccgatttcgcctgcgccaacgccttcaacaacagcattatccccgaggacacattcttcccaagccccgagagcagctgcggtacccagagttttgggttgttggaccctaaattgtgctatctgttggacggaatcctgttcatttacggagtgatcctgaccgcattgttcctgcgggttaagttttccagatccgcagacgcacccgcttaccaacaagggcagaaccaactctacaatgaacttaatttggggcggagggaagagtacgacgttctggacaaaaggaggggacgagatcccgagatgggcggaaagcctcagcgaaggaagaatccgcaagaggggctttataacgaactccagaaagataaaatggcagaagcctatagtgagattgggatgaagggagaaaggaggaggggtaaaggtcacgatgggttgtaccaaggattgagcacagccactaaagatacctatgatgcgctccacatgcaggccctgccgccaaga

SEQ ID NO: 2780 - DNA, 3261 bp, Artificial Sequence
  Synthetic Polynucloetide
atggccttaccagtgaccgccttgctcctgccgctggccttgctgctccacgccgccaggccggaagtgcagctggttgaatctggcggaggactggttcagcctggcggatctctgagactgtcttgtgccgccagcggcttcagcttcagcgacttttggatgagctgggtccgacaggcccctggcaaaggacttgaatgggtcgccacaatcagccaggccggcagcgagaaggactacgtggactctgtgaagggcagattcaccatcagccgggacaacgccaagaagtccctgtacctccagatgaacagcctgagagccgaggacaccgccgtgtactattgtgcctctggcgtgtacagcttcgactacagaggccagggcaccctggtcacagtctcttctggtaccggcggaggcggatctggcggcggaggtagcggtggcggaggatctgaattcgacgacatccagatgacacagagccctagcagcctgtctgccagcgtgggagacagagtgaccatcacctgtagagccagccaggacatccggtactacctgaactggtatcagcagaagcccggcaaggcccctaagctgctgatctatgtggcctccagcctccagagcggagtgccttctagattttctggcagcggctccggcaccgagtttaccctgacagtgtctagcttgcagcccgaggacttcgccacctactactgcctgcaagtgtacagcacccctcggacctttggacagggcaccaaggtggaaatcaaactcgaggacctgaagaacgtgttcccacctgaggtggccgtgttcgagcctagcgaggccgagatcagccacacccagaaagccaccctcgtgtgcctggctaccggcttctaccccgaccatgtggaactgtcttggtgggtcaacggcaaagaggtgcacagcggcgtgtctaccgacccccagccactgaaagaacagcccgccctgaacgacagccggtactgcctgagcagcagactgagagtgtccgccaccttctggcagaacccccggaaccacttcagatgccaggtgcagttctacggcctgagcgagaacgacgagtggacccaggacagagccaagcccgtgacccagatcgtgtctgccgaagcctggggcagagccgattgcggatcccagagcttcggcctgctggaccccaagctgtgctacctgctggatggcatcctgttcatctacggcgtgatcctgaccgccctgttcctgagagtgaagttcagcagaagcgccgacgcccctgcctaccagcagggacagaaccaactgtacaacgagctgaacctgggcagacgggaagagtacgacgtgctggacaagcggagaggcagggaccctgagatgggcggaaagccccagcggagaaagaacccccaggaaggactgtataacgaactccagaaagacaagatggccgaagcctacagcgagatcggcatgaagggcgagcggagaagaggcaagggccacgatggcctgtaccagggcctgagcaccgccaccaaggacacctatgacgccctgcacatgcaggccctgcctccaagaagggccaagcgatctggatctggagcaacaaacttctcactactcaaacaagcaggtgacgtggaggagaatcccgggcctactagtatggactggatttggcgcatccttttccttgtcggcgctgctaccggcgcgcattccgggccccagctccagctgcaagagtctggacctggcctggtcaagcctagcgagacactgagcctgacctgtaccgtgtccggcgatagcatcagcagcggcgattactactggggctggatcagacagcctcctggcaaaggactggaatggatcggccacatctactacagcggcgtgacctactacaaccccagcctgaagtccagagtgaccatcagcgtggacaccagccggaaccagttctccctgaagctgtctagcgtgacagccgccgataccgccgtgtactactgcaccagagaggacagcagcaactggcggagtagaggccagggaacactggtcacagttagctctggatccggcggaggcggaagtggaggcggaggatctggcggcggaggctctttcgaagaagtgcagcttgttgaatctggcggcggactggctaagcctggcggatctctgagactgtcttgtgccgccagcggcttccggttcaccttcaacaactactacatggactgggtccgacaggcccctggacaaggacttgaatgggtgtccagaatcagcagcagcggcgaccctacttggtacgccgattctgtgaagggcagattcaccatcagcagagagaacgccaagaacaccctgttcctccagatgaactccctgagagccgaggacaccgccgtgtactattgtgcctctctgaccaccggcagcgattcttggggacagggcgtgctggttaccgtgtcatctacgcgtatccagaaccctgatcctgccgtgtaccagctgcgggatagcaagagcagcgacaagagcgtgtgtctgttcaccgacttcgacagccagaccaacgtgtcccagagcaaggactccgacgtgtacatcaccgataagaccgtgctggacatgcggagcatggacttcaagagcaactccgccgtggcctggtccaacaagtccgatttcgcctgcgccaacgccttcaacaacagcattatccccgaggacacattcttcccaagccccgagagcagctgcggtacccagagttttgggttgttggaccctaaattgtgctatctgttggacggaatcctgttcatttacggagtgatcctgaccgcattgttcctgcgggttaagttttccagatccgcagacgcacccgcttaccaacaagggcagaaccaactctacaatgaacttaatttggggcggagggaagagtacgacgttctggacaaaaggaggggacgagatcccgagatgggcggaaagcctcagcgaaggaagaatccgcaagaggggctttataacgaactccagaaagataaaatggcagaagcctatagtgagattgggatgaagggagaaaggaggaggggtaaaggtcacgatgggttgtaccaaggattgagcacagccactaaagatacctatgatgcgctccacatgcaggccctgccgccaaga

SEQ ID NO: 2781 - DNA, 3261 bp, Artificial Sequence
  Synthetic Polynucloetide
atggccttaccagtgaccgccttgctcctgccgctggccttgctgctccacgccgccaggccggaagtgcagctggttgaatctggcggaggactggttcagcctggcggatctctgagactgtcttgtgccgccagcggcttcagcttcagcgacttttggatgagctgggtccgacaggcccctggcaaaggacttgaatgggtcgccacaatcagccaggccggcagcgagaaggactacgtggactctgtgaagggcagattcaccatcagccgggacaacgccaagaagtccctgtacctccagatgaacagcctgagagccgaggacaccgccgtgtactattgtgcctctggcgtgtacagcttcgactacagaggccagggcaccctggtcacagtctcttctggtaccggcggaggcggatctggcggcggaggtagcggtggcggaggatctgaattcgagatcgtgatgacacagagccccgccacactgagtgtgtctccaggcgaaagagccacactgtcctgtagagccagccagagcgtgtccagaaacctggcctggtatcagcagaagcctggacaggctccccggctgttgatctacggcgcttctacaagagccaccggcattcccgccagattttctggctctggcagcggcaccgagttcaccctgacaatcggaagcctccagagcgaggacttcgccgtgtactactgccagcagtacaagacctggcctcggacctttggacagggcaccaacgtggaaatcaaactcgaggacctgaagaacgtgttcccacctgaggtggccgtgttcgagcctagcgaggccgagatcagccacacccagaaagccaccctcgtgtgcctggctaccggcttctaccccgaccatgtggaactgtcttggtgggtcaacggcaaagaggtgcacagcggcgtgtctaccgacccccagccactgaaagaacagcccgccctgaacgacagccggtactgcctgagcagcagactgagagtgtccgccaccttctggcagaacccccggaaccacttcagatgccaggtgcagttctacggcctgagcgagaacgacgagtggacccaggacagagccaagcccgtgacccagatcgtgtctgccgaagcctggggcagagccgattgcggatcccagagcttcggcctgctggaccccaagctgtgctacctgctggatggcatcctgttcatctacggcgtgatcctgaccgccctgttcctgagagtgaagttcagcagaagcgccgacgcccctgcctaccagcagggacagaaccaactgtacaacgagctgaacctgggcagacgggaagagtacgacgtgctggacaagcggagaggcagggaccctgagatgggcggaaagccccagcggagaaagaacccccaggaaggactgtataacgaactccagaaagacaagatggccgaagcctacagcgagatcggcatgaagggcgagcggagaagaggcaagggccacgatggcctgtaccagggcctgagcaccgccaccaaggacacctatgacgccctgcacatgcaggccctgcctccaagaagggccaagcgatctggatctggagcaacaaacttctcactactcaaacaagcaggtgacgtggaggagaatcccgggcctactagtatggactggatttggcgcatccttttccttgtcggcgctgctaccggcgcgcattccgggccccagctccagctgcaagagtctggacctggcctggtcaagcctagcgagacactgagcctgacctgtaccgtgtccggcgatagcatcagcagcggcgattactactggggctggatcagacagcctcctggcaaaggactggaatggatcggccacatctactacagcggcgtgacctactacaaccccagcctgaagtccagagtgaccatcagcgtggacaccagccggaaccagttctccctgaagctgtctagcgtgacagccgccgataccgccgtgtactactgcaccagagaggacagcagcaactggcggagtagaggccagggaacactggtcacagttagctctggatccggcggaggcggaagtggaggcggaggatctggcggcggaggctctttcgaacaagttcagctgcaacaatggggagccggcctgctgaagcctagcgaaacactgtctctgacctgcgccgtgttcggcggctctttcagcggctactactggtcctggatcagacagcctcctggcaaaggactggaatggatcggcgagatcaaccaccggggcaacaccaacgacaaccccagcctgaaaagcagagtgaccatcagcgtggacaccagcaagaaccagttcgccctgaagctgagcagcgtgacagccgctgataccgccgtgtattattgcgccagagagcggggctacacctacggcaatttcgatcactggggccagggcaccctggtcacagtttcttctacgcgtatccagaaccctgatcctgccgtgtaccagctgcgggatagcaagagcagcgacaagagcgtgtgtctgttcaccgacttcgacagccagaccaacgtgtcccagagcaaggactccgacgtgtacatcaccgataagaccgtgctggacatgcggagcatggacttcaagagcaactccgccgtggcctggtccaacaagtccgatttcgcctgcgccaacgccttcaacaacagcattatccccgaggacacattcttcccaagccccgagagcagctgcggtacccagagttttgggttgttggaccctaaattgtgctatctgttggacggaatcctgttcatttacggagtgatcctgaccgcattgttcctgcgggttaagttttccagatccgcagacgcacccgcttaccaacaagggcagaaccaactctacaatgaacttaatttggggcggagggaagagtacgacgttctggacaaaaggaggggacgagatcccgagatgggcggaaagcctcagcgaaggaagaatccgcaagaggggctttataacgaactccagaaagataaaatggcagaagcctatagtgagattgggatgaagggagaaaggaggaggggtaaaggtcacgatgggttgtaccaaggattgagcacagccactaaagatacctatgatgcgctccacatgcaggccctgccgccaaga

SEQ ID NO: 2782 - DNA, 3264 bp, Artificial Sequence
  Synthetic Polynucloetide
atggccttaccagtgaccgccttgctcctgccgctggccttgctgctccacgccgccaggccggaagtgcagctggttgaatctggcggaggactggttcagcctggcggatctctgagactgtcttgtgccgccagcggcttcagcttcagcgacttttggatgagctgggtccgacaggcccctggcaaaggacttgaatgggtcgccacaatcagccaggccggcagcgagaaggactacgtggactctgtgaagggcagattcaccatcagccgggacaacgccaagaagtccctgtacctccagatgaacagcctgagagccgaggacaccgccgtgtactattgtgcctctggcgtgtacagcttcgactacagaggccagggcaccctggtcacagtctcttctggtaccggcggaggcggatctggcggcggaggtagcggtggcggaggatctgaattcgagatcgtgatgacccctagcagcgccacactgagtgtgtctccaggcgaaagagccacactgtcctgtagagccagccagagcgtgtccagaaacctggcctggtatcagcagaagcctggacaggctccccggctgttgatctacggcgcttctacaagagccaccggcattcccgccagattttctggctctggcagcggcaccgagttcaccctgacaatctctagcctccagagcgaggacttcgccgtgtactactgccaccagtacagcaactggatgtgcagcttcggccagggcaccaagctggaaatcaaactcgaggacctgaagaacgtgttcccacctgaggtggccgtgttcgagcctagcgaggccgagatcagccacacccagaaagccaccctcgtgtgcctggctaccggcttctaccccgaccatgtggaactgtcttggtgggtcaacggcaaagaggtgcacagcggcgtgtctaccgacccccagccactgaaagaacagcccgccctgaacgacagccggtactgcctgagcagcagactgagagtgtccgccaccttctggcagaacccccggaaccacttcagatgccaggtgcagttctacggcctgagcgagaacgacgagtggacccaggacagagccaagcccgtgacccagatcgtgtctgccgaagcctggggcagagccgattgcggatcccagagcttcggcctgctggaccccaagctgtgctacctgctggatggcatcctgttcatctacggcgtgatcctgaccgccctgttcctgagagtgaagttcagcagaagcgccgacgcccctgcctaccagcagggacagaaccaactgtacaacgagctgaacctgggcagacgggaagagtacgacgtgctggacaagcggagaggcagggaccctgagatgggcggaaagccccagcggagaaagaacccccaggaaggactgtataacgaactccagaaagacaagatggccgaagcctacagcgagatcggcatgaagggcgagcggagaagaggcaagggccacgatggcctgtaccagggcctgagcaccgccaccaaggacacctatgacgccctgcacatgcaggccctgcctccaagaagggccaagcgatctggatctggagcaacaaacttctcactactcaaacaagcaggtgacgtggaggagaatcccgggcctactagtatggactggatttggcgcatccttttccttgtcggcgctgctaccggcgcgcattccgggccccagctccagctgcaagagtctggacctggcctggtcaagcctagcgagacactgagcctgacctgtaccgtgtccggcgatagcatcagcagcggcgattactactggggctggatcagacagcctcctggcaaaggactggaatggatcggccacatctactacagcggcgtgacctactacaaccccagcctgaagtccagagtgaccatcagcgtggacaccagccggaaccagttctccctgaagctgtctagcgtgacagccgccgataccgccgtgtactactgcaccagagaggacagcagcaactggcggagtagaggccagggaacactggtcacagttagctctggatccggcggaggcggaagtggaggcggaggatctggcggcggaggctctttcgaagaagttcagctccttgagtcaggtggcggcctggttcaacctggcggatctctgagactgagctgtgccgccagcggcttcacctttagcagatacgccatgaactgggtccgacaggcccctggcaaaggactggaatgggtgtccggcatctctggaagcggcggcagaacctactacgccgattctgtgaagggcagattcaccatcagccgggacaacagcaagaacaccctgtacctccagatgaacagcctgagagccgaggacacagccgtgtattattgcgccaaggaccgggacttttggagcggcccttttgactattggggccagggaaccctggtcaccgttagctctacgcgtatccagaaccctgatcctgccgtgtaccagctgcgggatagcaagagcagcgacaagagcgtgtgtctgttcaccgacttcgacagccagaccaacgtgtcccagagcaaggactccgacgtgtacatcaccgataagaccgtgctggacatgcggagcatggacttcaagagcaactccgccgtggcctggtccaacaagtccgatttcgcctgcgccaacgccttcaacaacagcattatccccgaggacacattcttcccaagccccgagagcagctgcggtacccagagttttgggttgttggaccctaaattgtgctatctgttggacggaatcctgttcatttacggagtgatcctgaccgcattgttcctgcgggttaagttttccagatccgcagacgcacccgcttaccaacaagggcagaaccaactctacaatgaacttaatttggggcggagggaagagtacgacgttctggacaaaaggaggggacgagatcccgagatgggcggaaagcctcagcgaaggaagaatccgcaagaggggctttataacgaactccagaaagataaaatggcagaagcctatagtgagattgggatgaagggagaaaggaggaggggtaaaggtcacgatgggttgtaccaaggattgagcacagccactaaagatacctatgatgcgctccacatgcaggccctgccgccaaga

SEQ ID NO: 2783 - DNA, 3279 bp, Artificial Sequence
  Synthetic Polynucloetide
atggccttaccagtgaccgccttgctcctgccgctggccttgctgctccacgccgccaggccggaagtgcagctggttgaatctggcggaggactggttcagcctggcggatctctgagactgtcttgtgccgccagcggcttcagcttcagcgacttttggatgagctgggtccgacaggcccctggcaaaggacttgaatgggtcgccacaatcagccaggccggcagcgagaaggactacgtggactctgtgaagggcagattcaccatcagccgggacaacgccaagaagtccctgtacctccagatgaacagcctgagagccgaggacaccgccgtgtactattgtgcctctggcgtgtacagcttcgactacagaggccagggcaccctggtcacagtctcttctggtaccggcggaggcggatctggcggcggaggtagcggtggcggaggatctgaattcgacatccagatgacccagagccccagcagcctgtctgccagcgtgggcgacagagtgaccatcacatgcaaggccagcaagaacatcagaagctacctggcctggtatcagcagaagcccggcaaggcccccaagctgctgatctacagcggcagcacactgcacagcggcgtgcccagcagattttccggctctggcagcggcaccgacttcaccctgaccatctctagcctccagcccgaggacttcgccacctactactgccagcagcaccacgagtaccccctgacattcggccagggcaccaaggtggaaatcaagagactcgaggacctgaagaacgtgttcccacctgaggtggccgtgttcgagcctagcgaggccgagatcagccacacccagaaagccaccctcgtgtgcctggctaccggcttctaccccgaccatgtggaactgtcttggtgggtcaacggcaaagaggtgcacagcggcgtgtctaccgacccccagccactgaaagaacagcccgccctgaacgacagccggtactgcctgagcagcagactgagagtgtccgccaccttctggcagaacccccggaaccacttcagatgccaggtgcagttctacggcctgagcgagaacgacgagtggacccaggacagagccaagcccgtgacccagatcgtgtctgccgaagcctggggcagagccgattgcggatcccagagcttcggcctgctggaccccaagctgtgctacctgctggatggcatcctgttcatctacggcgtgatcctgaccgccctgttcctgagagtgaagttcagcagaagcgccgacgcccctgcctaccagcagggacagaaccaactgtacaacgagctgaacctgggcagacgggaagagtacgacgtgctggacaagcggagaggcagggaccctgagatgggcggaaagccccagcggagaaagaacccccaggaaggactgtataacgaactccagaaagacaagatggccgaagcctacagcgagatcggcatgaagggcgagcggagaagaggcaagggccacgatggcctgtaccagggcctgagcaccgccaccaaggacacctatgacgccctgcacatgcaggccctgcctccaagaagggccaagcgatctggatctggagcaacaaacttctcactactcaaacaagcaggtgacgtggaggagaatcccgggcctactagtatggactggatttggcgcatccttttccttgtcggcgctgctaccggcgcgcattccgggccccagctccagctgcaagagtctggacctggcctggtcaagcctagcgagacactgagcctgacctgtaccgtgtccggcgatagcatcagcagcggcgattactactggggctggatcagacagcctcctggcaaaggactggaatggatcggccacatctactacagcggcgtgacctactacaaccccagcctgaagtccagagtgaccatcagcgtggacaccagccggaaccagttctccctgaagctgtctagcgtgacagccgccgataccgccgtgtactactgcaccagagaggacagcagcaactggcggagtagaggccagggaacactggtcacagttagctctggatccggcggaggcggaagtggaggcggaggatctggcggcggaggctctttcgaacaggtgcaactccaggaatctggccccggactcgtgaagcccagcgagacactgagcctgacctgtaccgtgtccggctacaccatcaccagcggctacgactggtcctggatcagacagcctcctggcaagggcctggaatggatcggctacatcaactacggcggctccaccaactacaagcccagcctgggaagccgcgtgacaatcagcgtggacacctccaagaaccagttcagcctgaagctgagcagcgtgacagccgccgataccgccgtgtactactgcgcccggtacaacgagtacaagagctacatctacgattggtacttcgacttctggggccagggaaccctcgtgaccgtgtctagtacgcgtatccagaaccctgatcctgccgtgtaccagctgcgggatagcaagagcagcgacaagagcgtgtgtctgttcaccgacttcgacagccagaccaacgtgtcccagagcaaggactccgacgtgtacatcaccgataagaccgtgctggacatgcggagcatggacttcaagagcaactccgccgtggcctggtccaacaagtccgatttcgcctgcgccaacgccttcaacaacagcattatccccgaggacacattcttcccaagccccgagagcagctgcggtacccagagttttgggttgttggaccctaaattgtgctatctgttggacggaatcctgttcatttacggagtgatcctgaccgcattgttcctgcgggttaagttttccagatccgcagacgcacccgcttaccaacaagggcagaaccaactctacaatgaacttaatttggggcggagggaagagtacgacgttctggacaaaaggaggggacgagatcccgagatgggcggaaagcctcagcgaaggaagaatccgcaagaggggctttataacgaactccagaaagataaaatggcagaagcctatagtgagattgggatgaagggagaaaggaggaggggtaaaggtcacgatgggttgtaccaaggattgagcacagccactaaagatacctatgatgcgctccacatgcaggccctgccgccaaga

SEQ ID NO: 2784 - DNA, 3285 bp, Artificial Sequence
  Synthetic Polynucloetide
atggccttaccagtgaccgccttgctcctgccgctggccttgctgctccacgccgccaggccggaagtgcagctggttgaatctggcggaggactggttcagcctggcggatctctgagactgtcttgtgccgccagcggcttcagcttcagcgacttttggatgagctgggtccgacaggcccctggcaaaggacttgaatgggtcgccacaatcagccaggccggcagcgagaaggactacgtggactctgtgaagggcagattcaccatcagccgggacaacgccaagaagtccctgtacctccagatgaacagcctgagagccgaggacaccgccgtgtactattgtgcctctggcgtgtacagcttcgactacagaggccagggcaccctggtcacagtctcttctggtaccggcggaggcggatctggcggcggaggtagcggtggcggaggatctgaattccagtctgtggtcacacagcctccatccgtgtctgctgcccctggacagaaagtgaccatctcctgtagcggcagcagcagcaacatcggcaacaactacgtgtcctggtatcagcagctccccggcacagctcccaaactgctgatctacgacaacaacaagcggcccagcggcatccccgatagattttctggcagcaagagcggcaccagcgccacactgggaattaccggacttcagacaggcgacgaggccgactactactgtggcacatgggatggcagcctgtacaccatgcttttcggcggaggcaccaagctgacagtgcttctcgaggacctgaagaacgtgttcccacctgaggtggccgtgttcgagcctagcgaggccgagatcagccacacccagaaagccaccctcgtgtgcctggctaccggcttctaccccgaccatgtggaactgtcttggtgggtcaacggcaaagaggtgcacagcggcgtgtctaccgacccccagccactgaaagaacagcccgccctgaacgacagccggtactgcctgagcagcagactgagagtgtccgccaccttctggcagaacccccggaaccacttcagatgccaggtgcagttctacggcctgagcgagaacgacgagtggacccaggacagagccaagcccgtgacccagatcgtgtctgccgaagcctggggcagagccgattgcggatcccagagcttcggcctgctggaccccaagctgtgctacctgctggatggcatcctgttcatctacggcgtgatcctgaccgccctgttcctgagagtgaagttcagcagaagcgccgacgcccctgcctaccagcagggacagaaccaactgtacaacgagctgaacctgggcagacgggaagagtacgacgtgctggacaagcggagaggcagggaccctgagatgggcggaaagccccagcggagaaagaacccccaggaaggactgtataacgaactccagaaagacaagatggccgaagcctacagcgagatcggcatgaagggcgagcggagaagaggcaagggccacgatggcctgtaccagggcctgagcaccgccaccaaggacacctatgacgccctgcacatgcaggccctgcctccaagaagggccaagcgatctggatctggagcaacaaacttctcactactcaaacaagcaggtgacgtggaggagaatcccgggcctactagtatggactggatttggcgcatccttttccttgtcggcgctgctaccggcgcgcattccgggccccagctccagctgcaagagtctggacctggcctggtcaagcctagcgagacactgagcctgacctgtaccgtgtccggcgatagcatcagcagcggcgattactactggggctggatcagacagcctcctggcaaaggactggaatggatcggccacatctactacagcggcgtgacctactacaaccccagcctgaagtccagagtgaccatcagcgtggacaccagccggaaccagttctccctgaagctgtctagcgtgacagccgccgataccgccgtgtactactgcaccagagaggacagcagcaactggcggagtagaggccagggaacactggtcacagttagctctggatccggcggaggcggaagtggaggcggaggatctggcggcggaggctctttcgaagaagtgcaactggtggaatctggcggcggactggttaagcctggcggatctctgagactgtcttgtgccgccagcggcttcaccttcagcaatgcctggatgagctgggttcgacaggcccctggaaaaggactggaatgggtcggattcatccggtccaaagcctacggcggcaccacagaatatgccgcctctgtgaagggcagattcaccatcagccgggacgacagcaagtctatcgcctacctccagatgaacaacctgaaaaccgaggacaccgccgtgtactactgcgccagagatggcctgtacagcagctcttggtacgacagcgattactggggccagggcacactggtcacagtgtcatctacgcgtatccagaaccctgatcctgccgtgtaccagctgcgggatagcaagagcagcgacaagagcgtgtgtctgttcaccgacttcgacagccagaccaacgtgtcccagagcaaggactccgacgtgtacatcaccgataagaccgtgctggacatgcggagcatggacttcaagagcaactccgccgtggcctggtccaacaagtccgatttcgcctgcgccaacgccttcaacaacagcattatccccgaggacacattcttcccaagccccgagagcagctgcggtacccagagttttgggttgttggaccctaaattgtgctatctgttggacggaatcctgttcatttacggagtgatcctgaccgcattgttcctgcgggttaagttttccagatccgcagacgcacccgcttaccaacaagggcagaaccaactctacaatgaacttaatttggggcggagggaagagtacgacgttctggacaaaaggaggggacgagatcccgagatgggcggaaagcctcagcgaaggaagaatccgcaagaggggctttataacgaactccagaaagataaaatggcagaagcctatagtgagattgggatgaagggagaaaggaggaggggtaaaggtcacgatgggttgtaccaaggattgagcacagccactaaagatacctatgatgcgctccacatgcaggccctgccgccaaga

SEQ ID NO: 2785 - DNA, 3300 bp, Artificial Sequence
  Synthetic Polynucloetide
atggccttaccagtgaccgccttgctcctgccgctggccttgctgctccacgccgccaggccggaagtgcagctggttgaatctggcggaggactggttcagcctggcggatctctgagactgtcttgtgccgccagcggcttcagcttcagcgacttttggatgagctgggtccgacaggcccctggcaaaggacttgaatgggtcgccacaatcagccaggccggcagcgagaaggactacgtggactctgtgaagggcagattcaccatcagccgggacaacgccaagaagtccctgtacctccagatgaacagcctgagagccgaggacaccgccgtgtactattgtgcctctggcgtgtacagcttcgactacagaggccagggcaccctggtcacagtctcttctggtaccggcggaggcggatctggcggcggaggtagcggtggcggaggatctgaattccagtctgtgctgacacagcctcctagtgtgtctggcgctcctggacagagagtgaccatctcttgtaccggcagcagcagcaatatcggagccggctatgacgtgcactggtatcagcagctccctggcacagcccctaaactgctgatcttcggcaacagcaacagacccagcggcgtgcccgatagattcagcggctttaagagcggcacaagcgccagcctggctatcactggactgcaagccgaggacgaggccgactacttctgccagagctacgatagcagcctgagcggcagcggagtgtttggcacaggcaccaaagtgacagtgcttggcctcgaggacctgaagaacgtgttcccacctgaggtggccgtgttcgagcctagcgaggccgagatcagccacacccagaaagccaccctcgtgtgcctggctaccggcttctaccccgaccatgtggaactgtcttggtgggtcaacggcaaagaggtgcacagcggcgtgtctaccgacccccagccactgaaagaacagcccgccctgaacgacagccggtactgcctgagcagcagactgagagtgtccgccaccttctggcagaacccccggaaccacttcagatgccaggtgcagttctacggcctgagcgagaacgacgagtggacccaggacagagccaagcccgtgacccagatcgtgtctgccgaagcctggggcagagccgattgcggatcccagagcttcggcctgctggaccccaagctgtgctacctgctggatggcatcctgttcatctacggcgtgatcctgaccgccctgttcctgagagtgaagttcagcagaagcgccgacgcccctgcctaccagcagggacagaaccaactgtacaacgagctgaacctgggcagacgggaagagtacgacgtgctggacaagcggagaggcagggaccctgagatgggcggaaagccccagcggagaaagaacccccaggaaggactgtataacgaactccagaaagacaagatggccgaagcctacagcgagatcggcatgaagggcgagcggagaagaggcaagggccacgatggcctgtaccagggcctgagcaccgccaccaaggacacctatgacgccctgcacatgcaggccctgcctccaagaagggccaagcgatctggatctggagcaacaaacttctcactactcaaacaagcaggtgacgtggaggagaatcccgggcctactagtatggactggatttggcgcatccttttccttgtcggcgctgctaccggcgcgcattccgggccccagctccagctgcaagagtctggacctggcctggtcaagcctagcgagacactgagcctgacctgtaccgtgtccggcgatagcatcagcagcggcgattactactggggctggatcagacagcctcctggcaaaggactggaatggatcggccacatctactacagcggcgtgacctactacaaccccagcctgaagtccagagtgaccatcagcgtggacaccagccggaaccagttctccctgaagctgtctagcgtgacagccgccgataccgccgtgtactactgcaccagagaggacagcagcaactggcggagtagaggccagggaacactggtcacagttagctctggatccggcggaggcggaagtggaggcggaggatctggcggcggaggctctttcgaacaaatgcaactggttcaaagcggcggtggcctggtgcaacctggaagaagtctgagactgagctgtgccgccagcggcttcaccttcgatgattacgccatgcactgggtccgacaggcccctggaaaaggactggaatgggtgtccggcatctcctggaatagcggctctatcggctacgccgacagcgtgaagggcagattcaccatcagccgggacaacgccaagaacagcctgtacctccagatgaactccctgagagccgaggatacagccctgtactactgcgccaaggacatccacagcggcagctactacggcctgctgtactacgctatggacgtgtggggccagggcacaaccgtgacagtttcttctacgcgtatccagaaccctgatcctgccgtgtaccagctgcgggatagcaagagcagcgacaagagcgtgtgtctgttcaccgacttcgacagccagaccaacgtgtcccagagcaaggactccgacgtgtacatcaccgataagaccgtgctggacatgcggagcatggacttcaagagcaactccgccgtggcctggtccaacaagtccgatttcgcctgcgccaacgccttcaacaacagcattatccccgaggacacattcttcccaagccccgagagcagctgcggtacccagagttttgggttgttggaccctaaattgtgctatctgttggacggaatcctgttcatttacggagtgatcctgaccgcattgttcctgcgggttaagttttccagatccgcagacgcacccgcttaccaacaagggcagaaccaactctacaatgaacttaatttggggcggagggaagagtacgacgttctggacaaaaggaggggacgagatcccgagatgggcggaaagcctcagcgaaggaagaatccgcaagaggggctttataacgaactccagaaagataaaatggcagaagcctatagtgagattgggatgaagggagaaaggaggaggggtaaaggtcacgatgggttgtaccaaggattgagcacagccactaaagatacctatgatgcgctccacatgcaggccctgccgccaaga

SEQ ID NO: 2786 - DNA, 3300 bp, Artificial Sequence
  Synthetic Polynucloetide
atggccttaccagtgaccgccttgctcctgccgctggccttgctgctccacgccgccaggccggaagtgcagctggttgaatctggcggaggactggttcagcctggcggatctctgagactgtcttgtgccgccagcggcttcagcttcagcgacttttggatgagctgggtccgacaggcccctggcaaaggacttgaatgggtcgccacaatcagccaggccggcagcgagaaggactacgtggactctgtgaagggcagattcaccatcagccgggacaacgccaagaagtccctgtacctccagatgaacagcctgagagccgaggacaccgccgtgtactattgtgcctctggcgtgtacagcttcgactacagaggccagggcaccctggtcacagtctcttctggtaccggcggaggcggatctggcggcggaggtagcggtggcggaggatctgaattcctgcctgttctgacacagcctccatctgcctctggcacacctggacagagagtgaccatcagctgtagcggcagaagcagcaacatcggcagcaacagcgtgaactggtacagacagcttcctggcgctgcccctaagctgctgatctacagcaacaaccagcggcctcctggcgtgccagtcagattttctggcagcaagagcggcacaagcgccagcctggctatttctggactccagtctgaggacgaggccacctactactgtgccacctgggacgacaacctgaacgtgcactacgtgttcggcaccggcaccaaagtgacagtgcttggaagtagactcgaggacctgaagaacgtgttcccacctgaggtggccgtgttcgagcctagcgaggccgagatcagccacacccagaaagccaccctcgtgtgcctggctaccggcttctaccccgaccatgtggaactgtcttggtgggtcaacggcaaagaggtgcacagcggcgtgtctaccgacccccagccactgaaagaacagcccgccctgaacgacagccggtactgcctgagcagcagactgagagtgtccgccaccttctggcagaacccccggaaccacttcagatgccaggtgcagttctacggcctgagcgagaacgacgagtggacccaggacagagccaagcccgtgacccagatcgtgtctgccgaagcctggggcagagccgattgcggatcccagagcttcggcctgctggaccccaagctgtgctacctgctggatggcatcctgttcatctacggcgtgatcctgaccgccctgttcctgagagtgaagttcagcagaagcgccgacgcccctgcctaccagcagggacagaaccaactgtacaacgagctgaacctgggcagacgggaagagtacgacgtgctggacaagcggagaggcagggaccctgagatgggcggaaagccccagcggagaaagaacccccaggaaggactgtataacgaactccagaaagacaagatggccgaagcctacagcgagatcggcatgaagggcgagcggagaagaggcaagggccacgatggcctgtaccagggcctgagcaccgccaccaaggacacctatgacgccctgcacatgcaggccctgcctccaagaagggccaagcgatctggatctggagcaacaaacttctcactactcaaacaagcaggtgacgtggaggagaatcccgggcctactagtatggactggatttggcgcatccttttccttgtcggcgctgctaccggcgcgcattccgggccccagctccagctgcaagagtctggacctggcctggtcaagcctagcgagacactgagcctgacctgtaccgtgtccggcgatagcatcagcagcggcgattactactggggctggatcagacagcctcctggcaaaggactggaatggatcggccacatctactacagcggcgtgacctactacaaccccagcctgaagtccagagtgaccatcagcgtggacaccagccggaaccagttctccctgaagctgtctagcgtgacagccgccgataccgccgtgtactactgcaccagagaggacagcagcaactggcggagtagaggccagggaacactggtcacagttagctctggatccggcggaggcggaagtggaggcggaggatctggcggcggaggctctttcgaacttgaaatggctcaggtgcagctggtgcagagcggagccgaagtgaagaaacctggcagcagcgtgaaggtgtcctgcaaagcttctggcggcaccttcagcagctacgccatctcttgggttcgacaggcccctggacaaggactggaatggatgggcagaatcatccccatcctgggaatcgccaactacgcccagaaattccagggcagagtgacaatcaccgccgacaagagcaccagcaccgcctacatggaactgagcagcctgagaagcgaggacaccgccgtgtactattgtgcaagaggcggctactacagccacgacatgtggagcgaagattggggccagggcacactggtcacagtgtcatctacgcgtatccagaaccctgatcctgccgtgtaccagctgcgggatagcaagagcagcgacaagagcgtgtgtctgttcaccgacttcgacagccagaccaacgtgtcccagagcaaggactccgacgtgtacatcaccgataagaccgtgctggacatgcggagcatggacttcaagagcaactccgccgtggcctggtccaacaagtccgatttcgcctgcgccaacgccttcaacaacagcattatccccgaggacacattcttcccaagccccgagagcagctgcggtacccagagttttgggttgttggaccctaaattgtgctatctgttggacggaatcctgttcatttacggagtgatcctgaccgcattgttcctgcgggttaagttttccagatccgcagacgcacccgcttaccaacaagggcagaaccaactctacaatgaacttaatttggggcggagggaagagtacgacgttctggacaaaaggaggggacgagatcccgagatgggcggaaagcctcagcgaaggaagaatccgcaagaggggctttataacgaactccagaaagataaaatggcagaagcctatagtgagattgggatgaagggagaaaggaggaggggtaaaggtcacgatgggttgtaccaaggattgagcacagccactaaagatacctatgatgcgctccacatgcaggccctgccgccaaga

SEQ ID NO: 2787 - DNA, 3282 bp, Artificial Sequence
  Synthetic Polynucloetide
atggccttaccagtgaccgccttgctcctgccgctggccttgctgctccacgccgccaggccggaagtgcagctggttgaatctggcggaggactggttcagcctggcggatctctgagactgtcttgtgccgccagcggcttcagcttcagcgacttttggatgagctgggtccgacaggcccctggcaaaggacttgaatgggtcgccacaatcagccaggccggcagcgagaaggactacgtggactctgtgaagggcagattcaccatcagccgggacaacgccaagaagtccctgtacctccagatgaacagcctgagagccgaggacaccgccgtgtactattgtgcctctggcgtgtacagcttcgactacagaggccagggcaccctggtcacagtctcttctggtaccggcggaggcggatctggcggcggaggtagcggtggcggaggatctgaattcgacttcgtgatgacacagagccctgatagcctggccgtgtctctcggcgagcgagtgaccatgagctgcaagtctagccagagcctgctgaacagcggcaaccagaagaactacctgacctggtatcagcagaagcccggccagcctcctaagctgctgatctactgggccagcaccagagaaagcggcgtgcccgatagattttctggctctggcagcggcaccgacttcaccctgacaatttctagcctgcaagccgaggacgtggccgtgtactactgccagaacgactacagctacccctacaccttcggccagggcaccaagctggaaatcaaactcgaggacctgaagaacgtgttcccacctgaggtggccgtgttcgagcctagcgaggccgagatcagccacacccagaaagccaccctcgtgtgcctggctaccggcttctaccccgaccatgtggaactgtcttggtgggtcaacggcaaagaggtgcacagcggcgtgtctaccgacccccagccactgaaagaacagcccgccctgaacgacagccggtactgcctgagcagcagactgagagtgtccgccaccttctggcagaacccccggaaccacttcagatgccaggtgcagttctacggcctgagcgagaacgacgagtggacccaggacagagccaagcccgtgacccagatcgtgtctgccgaagcctggggcagagccgattgcggatcccagagcttcggcctgctggaccccaagctgtgctacctgctggatggcatcctgttcatctacggcgtgatcctgaccgccctgttcctgagagtgaagttcagcagaagcgccgacgcccctgcctaccagcagggacagaaccaactgtacaacgagctgaacctgggcagacgggaagagtacgacgtgctggacaagcggagaggcagggaccctgagatgggcggaaagccccagcggagaaagaacccccaggaaggactgtataacgaactccagaaagacaagatggccgaagcctacagcgagatcggcatgaagggcgagcggagaagaggcaagggccacgatggcctgtaccagggcctgagcaccgccaccaaggacacctatgacgccctgcacatgcaggccctgcctccaagaagggccaagcgatctggatctggagcaacaaacttctcactactcaaacaagcaggtgacgtggaggagaatcccgggcctactagtatggactggatttggcgcatccttttccttgtcggcgctgctaccggcgcgcattccgggccccagctccagctgcaagagtctggacctggcctggtcaagcctagcgagacactgagcctgacctgtaccgtgtccggcgatagcatcagcagcggcgattactactggggctggatcagacagcctcctggcaaaggactggaatggatcggccacatctactacagcggcgtgacctactacaaccccagcctgaagtccagagtgaccatcagcgtggacaccagccggaaccagttctccctgaagctgtctagcgtgacagccgccgataccgccgtgtactactgcaccagagaggacagcagcaactggcggagtagaggccagggaacactggtcacagttagctctggatccggcggaggcggaagtggaggcggaggatctggcggcggaggctctttcgaagaagtgcaactggttcagagcggagccgagctgaagaaacctggggccagcgtgaaggtgtcctgtaaagccagcggctacacctttaccgactactacatgaaatgggtccgacaggccccaggccagggactcgaatggatcggcgatattatccccagcaacggggccaccttctacaaccagaaattcaagggccgcgtgaccatcaccgtggacaagagcacaagcaccgcctacatggaactgagcagcctgagaagcgaggacaccgccgtgtattattgcgccagaagccatctgctgcgggccagttggttcgcctattggggacagggaaccctggtcaccgttagctctacgcgtatccagaaccctgatcctgccgtgtaccagctgcgggatagcaagagcagcgacaagagcgtgtgtctgttcaccgacttcgacagccagaccaacgtgtcccagagcaaggactccgacgtgtacatcaccgataagaccgtgctggacatgcggagcatggacttcaagagcaactccgccgtggcctggtccaacaagtccgatttcgcctgcgccaacgccttcaacaacagcattatccccgaggacacattcttcccaagccccgagagcagctgcggtacccagagttttgggttgttggaccctaaattgtgctatctgttggacggaatcctgttcatttacggagtgatcctgaccgcattgttcctgcgggttaagttttccagatccgcagacgcacccgcttaccaacaagggcagaaccaactctacaatgaacttaatttggggcggagggaagagtacgacgttctggacaaaaggaggggacgagatcccgagatgggcggaaagcctcagcgaaggaagaatccgcaagaggggctttataacgaactccagaaagataaaatggcagaagcctatagtgagattgggatgaagggagaaaggaggaggggtaaaggtcacgatgggttgtaccaaggattgagcacagccactaaagatacctatgatgcgctccacatgcaggccctgccgccaaga

SEQ ID NO: 2788 - DNA, 3282 bp, Artificial Sequence
  Synthetic Polynucloetide
atggccttaccagtgaccgccttgctcctgccgctggccttgctgctccacgccgccaggccggaagtgcagctggttgaatctggcggaggactggttcagcctggcggatctctgagactgtcttgtgccgccagcggcttcagcttcagcgacttttggatgagctgggtccgacaggcccctggcaaaggacttgaatgggtcgccacaatcagccaggccggcagcgagaaggactacgtggactctgtgaagggcagattcaccatcagccgggacaacgccaagaagtccctgtacctccagatgaacagcctgagagccgaggacaccgccgtgtactattgtgcctctggcgtgtacagcttcgactacagaggccagggcaccctggtcacagtctcttctggtaccggcggaggcggatctggcggcggaggtagcggtggcggaggatctgaattcgacttcgtgatgacacagagccctgatagcctggccgtgtctctcggcgagcgagtgaccatgagctgcaagtctagccagagcctgctgaacagcggcaaccagaagaactacctgacctggtatcagcagaagcccggccagcctcctaagctgctgatctactgggccagcaccagagaaagcggcgtgcccgatagattttctggctctggcagcggcaccgacttcaccctgacaatttctagcctgcaagccgaggacgtggccgtgtactactgccagaacgactacagctacccctacaccttcggccagggcaccaagctggaaatcaaactcgaggacctgaagaacgtgttcccacctgaggtggccgtgttcgagcctagcgaggccgagatcagccacacccagaaagccaccctcgtgtgcctggctaccggcttctaccccgaccatgtggaactgtcttggtgggtcaacggcaaagaggtgcacagcggcgtgtctaccgacccccagccactgaaagaacagcccgccctgaacgacagccggtactgcctgagcagcagactgagagtgtccgccaccttctggcagaacccccggaaccacttcagatgccaggtgcagttctacggcctgagcgagaacgacgagtggacccaggacagagccaagcccgtgacccagatcgtgtctgccgaagcctggggcagagccgattgcggatcccagagcttcggcctgctggaccccaagctgtgctacctgctggatggcatcctgttcatctacggcgtgatcctgaccgccctgttcctgagagtgaagttcagcagaagcgccgacgcccctgcctaccagcagggacagaaccaactgtacaacgagctgaacctgggcagacgggaagagtacgacgtgctggacaagcggagaggcagggaccctgagatgggcggaaagccccagcggagaaagaacccccaggaaggactgtataacgaactccagaaagacaagatggccgaagcctacagcgagatcggcatgaagggcgagcggagaagaggcaagggccacgatggcctgtaccagggcctgagcaccgccaccaaggacacctatgacgccctgcacatgcaggccctgcctccaagaagggccaagcgatctggatctggagcaacaaacttctcactactcaaacaagcaggtgacgtggaggagaatcccgggcctactagtatggactggatttggcgcatccttttccttgtcggcgctgctaccggcgcgcattccgggccccagctccagctgcaagagtctggacctggcctggtcaagcctagcgagacactgagcctgacctgtaccgtgtccggcgatagcatcagcagcggcgattactactggggctggatcagacagcctcctggcaaaggactggaatggatcggccacatctactacagcggcgtgacctactacaaccccagcctgaagtccagagtgaccatcagcgtggacaccagccggaaccagttctccctgaagctgtctagcgtgacagccgccgataccgccgtgtactactgcaccagagaggacagcagcaactggcggagtagaggccagggaacactggtcacagttagctctggatccggcggaggcggaagtggaggcggaggatctggcggcggaggctctttcgaacaagtgcaactggttcagagcggagccgagctgaagaaacctggggccagcgtgaaggtgtcctgtaaagccagcggctacacctttaccgactactacatgaaatgggtccgacaggccccaggccagggactcgaatggatcggcgatattatccccagcaacggggccaccttctacaaccagaaattcaagggccgcgtgaccatcaccgtggacaagagcacaagcaccgcctacatggaactgagcagcctgagaagcgaggacaccgccgtgtattattgcgccagaagccatctgctgcgggccagttggttcgcctattggggacagggaaccctggtcaccgttagctctacgcgtatccagaaccctgatcctgccgtgtaccagctgcgggatagcaagagcagcgacaagagcgtgtgtctgttcaccgacttcgacagccagaccaacgtgtcccagagcaaggactccgacgtgtacatcaccgataagaccgtgctggacatgcggagcatggacttcaagagcaactccgccgtggcctggtccaacaagtccgatttcgcctgcgccaacgccttcaacaacagcattatccccgaggacacattcttcccaagccccgagagcagctgcggtacccagagttttgggttgttggaccctaaattgtgctatctgttggacggaatcctgttcatttacggagtgatcctgaccgcattgttcctgcgggttaagttttccagatccgcagacgcacccgcttaccaacaagggcagaaccaactctacaatgaacttaatttggggcggagggaagagtacgacgttctggacaaaaggaggggacgagatcccgagatgggcggaaagcctcagcgaaggaagaatccgcaagaggggctttataacgaactccagaaagataaaatggcagaagcctatagtgagattgggatgaagggagaaaggaggaggggtaaaggtcacgatgggttgtaccaaggattgagcacagccactaaagatacctatgatgcgctccacatgcaggccctgccgccaaga

SEQ ID NO: 2789 - DNA, 3252 bp, Artificial Sequence
  Synthetic Polynucloetide
atggccttaccagtgaccgccttgctcctgccgctggccttgctgctccacgccgccaggccggaagtgcagctggttgaatctggcggaggactggttcagcctggcggatctctgagactgtcttgtgccgccagcggcttcagcttcagcgacttttggatgagctgggtccgacaggcccctggcaaaggacttgaatgggtcgccacaatcagccaggccggcagcgagaaggactacgtggactctgtgaagggcagattcaccatcagccgggacaacgccaagaagtccctgtacctccagatgaacagcctgagagccgaggacaccgccgtgtactattgtgcctctggcgtgtacagcttcgactacagaggccagggcaccctggtcacagtctcttctggtaccggcggaggcggatctggcggcggaggtagcggtggcggaggatctgaattcgacgtgcagatcacacagagccctagctacctggctgcctctcctggcgagacaatcaccatcaactgtcgggccagcaagagcatcagcaaggacctggcctggtatcaagagaagcccggcaagaccaacaagctgctgatctacagcggcagcacactccagtctggcatccccagcagattttccggctctggcagcggcaccgatttcaccctgaccataagcagcctggaacctgaggacttcgccatgtactactgccagcagcacaacaagtacccctacacctttggcggaggcaccaagctggaaatcaagagactcgaggacctgaagaacgtgttcccacctgaggtggccgtgttcgagcctagcgaggccgagatcagccacacccagaaagccaccctcgtgtgcctggctaccggcttctaccccgaccatgtggaactgtcttggtgggtcaacggcaaagaggtgcacagcggcgtgtctaccgacccccagccactgaaagaacagcccgccctgaacgacagccggtactgcctgagcagcagactgagagtgtccgccaccttctggcagaacccccggaaccacttcagatgccaggtgcagttctacggcctgagcgagaacgacgagtggacccaggacagagccaagcccgtgacccagatcgtgtctgccgaagcctggggcagagccgattgcggatcccagagcttcggcctgctggaccccaagctgtgctacctgctggatggcatcctgttcatctacggcgtgatcctgaccgccctgttcctgagagtgaagttcagcagaagcgccgacgcccctgcctaccagcagggacagaaccaactgtacaacgagctgaacctgggcagacgggaagagtacgacgtgctggacaagcggagaggcagggaccctgagatgggcggaaagccccagcggagaaagaacccccaggaaggactgtataacgaactccagaaagacaagatggccgaagcctacagcgagatcggcatgaagggcgagcggagaagaggcaagggccacgatggcctgtaccagggcctgagcaccgccaccaaggacacctatgacgccctgcacatgcaggccctgcctccaagaagggccaagcgatctggatctggagcaacaaacttctcactactcaaacaagcaggtgacgtggaggagaatcccgggcctactagtatggactggatttggcgcatccttttccttgtcggcgctgctaccggcgcgcattccgggccccagctccagctgcaagagtctggacctggcctggtcaagcctagcgagacactgagcctgacctgtaccgtgtccggcgatagcatcagcagcggcgattactactggggctggatcagacagcctcctggcaaaggactggaatggatcggccacatctactacagcggcgtgacctactacaaccccagcctgaagtccagagtgaccatcagcgtggacaccagccggaaccagttctccctgaagctgtctagcgtgacagccgccgataccgccgtgtactactgcaccagagaggacagcagcaactggcggagtagaggccagggaacactggtcacagttagctctggatccggcggaggcggaagtggaggcggaggatctggcggcggaggctctttcgaacaagttcaactgcaacagcctggggccgagcttgttagacctggcgcttctgtgaagctgagctgcaaggccagcggctacaccttcaccagctactggatgaactgggtcaagcagcggcctgaccagggcctcgaatggatcggcagaatcgacccctacgacagcgagacacactacaaccagaagttcaaggacaaggccatcctgaccgtggacaagagcagctccaccgcctacatgcaactgagcagcctgacctctgaggatagcgccgtgtactattgcgccagaggcaactgggacgactattggggccagggcacaaccctgacagtgtctagtacgcgtatccagaaccctgatcctgccgtgtaccagctgcgggatagcaagagcagcgacaagagcgtgtgtctgttcaccgacttcgacagccagaccaacgtgtcccagagcaaggactccgacgtgtacatcaccgataagaccgtgctggacatgcggagcatggacttcaagagcaactccgccgtggcctggtccaacaagtccgatttcgcctgcgccaacgccttcaacaacagcattatccccgaggacacattcttcccaagccccgagagcagctgcggtacccagagttttgggttgttggaccctaaattgtgctatctgttggacggaatcctgttcatttacggagtgatcctgaccgcattgttcctgcgggttaagttttccagatccgcagacgcacccgcttaccaacaagggcagaaccaactctacaatgaacttaatttggggcggagggaagagtacgacgttctggacaaaaggaggggacgagatcccgagatgggcggaaagcctcagcgaaggaagaatccgcaagaggggctttataacgaactccagaaagataaaatggcagaagcctatagtgagattgggatgaagggagaaaggaggaggggtaaaggtcacgatgggttgtaccaaggattgagcacagccactaaagatacctatgatgcgctccacatgcaggccctgccgccaaga

SEQ ID NO: 2790 - DNA, 3258 bp, Artificial Sequence
  Synthetic Polynucloetide
atggccttaccagtgaccgccttgctcctgccgctggccttgctgctccacgccgccaggccggaagtgcagctggttgaatctggcggaggactggttcagcctggcggatctctgagactgtcttgtgccgccagcggcttcagcttcagcgacttttggatgagctgggtccgacaggcccctggcaaaggacttgaatgggtcgccacaatcagccaggccggcagcgagaaggactacgtggactctgtgaagggcagattcaccatcagccgggacaacgccaagaagtccctgtacctccagatgaacagcctgagagccgaggacaccgccgtgtactattgtgcctctggcgtgtacagcttcgactacagaggccagggcaccctggtcacagtctcttctggtaccggcggaggcggatctggcggcggaggtagcggtggcggaggatctgaattcgagatcgtgctgacacagagccctaccagcatgacagcctctccaggcgagcaagtgaccatcacctgtagagccagcagcagcatcaactacatgcactggtatcagcagaagcctggcgcaagccccagaccttggatctacgagacaagcaagctggcctccggcgtgcccgatagattttctggatctgccagcggcaccagctacagcctgaccatcaacaacatggaagccgaggacgccgccacctactactgccagcagtggaattacccctcctggacctttggcggaggcaccaagctggaacttaaactcgaggacctgaagaacgtgttcccacctgaggtggccgtgttcgagcctagcgaggccgagatcagccacacccagaaagccaccctcgtgtgcctggctaccggcttctaccccgaccatgtggaactgtcttggtgggtcaacggcaaagaggtgcacagcggcgtgtctaccgacccccagccactgaaagaacagcccgccctgaacgacagccggtactgcctgagcagcagactgagagtgtccgccaccttctggcagaacccccggaaccacttcagatgccaggtgcagttctacggcctgagcgagaacgacgagtggacccaggacagagccaagcccgtgacccagatcgtgtctgccgaagcctggggcagagccgattgcggatcccagagcttcggcctgctggaccccaagctgtgctacctgctggatggcatcctgttcatctacggcgtgatcctgaccgccctgttcctgagagtgaagttcagcagaagcgccgacgcccctgcctaccagcagggacagaaccaactgtacaacgagctgaacctgggcagacgggaagagtacgacgtgctggacaagcggagaggcagggaccctgagatgggcggaaagccccagcggagaaagaacccccaggaaggactgtataacgaactccagaaagacaagatggccgaagcctacagcgagatcggcatgaagggcgagcggagaagaggcaagggccacgatggcctgtaccagggcctgagcaccgccaccaaggacacctatgacgccctgcacatgcaggccctgcctccaagaagggccaagcgatctggatctggagcaacaaacttctcactactcaaacaagcaggtgacgtggaggagaatcccgggcctactagtatggactggatttggcgcatccttttccttgtcggcgctgctaccggcgcgcattccgggccccagctccagctgcaagagtctggacctggcctggtcaagcctagcgagacactgagcctgacctgtaccgtgtccggcgatagcatcagcagcggcgattactactggggctggatcagacagcctcctggcaaaggactggaatggatcggccacatctactacagcggcgtgacctactacaaccccagcctgaagtccagagtgaccatcagcgtggacaccagccggaaccagttctccctgaagctgtctagcgtgacagccgccgataccgccgtgtactactgcaccagagaggacagcagcaactggcggagtagaggccagggaacactggtcacagttagctctggatccggcggaggcggaagtggaggcggaggatctggcggcggaggctctttcgaagaagtgcagctcgttgagtctggtggcggactggttcagcctggaagaagcctgaagctgagctgtgccgccagcggcttcaccttcagcgactacaatatggcctgggtccgacaggcccctaagaaaggactggaatgggtcgccaccatcctgtacgatggcggcagaacctactaccggggcagcgtgaagggcagattcaccatcagcagagacaacgccaagagcaccctgtacctgcggatggactctctgagaagcgaggataccgccacatattactgtgccacacacagccggggcaccgactactttgattattggggccagggcgtgatggttaccgtgtctagtacgcgtatccagaaccctgatcctgccgtgtaccagctgcgggatagcaagagcagcgacaagagcgtgtgtctgttcaccgacttcgacagccagaccaacgtgtcccagagcaaggactccgacgtgtacatcaccgataagaccgtgctggacatgcggagcatggacttcaagagcaactccgccgtggcctggtccaacaagtccgatttcgcctgcgccaacgccttcaacaacagcattatccccgaggacacattcttcccaagccccgagagcagctgcggtacccagagttttgggttgttggaccctaaattgtgctatctgttggacggaatcctgttcatttacggagtgatcctgaccgcattgttcctgcgggttaagttttccagatccgcagacgcacccgcttaccaacaagggcagaaccaactctacaatgaacttaatttggggcggagggaagagtacgacgttctggacaaaaggaggggacgagatcccgagatgggcggaaagcctcagcgaaggaagaatccgcaagaggggctttataacgaactccagaaagataaaatggcagaagcctatagtgagattgggatgaagggagaaaggaggaggggtaaaggtcacgatgggttgtaccaaggattgagcacagccactaaagatacctatgatgcgctccacatgcaggccctgccgccaaga

SEQ ID NO: 2791 - DNA, 3285 bp, Artificial Sequence
  Synthetic Polynucloetide
atggccttaccagtgaccgccttgctcctgccgctggccttgctgctccacgccgccaggccggaagtgcagctggttgaatctggcggaggactggttcagcctggcggatctctgagactgtcttgtgccgccagcggcttcagcttcagcgacttttggatgagctgggtccgacaggcccctggcaaaggacttgaatgggtcgccacaatcagccaggccggcagcgagaaggactacgtggactctgtgaagggcagattcaccatcagccgggacaacgccaagaagtccctgtacctccagatgaacagcctgagagccgaggacaccgccgtgtactattgtgcctctggcgtgtacagcttcgactacagaggccagggcaccctggtcacagtctcttctggtaccggcggaggcggatctggcggcggaggtagcggtggcggaggatctgaattcgacatcgtgatgacacagagcccttctagcctggccgtgtctgagggcgagacagtgaccatcaactgcaagagcagccagagcttcctgtctagcggcgacggcaagaattacgtggcctggtatcagtacaagcccggacagagccccaagctgctgatctactgggccagcacaagacagagcggcgtgcccgatagattcatcggctctggcagcggcaccgacttcaccctgacaatctctacagtgcaggccgaggacctggctatctactactgccagcagtattacgacacccctctgacctttggctccggcaccaagctggaaatcaaactcgaggacctgaagaacgtgttcccacctgaggtggccgtgttcgagcctagcgaggccgagatcagccacacccagaaagccaccctcgtgtgcctggctaccggcttctaccccgaccatgtggaactgtcttggtgggtcaacggcaaagaggtgcacagcggcgtgtctaccgacccccagccactgaaagaacagcccgccctgaacgacagccggtactgcctgagcagcagactgagagtgtccgccaccttctggcagaacccccggaaccacttcagatgccaggtgcagttctacggcctgagcgagaacgacgagtggacccaggacagagccaagcccgtgacccagatcgtgtctgccgaagcctggggcagagccgattgcggatcccagagcttcggcctgctggaccccaagctgtgctacctgctggatggcatcctgttcatctacggcgtgatcctgaccgccctgttcctgagagtgaagttcagcagaagcgccgacgcccctgcctaccagcagggacagaaccaactgtacaacgagctgaacctgggcagacgggaagagtacgacgtgctggacaagcggagaggcagggaccctgagatgggcggaaagccccagcggagaaagaacccccaggaaggactgtataacgaactccagaaagacaagatggccgaagcctacagcgagatcggcatgaagggcgagcggagaagaggcaagggccacgatggcctgtaccagggcctgagcaccgccaccaaggacacctatgacgccctgcacatgcaggccctgcctccaagaagggccaagcgatctggatctggagcaacaaacttctcactactcaaacaagcaggtgacgtggaggagaatcccgggcctactagtatggactggatttggcgcatccttttccttgtcggcgctgctaccggcgcgcattccgggccccagctccagctgcaagagtctggacctggcctggtcaagcctagcgagacactgagcctgacctgtaccgtgtccggcgatagcatcagcagcggcgattactactggggctggatcagacagcctcctggcaaaggactggaatggatcggccacatctactacagcggcgtgacctactacaaccccagcctgaagtccagagtgaccatcagcgtggacaccagccggaaccagttctccctgaagctgtctagcgtgacagccgccgataccgccgtgtactactgcaccagagaggacagcagcaactggcggagtagaggccagggaacactggtcacagttagctctggatccggcggaggcggaagtggaggcggaggatctggcggcggaggctctttcgaagaagtgaagctgcaagagtctggccccagcctggtgcagagtagccaaacactgagcctgacctgtaccgtgtccggctttagcctgaccagctaccacatccactgggtccgacagacccctggcaaaggactggaatggatgggcgtgatgtggagcgacggcgacaccagctataacagcgccctgaagtcccggctgagcatcagcagagatacaagccagagccaggtgttcctgaagatgaacagcctccagaccgaggacaccgccacctactattgtgccagaggctactacagcagctacctgtacctttggttcgcctattggggccagggcaccctggttacagtcagctctacgcgtatccagaaccctgatcctgccgtgtaccagctgcgggatagcaagagcagcgacaagagcgtgtgtctgttcaccgacttcgacagccagaccaacgtgtcccagagcaaggactccgacgtgtacatcaccgataagaccgtgctggacatgcggagcatggacttcaagagcaactccgccgtggcctggtccaacaagtccgatttcgcctgcgccaacgccttcaacaacagcattatccccgaggacacattcttcccaagccccgagagcagctgcggtacccagagttttgggttgttggaccctaaattgtgctatctgttggacggaatcctgttcatttacggagtgatcctgaccgcattgttcctgcgggttaagttttccagatccgcagacgcacccgcttaccaacaagggcagaaccaactctacaatgaacttaatttggggcggagggaagagtacgacgttctggacaaaaggaggggacgagatcccgagatgggcggaaagcctcagcgaaggaagaatccgcaagaggggctttataacgaactccagaaagataaaatggcagaagcctatagtgagattgggatgaagggagaaaggaggaggggtaaaggtcacgatgggttgtaccaaggattgagcacagccactaaagatacctatgatgcgctccacatgcaggccctgccgccaaga

SEQ ID NO: 2792 - DNA, 3297 bp, Artificial Sequence
  Synthetic Polynucloetide
atggccttaccagtgaccgccttgctcctgccgctggccttgctgctccacgccgccaggccggaagtgcagctggttgaatctggcggaggactggttcagcctggcggatctctgagactgtcttgtgccgccagcggcttcagcttcagcgacttttggatgagctgggtccgacaggcccctggcaaaggacttgaatgggtcgccacaatcagccaggccggcagcgagaaggactacgtggactctgtgaagggcagattcaccatcagccgggacaacgccaagaagtccctgtacctccagatgaacagcctgagagccgaggacaccgccgtgtactattgtgcctctggcgtgtacagcttcgactacagaggccagggcaccctggtcacagtctcttctggtaccggcggaggcggatctggcggcggaggtagcggtggcggaggatctgaattcgacgtgctgatgacccagacacctgtgtctctgccagtgtctctcggaggccaggtgtccatctcctgtagaagcagccagagcctggtgcactccgacggcgatacctacctgcactggtatctccagaagcctggacagagccctcagctcctgatctaccgggtgtccaacagattcagcggcgtgcccgatagattttccggcagcggctctggcaccgacttcaccctgaagatcagcagagtggaacccgaggacctgggcctgtactactgtctccagaccacacacttcccaccttggacctttggcggaggcaccaagctggaaatgaaactcgaggacctgaagaacgtgttcccacctgaggtggccgtgttcgagcctagcgaggccgagatcagccacacccagaaagccaccctcgtgtgcctggctaccggcttctaccccgaccatgtggaactgtcttggtgggtcaacggcaaagaggtgcacagcggcgtgtctaccgacccccagccactgaaagaacagcccgccctgaacgacagccggtactgcctgagcagcagactgagagtgtccgccaccttctggcagaacccccggaaccacttcagatgccaggtgcagttctacggcctgagcgagaacgacgagtggacccaggacagagccaagcccgtgacccagatcgtgtctgccgaagcctggggcagagccgattgcggatcccagagcttcggcctgctggaccccaagctgtgctacctgctggatggcatcctgttcatctacggcgtgatcctgaccgccctgttcctgagagtgaagttcagcagaagcgccgacgcccctgcctaccagcagggacagaaccaactgtacaacgagctgaacctgggcagacgggaagagtacgacgtgctggacaagcggagaggcagggaccctgagatgggcggaaagccccagcggagaaagaacccccaggaaggactgtataacgaactccagaaagacaagatggccgaagcctacagcgagatcggcatgaagggcgagcggagaagaggcaagggccacgatggcctgtaccagggcctgagcaccgccaccaaggacacctatgacgccctgcacatgcaggccctgcctccaagaagggccaagcgatctggatctggagcaacaaacttctcactactcaaacaagcaggtgacgtggaggagaatcccgggcctactagtatggactggatttggcgcatccttttccttgtcggcgctgctaccggcgcgcattccgggccccagctccagctgcaagagtctggacctggcctggtcaagcctagcgagacactgagcctgacctgtaccgtgtccggcgatagcatcagcagcggcgattactactggggctggatcagacagcctcctggcaaaggactggaatggatcggccacatctactacagcggcgtgacctactacaaccccagcctgaagtccagagtgaccatcagcgtggacaccagccggaaccagttctccctgaagctgtctagcgtgacagccgccgataccgccgtgtactactgcaccagagaggacagcagcaactggcggagtagaggccagggaacactggtcacagttagctctggatccggcggaggcggaagtggaggcggaggatctggcggcggaggctctttcgaacaggttcagctccagcagtctggacccgagcttagaaggccaggatctagcgtcagactgagctgcaaggccagcggctaccggatcaaggacttcctgatccactggattaagaacagacccgagcacggcctggaatggatcggatggattgaccctgaggacggcgagactaagtacgcccagaagttccagaccaaggccacactgaccgccgacacctctagcaacaccgcctacatgcaactgagcagcctgaccagcgaggacaccgccacctacttttgtgctagatggggcgacgtgtactacggcctgatgagaggccatgtgatggatgcctggggccagggaacaagcgtgacagtctcttctacgcgtatccagaaccctgatcctgccgtgtaccagctgcgggatagcaagagcagcgacaagagcgtgtgtctgttcaccgacttcgacagccagaccaacgtgtcccagagcaaggactccgacgtgtacatcaccgataagaccgtgctggacatgcggagcatggacttcaagagcaactccgccgtggcctggtccaacaagtccgatttcgcctgcgccaacgccttcaacaacagcattatccccgaggacacattcttcccaagccccgagagcagctgcggtacccagagttttgggttgttggaccctaaattgtgctatctgttggacggaatcctgttcatttacggagtgatcctgaccgcattgttcctgcgggttaagttttccagatccgcagacgcacccgcttaccaacaagggcagaaccaactctacaatgaacttaatttggggcggagggaagagtacgacgttctggacaaaaggaggggacgagatcccgagatgggcggaaagcctcagcgaaggaagaatccgcaagaggggctttataacgaactccagaaagataaaatggcagaagcctatagtgagattgggatgaagggagaaaggaggaggggtaaaggtcacgatgggttgtaccaaggattgagcacagccactaaagatacctatgatgcgctccacatgcaggccctgccgccaaga

SEQ ID NO: 2793 - DNA, 3282 bp, Artificial Sequence
  Synthetic Polynucloetide
atggccttaccagtgaccgccttgctcctgccgctggccttgctgctccacgccgccaggccggaagtgcagctggttgaatctggcggaggactggttcagcctggcggatctctgagactgtcttgtgccgccagcggcttcagcttcagcgacttttggatgagctgggtccgacaggcccctggcaaaggacttgaatgggtcgccacaatcagccaggccggcagcgagaaggactacgtggactctgtgaagggcagattcaccatcagccgggacaacgccaagaagtccctgtacctccagatgaacagcctgagagccgaggacaccgccgtgtactattgtgcctctggcgtgtacagcttcgactacagaggccagggcaccctggtcacagtctcttctggtaccggcggaggcggatctggcggcggaggtagcggtggcggaggatctgaattcgacatcgtgatgacacagagccccgccacactgtcactgtctccaggcgaaagagccacactgagctgtcggagcagcaagagcctccagaacgtgaacggcaacacctacctgtactggttccagcagaagcccggccagtctcctcagctcctgatctacagaatgagcaacctgaacagcggcgtgcccgacagattttctggcagcggaagcggcaccgagttcaccctgaccataagcagcctggaacctgaggacttcgccgtgtactactgtatgcagcacctggaataccccatcaccttcggagccggcaccaagctggaaatcaaactcgaggacctgaagaacgtgttcccacctgaggtggccgtgttcgagcctagcgaggccgagatcagccacacccagaaagccaccctcgtgtgcctggctaccggcttctaccccgaccatgtggaactgtcttggtgggtcaacggcaaagaggtgcacagcggcgtgtctaccgacccccagccactgaaagaacagcccgccctgaacgacagccggtactgcctgagcagcagactgagagtgtccgccaccttctggcagaacccccggaaccacttcagatgccaggtgcagttctacggcctgagcgagaacgacgagtggacccaggacagagccaagcccgtgacccagatcgtgtctgccgaagcctggggcagagccgattgcggatcccagagcttcggcctgctggaccccaagctgtgctacctgctggatggcatcctgttcatctacggcgtgatcctgaccgccctgttcctgagagtgaagttcagcagaagcgccgacgcccctgcctaccagcagggacagaaccaactgtacaacgagctgaacctgggcagacgggaagagtacgacgtgctggacaagcggagaggcagggaccctgagatgggcggaaagccccagcggagaaagaacccccaggaaggactgtataacgaactccagaaagacaagatggccgaagcctacagcgagatcggcatgaagggcgagcggagaagaggcaagggccacgatggcctgtaccagggcctgagcaccgccaccaaggacacctatgacgccctgcacatgcaggccctgcctccaagaagggccaagcgatctggatctggagcaacaaacttctcactactcaaacaagcaggtgacgtggaggagaatcccgggcctactagtatggactggatttggcgcatccttttccttgtcggcgctgctaccggcgcgcattccgggccccagctccagctgcaagagtctggacctggcctggtcaagcctagcgagacactgagcctgacctgtaccgtgtccggcgatagcatcagcagcggcgattactactggggctggatcagacagcctcctggcaaaggactggaatggatcggccacatctactacagcggcgtgacctactacaaccccagcctgaagtccagagtgaccatcagcgtggacaccagccggaaccagttctccctgaagctgtctagcgtgacagccgccgataccgccgtgtactactgcaccagagaggacagcagcaactggcggagtagaggccagggaacactggtcacagttagctctggatccggcggaggcggaagtggaggcggaggatctggcggcggaggctctttcgaagaagtgcaactggttgaatctggcggcggactggttaagcctggcggatctctgaagctgagctgtgccgccagcggctacacctttaccagctacgtgatgcactgggtccgacaggcccctggcaaaggacttgagtggatcggctacatcaacccctacaacgatggcaccaagtacaacgagaagttccagggcagagtgaccatcagctccgacaagagcatcagcaccgcctacatggaactgagcagcctgagaagcgaggataccgccatgtactattgcgccagaggcacctactactacggcaccagagtgttcgactactggggccagggaaccctggtcacagtctcttctacgcgtatccagaaccctgatcctgccgtgtaccagctgcgggatagcaagagcagcgacaagagcgtgtgtctgttcaccgacttcgacagccagaccaacgtgtcccagagcaaggactccgacgtgtacatcaccgataagaccgtgctggacatgcggagcatggacttcaagagcaactccgccgtggcctggtccaacaagtccgatttcgcctgcgccaacgccttcaacaacagcattatccccgaggacacattcttcccaagccccgagagcagctgcggtacccagagttttgggttgttggaccctaaattgtgctatctgttggacggaatcctgttcatttacggagtgatcctgaccgcattgttcctgcgggttaagttttccagatccgcagacgcacccgcttaccaacaagggcagaaccaactctacaatgaacttaatttggggcggagggaagagtacgacgttctggacaaaaggaggggacgagatcccgagatgggcggaaagcctcagcgaaggaagaatccgcaagaggggctttataacgaactccagaaagataaaatggcagaagcctatagtgagattgggatgaagggagaaaggaggaggggtaaaggtcacgatgggttgtaccaaggattgagcacagccactaaagatacctatgatgcgctccacatgcaggccctgccgccaaga

SEQ ID NO: 2794 - DNA, 3270 bp, Artificial Sequence
  Synthetic Polynucloetide
atggccttaccagtgaccgccttgctcctgccgctggccttgctgctccacgccgccaggccggaagtgcagctggttgaatctggcggaggactggttcagcctggcggatctctgagactgtcttgtgccgccagcggcttcagcttcagcgacttttggatgagctgggtccgacaggcccctggcaaaggacttgaatgggtcgccacaatcagccaggccggcagcgagaaggactacgtggactctgtgaagggcagattcaccatcagccgggacaacgccaagaagtccctgtacctccagatgaacagcctgagagccgaggacaccgccgtgtactattgtgcctctggcgtgtacagcttcgactacagaggccagggcaccctggtcacagtctcttctggtaccggcggaggcggatctggcggcggaggtagcggtggcggaggatctgaattcgacatccagatgacacagagccctagcagcctgtctgccagcgtgggagacagagtgaccatcacatgcaaggccagcgaccacatcaacaactggctggcctggtatcagcagaagcctggacaggcccctaagctgctgatctacggcgctaccacactggaaacaggcgtgcccagcagattttctggcagcggctctggcaccgactacaccctgacaatatccagcctccagcctgaggacttcgccacctactactgtcagcagagctggaacaccccttggacattcggccagggcaccaagctggaaatcaagagactcgaggacctgaagaacgtgttcccacctgaggtggccgtgttcgagcctagcgaggccgagatcagccacacccagaaagccaccctcgtgtgcctggctaccggcttctaccccgaccatgtggaactgtcttggtgggtcaacggcaaagaggtgcacagcggcgtgtctaccgacccccagccactgaaagaacagcccgccctgaacgacagccggtactgcctgagcagcagactgagagtgtccgccaccttctggcagaacccccggaaccacttcagatgccaggtgcagttctacggcctgagcgagaacgacgagtggacccaggacagagccaagcccgtgacccagatcgtgtctgccgaagcctggggcagagccgattgcggatcccagagcttcggcctgctggaccccaagctgtgctacctgctggatggcatcctgttcatctacggcgtgatcctgaccgccctgttcctgagagtgaagttcagcagaagcgccgacgcccctgcctaccagcagggacagaaccaactgtacaacgagctgaacctgggcagacgggaagagtacgacgtgctggacaagcggagaggcagggaccctgagatgggcggaaagccccagcggagaaagaacccccaggaaggactgtataacgaactccagaaagacaagatggccgaagcctacagcgagatcggcatgaagggcgagcggagaagaggcaagggccacgatggcctgtaccagggcctgagcaccgccaccaaggacacctatgacgccctgcacatgcaggccctgcctccaagaagggccaagcgatctggatctggagcaacaaacttctcactactcaaacaagcaggtgacgtggaggagaatcccgggcctactagtatggactggatttggcgcatccttttccttgtcggcgctgctaccggcgcgcattccgggccccagctccagctgcaagagtctggacctggcctggtcaagcctagcgagacactgagcctgacctgtaccgtgtccggcgatagcatcagcagcggcgattactactggggctggatcagacagcctcctggcaaaggactggaatggatcggccacatctactacagcggcgtgacctactacaaccccagcctgaagtccagagtgaccatcagcgtggacaccagccggaaccagttctccctgaagctgtctagcgtgacagccgccgataccgccgtgtactactgcaccagagaggacagcagcaactggcggagtagaggccagggaacactggtcacagttagctctggatccggcggaggcggaagtggaggcggaggatctggcggcggaggctctttcgaacaagttcagcttcaacagcctggcgctgagctggtcaaacctggcgcttctgtgaagatgagctgcaaagccagcggctacgccttcagcagctactggatcaactggatgaagcagaaacccggccagggactcgaatggatcggccaaatctatcccggcgacggcgacaccaactacaacggcaagttcaagggcagagccacactgaccgccgatacctctagcagcacagcctacatgcagctgagcagcctgaccagcgaagatagcgccgtgtacttctgtgcccggtccatcacaacagtcgtgggctgcgctatggactattggggccagggaacaagcgtgaccgtgtctagtacgcgtatccagaaccctgatcctgccgtgtaccagctgcgggatagcaagagcagcgacaagagcgtgtgtctgttcaccgacttcgacagccagaccaacgtgtcccagagcaaggactccgacgtgtacatcaccgataagaccgtgctggacatgcggagcatggacttcaagagcaactccgccgtggcctggtccaacaagtccgatttcgcctgcgccaacgccttcaacaacagcattatccccgaggacacattcttcccaagccccgagagcagctgcggtacccagagttttgggttgttggaccctaaattgtgctatctgttggacggaatcctgttcatttacggagtgatcctgaccgcattgttcctgcgggttaagttttccagatccgcagacgcacccgcttaccaacaagggcagaaccaactctacaatgaacttaatttggggcggagggaagagtacgacgttctggacaaaaggaggggacgagatcccgagatgggcggaaagcctcagcgaaggaagaatccgcaagaggggctttataacgaactccagaaagataaaatggcagaagcctatagtgagattgggatgaagggagaaaggaggaggggtaaaggtcacgatgggttgtaccaaggattgagcacagccactaaagatacctatgatgcgctccacatgcaggccctgccgccaaga

SEQ ID NO: 2795 - DNA, 3276 bp, Artificial Sequence
  Synthetic Polynucloetide
atggccttaccagtgaccgccttgctcctgccgctggccttgctgctccacgccgccaggccggaagtgcagctggttgaatctggcggaggactggttcagcctggcggatctctgagactgtcttgtgccgccagcggcttcagcttcagcgacttttggatgagctgggtccgacaggcccctggcaaaggacttgaatgggtcgccacaatcagccaggccggcagcgagaaggactacgtggactctgtgaagggcagattcaccatcagccgggacaacgccaagaagtccctgtacctccagatgaacagcctgagagccgaggacaccgccgtgtactattgtgcctctggcgtgtacagcttcgactacagaggccagggcaccctggtcacagtctcttctggtaccggcggaggcggatctggcggcggaggtagcggtggcggaggatctgaattccagatcgtgctgtctcagtctcctgccatcctgagcgcttccccaggcgagaaagtgaccatgacctgtagagccagcagcagcgtgtcctacatgcactggtatcagcagaagcccggcagcagccctaagccttggatctacgccaccagcaatctggcctctggcgtgccagccagattttctggctctggcagcggcaccagctacagcttcacaatcagcagagtggaagccgaggacgccgccacctactattgtcagcagtggaccttcaatcctcctaccttcggcggaggcacccggctggaaatcaaaagaacagtggctgctctcgaggacctgaagaacgtgttcccacctgaggtggccgtgttcgagcctagcgaggccgagatcagccacacccagaaagccaccctcgtgtgcctggctaccggcttctaccccgaccatgtggaactgtcttggtgggtcaacggcaaagaggtgcacagcggcgtgtctaccgacccccagccactgaaagaacagcccgccctgaacgacagccggtactgcctgagcagcagactgagagtgtccgccaccttctggcagaacccccggaaccacttcagatgccaggtgcagttctacggcctgagcgagaacgacgagtggacccaggacagagccaagcccgtgacccagatcgtgtctgccgaagcctggggcagagccgattgcggatcccagagcttcggcctgctggaccccaagctgtgctacctgctggatggcatcctgttcatctacggcgtgatcctgaccgccctgttcctgagagtgaagttcagcagaagcgccgacgcccctgcctaccagcagggacagaaccaactgtacaacgagctgaacctgggcagacgggaagagtacgacgtgctggacaagcggagaggcagggaccctgagatgggcggaaagccccagcggagaaagaacccccaggaaggactgtataacgaactccagaaagacaagatggccgaagcctacagcgagatcggcatgaagggcgagcggagaagaggcaagggccacgatggcctgtaccagggcctgagcaccgccaccaaggacacctatgacgccctgcacatgcaggccctgcctccaagaagggccaagcgatctggatctggagcaacaaacttctcactactcaaacaagcaggtgacgtggaggagaatcccgggcctactagtatggactggatttggcgcatccttttccttgtcggcgctgctaccggcgcgcattccgggccccagctccagctgcaagagtctggacctggcctggtcaagcctagcgagacactgagcctgacctgtaccgtgtccggcgatagcatcagcagcggcgattactactggggctggatcagacagcctcctggcaaaggactggaatggatcggccacatctactacagcggcgtgacctactacaaccccagcctgaagtccagagtgaccatcagcgtggacaccagccggaaccagttctccctgaagctgtctagcgtgacagccgccgataccgccgtgtactactgcaccagagaggacagcagcaactggcggagtagaggccagggaacactggtcacagttagctctggatccggcggaggcggaagtggaggcggaggatctggcggcggaggctctttcgaacaggcttatctgcaacagagcggagccgaactcgtcagacctggcgcttctgtgaagatgagctgcaaggccagcggctacaccttcaccagctataatatgcactgggtcaagcagacccctcggcagggactcgaatggatcggcggaatctatcccggcaacggcgacacctcctacaaccagaagttcaagggcaaagccacactgaccgtgggcaagagcagcagcaccgcctatatgcagctcagcagcctgaccagcgaggacagcgccgtgtacttctgcgccagatacgactacaactacgctatggactactggggccagggcaccagcgtgacagttagctctgccagcacgcgtatccagaaccctgatcctgccgtgtaccagctgcgggatagcaagagcagcgacaagagcgtgtgtctgttcaccgacttcgacagccagaccaacgtgtcccagagcaaggactccgacgtgtacatcaccgataagaccgtgctggacatgcggagcatggacttcaagagcaactccgccgtggcctggtccaacaagtccgatttcgcctgcgccaacgccttcaacaacagcattatccccgaggacacattcttcccaagccccgagagcagctgcggtacccagagttttgggttgttggaccctaaattgtgctatctgttggacggaatcctgttcatttacggagtgatcctgaccgcattgttcctgcgggttaagttttccagatccgcagacgcacccgcttaccaacaagggcagaaccaactctacaatgaacttaatttggggcggagggaagagtacgacgttctggacaaaaggaggggacgagatcccgagatgggcggaaagcctcagcgaaggaagaatccgcaagaggggctttataacgaactccagaaagataaaatggcagaagcctatagtgagattgggatgaagggagaaaggaggaggggtaaaggtcacgatgggttgtaccaaggattgagcacagccactaaagatacctatgatgcgctccacatgcaggccctgccgccaaga

SEQ ID NO: 2796 - DNA, 3270 bp, Artificial Sequence
  Synthetic Polynucloetide
atggccttaccagtgaccgccttgctcctgccgctggccttgctgctccacgccgccaggccggaagtgcagctggttgaatctggcggaggactggttcagcctggcggatctctgagactgtcttgtgccgccagcggcttcagcttcagcgacttttggatgagctgggtccgacaggcccctggcaaaggacttgaatgggtcgccacaatcagccaggccggcagcgagaaggactacgtggactctgtgaagggcagattcaccatcagccgggacaacgccaagaagtccctgtacctccagatgaacagcctgagagccgaggacaccgccgtgtactattgtgcctctggcgtgtacagcttcgactacagaggccagggcaccctggtcacagtctcttctggtaccggcggaggcggatctggcggcggaggtagcggtggcggaggatctgaattcgagatcgtgctgacacagagccctgccaccctgtctctgagccctggcgaaagagccaccctgagctgtagagccagccagagcgtgtccagctacctggcctggtatcagcagaagcccggccaggctccccggctgctgatctacgatgccagcaatagagccaccggcatccccgccagattttccggctctggcagcggcaccgacttcaccctgaccatcagctccctggaacccgaggacttcgccgtgtactactgccagcagcggagcaactggcccatcacattcggccagggcacccggctggaaatcaaactcgaggacctgaagaacgtgttcccacctgaggtggccgtgttcgagcctagcgaggccgagatcagccacacccagaaagccaccctcgtgtgcctggctaccggcttctaccccgaccatgtggaactgtcttggtgggtcaacggcaaagaggtgcacagcggcgtgtctaccgacccccagccactgaaagaacagcccgccctgaacgacagccggtactgcctgagcagcagactgagagtgtccgccaccttctggcagaacccccggaaccacttcagatgccaggtgcagttctacggcctgagcgagaacgacgagtggacccaggacagagccaagcccgtgacccagatcgtgtctgccgaagcctggggcagagccgattgcggatcccagagcttcggcctgctggaccccaagctgtgctacctgctggatggcatcctgttcatctacggcgtgatcctgaccgccctgttcctgagagtgaagttcagcagaagcgccgacgcccctgcctaccagcagggacagaaccaactgtacaacgagctgaacctgggcagacgggaagagtacgacgtgctggacaagcggagaggcagggaccctgagatgggcggaaagccccagcggagaaagaacccccaggaaggactgtataacgaactccagaaagacaagatggccgaagcctacagcgagatcggcatgaagggcgagcggagaagaggcaagggccacgatggcctgtaccagggcctgagcaccgccaccaaggacacctatgacgccctgcacatgcaggccctgcctccaagaagggccaagcgatctggatctggagcaacaaacttctcactactcaaacaagcaggtgacgtggaggagaatcccgggcctactagtatggactggatttggcgcatccttttccttgtcggcgctgctaccggcgcgcattccgggccccagctccagctgcaagagtctggacctggcctggtcaagcctagcgagacactgagcctgacctgtaccgtgtccggcgatagcatcagcagcggcgattactactggggctggatcagacagcctcctggcaaaggactggaatggatcggccacatctactacagcggcgtgacctactacaaccccagcctgaagtccagagtgaccatcagcgtggacaccagccggaaccagttctccctgaagctgtctagcgtgacagccgccgataccgccgtgtactactgcaccagagaggacagcagcaactggcggagtagaggccagggaacactggtcacagttagctctggatccggcggaggcggaagtggaggcggaggatctggcggcggaggctctttcgaagaggtgcagcttgttgagtctggcggaggactggtgcagcccgatagaagcctgagactgtcttgtgccgccagcggcttcaccttccacgattatgccatgcactgggtccgacaggcccctggcaaaggacttgaatgggtgtccaccatctcttggaacagcggcacaatcggctacgccgactctgtgaagggcagattcaccatcagccgggacaacgccaagaacagcctgtacctccagatgaactccctgagagccgaggacacagccctgtactactgcgccaaggacatccagtacggcaactactactacggcatggacgtgtggggccagggcacaacagtgacagtctcttctacgcgtatccagaaccctgatcctgccgtgtaccagctgcgggatagcaagagcagcgacaagagcgtgtgtctgttcaccgacttcgacagccagaccaacgtgtcccagagcaaggactccgacgtgtacatcaccgataagaccgtgctggacatgcggagcatggacttcaagagcaactccgccgtggcctggtccaacaagtccgatttcgcctgcgccaacgccttcaacaacagcattatccccgaggacacattcttcccaagccccgagagcagctgcggtacccagagttttgggttgttggaccctaaattgtgctatctgttggacggaatcctgttcatttacggagtgatcctgaccgcattgttcctgcgggttaagttttccagatccgcagacgcacccgcttaccaacaagggcagaaccaactctacaatgaacttaatttggggcggagggaagagtacgacgttctggacaaaaggaggggacgagatcccgagatgggcggaaagcctcagcgaaggaagaatccgcaagaggggctttataacgaactccagaaagataaaatggcagaagcctatagtgagattgggatgaagggagaaaggaggaggggtaaaggtcacgatgggttgtaccaaggattgagcacagccactaaagatacctatgatgcgctccacatgcaggccctgccgccaaga

SEQ ID NO: 2797 - DNA, 3255 bp, Artificial Sequence
  Synthetic Polynucloetide
atggccttaccagtgaccgccttgctcctgccgctggccttgctgctccacgccgccaggccggaagtgcagctggttgaatctggcggaggactggttcagcctggcggatctctgagactgtcttgtgccgccagcggcttcagcttcagcgacttttggatgagctgggtccgacaggcccctggcaaaggacttgaatgggtcgccacaatcagccaggccggcagcgagaaggactacgtggactctgtgaagggcagattcaccatcagccgggacaacgccaagaagtccctgtacctccagatgaacagcctgagagccgaggacaccgccgtgtactattgtgcctctggcgtgtacagcttcgactacagaggccagggcaccctggtcacagtctcttctggtaccggcggaggcggatctggcggcggaggtagcggtggcggaggatctgaattcgacatccagatgacacagagccctagcagcctgtctgccagcgtgggagatagagtgaccatcaactgcaaggccagccaggacatcaacagctacctgagctggttccagcagaagcctggcaaggcccctaagacactgatctaccgggccaacagactggtggatggcgtgccaagcagattttctggcagcggcagcggccaggattacaccctgacaatatccagcctccagcctgaggacttcgccacctactactgcctccagtacgacgagttccctctgacctttggcggaggcaccaaggtggaaatcaaactcgaggacctgaagaacgtgttcccacctgaggtggccgtgttcgagcctagcgaggccgagatcagccacacccagaaagccaccctcgtgtgcctggctaccggcttctaccccgaccatgtggaactgtcttggtgggtcaacggcaaagaggtgcacagcggcgtgtctaccgacccccagccactgaaagaacagcccgccctgaacgacagccggtactgcctgagcagcagactgagagtgtccgccaccttctggcagaacccccggaaccacttcagatgccaggtgcagttctacggcctgagcgagaacgacgagtggacccaggacagagccaagcccgtgacccagatcgtgtctgccgaagcctggggcagagccgattgcggatcccagagcttcggcctgctggaccccaagctgtgctacctgctggatggcatcctgttcatctacggcgtgatcctgaccgccctgttcctgagagtgaagttcagcagaagcgccgacgcccctgcctaccagcagggacagaaccaactgtacaacgagctgaacctgggcagacgggaagagtacgacgtgctggacaagcggagaggcagggaccctgagatgggcggaaagccccagcggagaaagaacccccaggaaggactgtataacgaactccagaaagacaagatggccgaagcctacagcgagatcggcatgaagggcgagcggagaagaggcaagggccacgatggcctgtaccagggcctgagcaccgccaccaaggacacctatgacgccctgcacatgcaggccctgcctccaagaagggccaagcgatctggatctggagcaacaaacttctcactactcaaacaagcaggtgacgtggaggagaatcccgggcctactagtatggactggatttggcgcatccttttccttgtcggcgctgctaccggcgcgcattccgggccccagctccagctgcaagagtctggacctggcctggtcaagcctagcgagacactgagcctgacctgtaccgtgtccggcgatagcatcagcagcggcgattactactggggctggatcagacagcctcctggcaaaggactggaatggatcggccacatctactacagcggcgtgacctactacaaccccagcctgaagtccagagtgaccatcagcgtggacaccagccggaaccagttctccctgaagctgtctagcgtgacagccgccgataccgccgtgtactactgcaccagagaggacagcagcaactggcggagtagaggccagggaacactggtcacagttagctctggatccggcggaggcggaagtggaggcggaggatctggcggcggaggctctttcgaacaggtgcaactggtgcagtctggggccgaagtgaagaaacctggggcctctgtgaaggtgtcctgcaaagccagcggctacacctttaccaactacgacatcaactgggtccgacaggctccaggccaaggactggaatggatcggctggatctatcctggcgacggcagcaccaagtacaacgagaagttcaaggccaaggccacactgaccgccgataccagcacaagcaccgcctacatggaactgcggagcctgagaagcgacgacaccgccgtgtactattgtgcctccggctacgaggacgctatggactattggggccagggcaccaccgtgacagtgtctagtacgcgtatccagaaccctgatcctgccgtgtaccagctgcgggatagcaagagcagcgacaagagcgtgtgtctgttcaccgacttcgacagccagaccaacgtgtcccagagcaaggactccgacgtgtacatcaccgataagaccgtgctggacatgcggagcatggacttcaagagcaactccgccgtggcctggtccaacaagtccgatttcgcctgcgccaacgccttcaacaacagcattatccccgaggacacattcttcccaagccccgagagcagctgcggtacccagagttttgggttgttggaccctaaattgtgctatctgttggacggaatcctgttcatttacggagtgatcctgaccgcattgttcctgcgggttaagttttccagatccgcagacgcacccgcttaccaacaagggcagaaccaactctacaatgaacttaatttggggcggagggaagagtacgacgttctggacaaaaggaggggacgagatcccgagatgggcggaaagcctcagcgaaggaagaatccgcaagaggggctttataacgaactccagaaagataaaatggcagaagcctatagtgagattgggatgaagggagaaaggaggaggggtaaaggtcacgatgggttgtaccaaggattgagcacagccactaaagatacctatgatgcgctccacatgcaggccctgccgccaaga

SEQ ID NO: 2798 - DNA, 3261 bp, Artificial Sequence
  Synthetic Polynucloetide
atggccttaccagtgaccgccttgctcctgccgctggccttgctgctccacgccgccaggccggaagtgcagctggttgaatctggcggaggactggttcagcctggcggatctctgagactgtcttgtgccgccagcggcttcagcttcagcgacttttggatgagctgggtccgacaggcccctggcaaaggacttgaatgggtcgccacaatcagccaggccggcagcgagaaggactacgtggactctgtgaagggcagattcaccatcagccgggacaacgccaagaagtccctgtacctccagatgaacagcctgagagccgaggacaccgccgtgtactattgtgcctctggcgtgtacagcttcgactacagaggccagggcaccctggtcacagtctcttctggtaccggcggaggcggatctggcggcggaggtagcggtggcggaggatctgaattcgacatcgtgatgacccagacacctctgagcctgagcgtgacacctggacagcctgccagcattagctgcaagagcagccagtctctgctggacggcgacggcaagacctacctgaattggctgctccagaagcctggacagagccctcagcggctgatctacctggtgtccaagctggatagcggcgtgcccgatagattttctggcagcggctctggcaccgacttcaccctgaagatcagcagagtggaagccgaggacgtgggcgtgtactactgttggcagggcacacacttccccagaacattcggccagggcacaaagctggaaatcaaactcgaggacctgaagaacgtgttcccacctgaggtggccgtgttcgagcctagcgaggccgagatcagccacacccagaaagccaccctcgtgtgcctggctaccggcttctaccccgaccatgtggaactgtcttggtgggtcaacggcaaagaggtgcacagcggcgtgtctaccgacccccagccactgaaagaacagcccgccctgaacgacagccggtactgcctgagcagcagactgagagtgtccgccaccttctggcagaacccccggaaccacttcagatgccaggtgcagttctacggcctgagcgagaacgacgagtggacccaggacagagccaagcccgtgacccagatcgtgtctgccgaagcctggggcagagccgattgcggatcccagagcttcggcctgctggaccccaagctgtgctacctgctggatggcatcctgttcatctacggcgtgatcctgaccgccctgttcctgagagtgaagttcagcagaagcgccgacgcccctgcctaccagcagggacagaaccaactgtacaacgagctgaacctgggcagacgggaagagtacgacgtgctggacaagcggagaggcagggaccctgagatgggcggaaagccccagcggagaaagaacccccaggaaggactgtataacgaactccagaaagacaagatggccgaagcctacagcgagatcggcatgaagggcgagcggagaagaggcaagggccacgatggcctgtaccagggcctgagcaccgccaccaaggacacctatgacgccctgcacatgcaggccctgcctccaagaagggccaagcgatctggatctggagcaacaaacttctcactactcaaacaagcaggtgacgtggaggagaatcccgggcctactagtatggactggatttggcgcatccttttccttgtcggcgctgctaccggcgcgcattccgggccccagctccagctgcaagagtctggacctggcctggtcaagcctagcgagacactgagcctgacctgtaccgtgtccggcgatagcatcagcagcggcgattactactggggctggatcagacagcctcctggcaaaggactggaatggatcggccacatctactacagcggcgtgacctactacaaccccagcctgaagtccagagtgaccatcagcgtggacaccagccggaaccagttctccctgaagctgtctagcgtgacagccgccgataccgccgtgtactactgcaccagagaggacagcagcaactggcggagtagaggccagggaacactggtcacagttagctctggatccggcggaggcggaagtggaggcggaggatctggcggcggaggctctttcgaacaagtgcaactggttcagagcggagccgaagtgaagaaacctggggcctctgtgaaggtgtcctgcaaggccagcggctacaccttcaaggacacctacatccactgggtccgacaggcccctggacaaggacttgagtggatgggcagaatcgaccccgccaacggcaacaccaaatacgaccccaagttccagggcagagtgaccatgaccagagacaccagcatcagcaccgcctacatggaactgagccggctgagatccgatgacaccgccgtgtactattgcgctagaagaggcggagtggattggggccagggaacactggttaccgtgtctagtacgcgtatccagaaccctgatcctgccgtgtaccagctgcgggatagcaagagcagcgacaagagcgtgtgtctgttcaccgacttcgacagccagaccaacgtgtcccagagcaaggactccgacgtgtacatcaccgataagaccgtgctggacatgcggagcatggacttcaagagcaactccgccgtggcctggtccaacaagtccgatttcgcctgcgccaacgccttcaacaacagcattatccccgaggacacattcttcccaagccccgagagcagctgcggtacccagagttttgggttgttggaccctaaattgtgctatctgttggacggaatcctgttcatttacggagtgatcctgaccgcattgttcctgcgggttaagttttccagatccgcagacgcacccgcttaccaacaagggcagaaccaactctacaatgaacttaatttggggcggagggaagagtacgacgttctggacaaaaggaggggacgagatcccgagatgggcggaaagcctcagcgaaggaagaatccgcaagaggggctttataacgaactccagaaagataaaatggcagaagcctatagtgagattgggatgaagggagaaaggaggaggggtaaaggtcacgatgggttgtaccaaggattgagcacagccactaaagatacctatgatgcgctccacatgcaggccctgccgccaaga

SEQ ID NO: 2799 - DNA, 3264 bp, Artificial Sequence
  Synthetic Polynucloetide
atggccttaccagtgaccgccttgctcctgccgctggccttgctgctccacgccgccaggccggaagtgcagctggttgaatctggcggaggactggttcagcctggcggatctctgagactgtcttgtgccgccagcggcttcagcttcagcgacttttggatgagctgggtccgacaggcccctggcaaaggacttgaatgggtcgccacaatcagccaggccggcagcgagaaggactacgtggactctgtgaagggcagattcaccatcagccgggacaacgccaagaagtccctgtacctccagatgaacagcctgagagccgaggacaccgccgtgtactattgtgcctctggcgtgtacagcttcgactacagaggccagggcaccctggtcacagtctcttctggtaccggcggaggcggatctggcggcggaggtagcggtggcggaggatctgaattcgacatccagatgacacagagccctagcagcctgtctgccagcgtgggagacagagtgaccatcacatgcaaggccagccaggatgtgtctacagccgtggcctggttccagcagaagcctggaaaagcccctaagctgctgatctacagccccagctacagatacaccggcgtgcccagcagattttctggcagcggctctggcaccgacttcaccctgacaatatccagcctccagcctgaggacttcacctactactgccagcagctctacagcaccccttacacattcggccagggcaccaaggtggaaatcaaactcgaggacctgaagaacgtgttcccacctgaggtggccgtgttcgagcctagcgaggccgagatcagccacacccagaaagccaccctcgtgtgcctggctaccggcttctaccccgaccatgtggaactgtcttggtgggtcaacggcaaagaggtgcacagcggcgtgtctaccgacccccagccactgaaagaacagcccgccctgaacgacagccggtactgcctgagcagcagactgagagtgtccgccaccttctggcagaacccccggaaccacttcagatgccaggtgcagttctacggcctgagcgagaacgacgagtggacccaggacagagccaagcccgtgacccagatcgtgtctgccgaagcctggggcagagccgattgcggatcccagagcttcggcctgctggaccccaagctgtgctacctgctggatggcatcctgttcatctacggcgtgatcctgaccgccctgttcctgagagtgaagttcagcagaagcgccgacgcccctgcctaccagcagggacagaaccaactgtacaacgagctgaacctgggcagacgggaagagtacgacgtgctggacaagcggagaggcagggaccctgagatgggcggaaagccccagcggagaaagaacccccaggaaggactgtataacgaactccagaaagacaagatggccgaagcctacagcgagatcggcatgaagggcgagcggagaagaggcaagggccacgatggcctgtaccagggcctgagcaccgccaccaaggacacctatgacgccctgcacatgcaggccctgcctccaagaagggccaagcgatctggatctggagcaacaaacttctcactactcaaacaagcaggtgacgtggaggagaatcccgggcctactagtatggactggatttggcgcatccttttccttgtcggcgctgctaccggcgcgcattccgggccccagctccagctgcaagagtctggacctggcctggtcaagcctagcgagacactgagcctgacctgtaccgtgtccggcgatagcatcagcagcggcgattactactggggctggatcagacagcctcctggcaaaggactggaatggatcggccacatctactacagcggcgtgacctactacaaccccagcctgaagtccagagtgaccatcagcgtggacaccagccggaaccagttctccctgaagctgtctagcgtgacagccgccgataccgccgtgtactactgcaccagagaggacagcagcaactggcggagtagaggccagggaacactggtcacagttagctctggatccggcggaggcggaagtggaggcggaggatctggcggcggaggctctttcgaagaagtgcaactggttcagagcggagccgaagtgaagaaacctggggcctctgtgaaggtgtcctgcaaagccagcggctacacctttaccgactactacctggacgtggtcgtgcggcaagctcctggacaaggactggaatggatcggcagagtgaacccctacaacggcggcaccatctacaaccagaaattcaagggaagagtgaccctgaccagagacaccagcacctccacagcctacctggaactgagcagcctgagaagcgaagataccgccgtgtactactgcgccagggaccactacagatatgaccctctgctggactactggggccagggaaccctggttacagtgtctagtacgcgtatccagaaccctgatcctgccgtgtaccagctgcgggatagcaagagcagcgacaagagcgtgtgtctgttcaccgacttcgacagccagaccaacgtgtcccagagcaaggactccgacgtgtacatcaccgataagaccgtgctggacatgcggagcatggacttcaagagcaactccgccgtggcctggtccaacaagtccgatttcgcctgcgccaacgccttcaacaacagcattatccccgaggacacattcttcccaagccccgagagcagctgcggtacccagagttttgggttgttggaccctaaattgtgctatctgttggacggaatcctgttcatttacggagtgatcctgaccgcattgttcctgcgggttaagttttccagatccgcagacgcacccgcttaccaacaagggcagaaccaactctacaatgaacttaatttggggcggagggaagagtacgacgttctggacaaaaggaggggacgagatcccgagatgggcggaaagcctcagcgaaggaagaatccgcaagaggggctttataacgaactccagaaagataaaatggcagaagcctatagtgagattgggatgaagggagaaaggaggaggggtaaaggtcacgatgggttgtaccaaggattgagcacagccactaaagatacctatgatgcgctccacatgcaggccctgccgccaaga

SEQ ID NO: 2800 - DNA, 3282 bp, Artificial Sequence
  Synthetic Polynucloetide
atggccttaccagtgaccgccttgctcctgccgctggccttgctgctccacgccgccaggccggaagtgcagctggttgaatctggcggaggactggttcagcctggcggatctctgagactgtcttgtgccgccagcggcttcagcttcagcgacttttggatgagctgggtccgacaggcccctggcaaaggacttgaatgggtcgccacaatcagccaggccggcagcgagaaggactacgtggactctgtgaagggcagattcaccatcagccgggacaacgccaagaagtccctgtacctccagatgaacagcctgagagccgaggacaccgccgtgtactattgtgcctctggcgtgtacagcttcgactacagaggccagggcaccctggtcacagtctcttctggtaccggcggaggcggatctggcggcggaggtagcggtggcggaggatctgaattcgacatccagatgacacagagccctagcagcctgtctgccagcgtgggagacagagtgaccatcacctgtagagccagccagagcgtgtccaccagcagctacaactacatgcactggtatcagcagaagcccggcaagcctcctaagctgctgattaagtacgccagcaacctggaaagcggcgtgcccagcagattttctggcagcggctctggcaccgacttcaccctgacaatatccagcctccagcctgaggacttcgccacctactactgtcagcactcctgggagatccctctgacattcggccagggcaccaaggtggaaatcaaactcgaggacctgaagaacgtgttcccacctgaggtggccgtgttcgagcctagcgaggccgagatcagccacacccagaaagccaccctcgtgtgcctggctaccggcttctaccccgaccatgtggaactgtcttggtgggtcaacggcaaagaggtgcacagcggcgtgtctaccgacccccagccactgaaagaacagcccgccctgaacgacagccggtactgcctgagcagcagactgagagtgtccgccaccttctggcagaacccccggaaccacttcagatgccaggtgcagttctacggcctgagcgagaacgacgagtggacccaggacagagccaagcccgtgacccagatcgtgtctgccgaagcctggggcagagccgattgcggatcccagagcttcggcctgctggaccccaagctgtgctacctgctggatggcatcctgttcatctacggcgtgatcctgaccgccctgttcctgagagtgaagttcagcagaagcgccgacgcccctgcctaccagcagggacagaaccaactgtacaacgagctgaacctgggcagacgggaagagtacgacgtgctggacaagcggagaggcagggaccctgagatgggcggaaagccccagcggagaaagaacccccaggaaggactgtataacgaactccagaaagacaagatggccgaagcctacagcgagatcggcatgaagggcgagcggagaagaggcaagggccacgatggcctgtaccagggcctgagcaccgccaccaaggacacctatgacgccctgcacatgcaggccctgcctccaagaagggccaagcgatctggatctggagcaacaaacttctcactactcaaacaagcaggtgacgtggaggagaatcccgggcctactagtatggactggatttggcgcatccttttccttgtcggcgctgctaccggcgcgcattccgggccccagctccagctgcaagagtctggacctggcctggtcaagcctagcgagacactgagcctgacctgtaccgtgtccggcgatagcatcagcagcggcgattactactggggctggatcagacagcctcctggcaaaggactggaatggatcggccacatctactacagcggcgtgacctactacaaccccagcctgaagtccagagtgaccatcagcgtggacaccagccggaaccagttctccctgaagctgtctagcgtgacagccgccgataccgccgtgtactactgcaccagagaggacagcagcaactggcggagtagaggccagggaacactggtcacagttagctctggatccggcggaggcggaagtggaggcggaggatctggcggcggaggctctttcgaagaagtgcaactggttcagagcggagccgaagtgaagaaacctggggcctctgtgaaggtgtcctgcaaggccagcggctacagcttcaccgactattatatgcactgggtccgacaggctccaggccagggacttgagtggatcggcagaatcaacccctacaacggcgctgccttctacagccagaacttcaaggatagagtgaccctgaccgtggacaccagcaccagcacagcctacctggaactgagcagcctgagaagcgaggacaccgccgtgtactactgcgccattgagagaggcgctgacctggaaggctacgctatggattattggggccagggaaccctggtcaccgtgtcatctacgcgtatccagaaccctgatcctgccgtgtaccagctgcgggatagcaagagcagcgacaagagcgtgtgtctgttcaccgacttcgacagccagaccaacgtgtcccagagcaaggactccgacgtgtacatcaccgataagaccgtgctggacatgcggagcatggacttcaagagcaactccgccgtggcctggtccaacaagtccgatttcgcctgcgccaacgccttcaacaacagcattatccccgaggacacattcttcccaagccccgagagcagctgcggtacccagagttttgggttgttggaccctaaattgtgctatctgttggacggaatcctgttcatttacggagtgatcctgaccgcattgttcctgcgggttaagttttccagatccgcagacgcacccgcttaccaacaagggcagaaccaactctacaatgaacttaatttggggcggagggaagagtacgacgttctggacaaaaggaggggacgagatcccgagatgggcggaaagcctcagcgaaggaagaatccgcaagaggggctttataacgaactccagaaagataaaatggcagaagcctatagtgagattgggatgaagggagaaaggaggaggggtaaaggtcacgatgggttgtaccaaggattgagcacagccactaaagatacctatgatgcgctccacatgcaggccctgccgccaaga

SEQ ID NO: 2801 - DNA, 3276 bp, Artificial Sequence
  Synthetic Polynucloetide
atggccttaccagtgaccgccttgctcctgccgctggccttgctgctccacgccgccaggccggaagtgcagctggttgaatctggcggaggactggttcagcctggcggatctctgagactgtcttgtgccgccagcggcttcagcttcagcgacttttggatgagctgggtccgacaggcccctggcaaaggacttgaatgggtcgccacaatcagccaggccggcagcgagaaggactacgtggactctgtgaagggcagattcaccatcagccgggacaacgccaagaagtccctgtacctccagatgaacagcctgagagccgaggacaccgccgtgtactattgtgcctctggcgtgtacagcttcgactacagaggccagggcaccctggtcacagtctcttctggtaccggcggaggcggatctggcggcggaggtagcggtggcggaggatctgaattcgagatcgtgctgacacagtctccagccacactgagcgcttctccaggcgagagagtgaccctgacctgtagagccagcagcaacgtgatctccagctacgtgcactggtatcagcagaagcctggcagcagccccagactgtttctgtacagcaccagcaatctggcctccggcgtgccaagcagattttctggctctggcagcggcaccgacttcacctttaccatctctagcctggaagccgaggacgccgccacctactactgtcagcagtacagcggctaccctctgaccttcggccagggcacaagactggaaatcaaactcgaggacctgaagaacgtgttcccacctgaggtggccgtgttcgagcctagcgaggccgagatcagccacacccagaaagccaccctcgtgtgcctggctaccggcttctaccccgaccatgtggaactgtcttggtgggtcaacggcaaagaggtgcacagcggcgtgtctaccgacccccagccactgaaagaacagcccgccctgaacgacagccggtactgcctgagcagcagactgagagtgtccgccaccttctggcagaacccccggaaccacttcagatgccaggtgcagttctacggcctgagcgagaacgacgagtggacccaggacagagccaagcccgtgacccagatcgtgtctgccgaagcctggggcagagccgattgcggatcccagagcttcggcctgctggaccccaagctgtgctacctgctggatggcatcctgttcatctacggcgtgatcctgaccgccctgttcctgagagtgaagttcagcagaagcgccgacgcccctgcctaccagcagggacagaaccaactgtacaacgagctgaacctgggcagacgggaagagtacgacgtgctggacaagcggagaggcagggaccctgagatgggcggaaagccccagcggagaaagaacccccaggaaggactgtataacgaactccagaaagacaagatggccgaagcctacagcgagatcggcatgaagggcgagcggagaagaggcaagggccacgatggcctgtaccagggcctgagcaccgccaccaaggacacctatgacgccctgcacatgcaggccctgcctccaagaagggccaagcgatctggatctggagcaacaaacttctcactactcaaacaagcaggtgacgtggaggagaatcccgggcctactagtatggactggatttggcgcatccttttccttgtcggcgctgctaccggcgcgcattccgggccccagctccagctgcaagagtctggacctggcctggtcaagcctagcgagacactgagcctgacctgtaccgtgtccggcgatagcatcagcagcggcgattactactggggctggatcagacagcctcctggcaaaggactggaatggatcggccacatctactacagcggcgtgacctactacaaccccagcctgaagtccagagtgaccatcagcgtggacaccagccggaaccagttctccctgaagctgtctagcgtgacagccgccgataccgccgtgtactactgcaccagagaggacagcagcaactggcggagtagaggccagggaacactggtcacagttagctctggatccggcggaggcggaagtggaggcggaggatctggcggcggaggctctttcgaacaagttcagctgcaagagtctggccctggcctggtcaagcctagcgaaacactgagcctgacctgcgccgtgtctggctactctatcaccagcgcctactattggaactggatcagacagcctcctggcaaaggactggaatggatcggctacatcagctacgacggcagaaacaactacaaccccagcctgaagaaccggatcaccatcaatcccgacaccagcaagaaccagttcagcctccagctgaacagcgtgacccctgaggataccgccgtgtactactgtgccagagaaggcgactacgacgtgggcaactactacgctatggactactggggccagggaaccctggtcacagtctcttctacgcgtatccagaaccctgatcctgccgtgtaccagctgcgggatagcaagagcagcgacaagagcgtgtgtctgttcaccgacttcgacagccagaccaacgtgtcccagagcaaggactccgacgtgtacatcaccgataagaccgtgctggacatgcggagcatggacttcaagagcaactccgccgtggcctggtccaacaagtccgatttcgcctgcgccaacgccttcaacaacagcattatccccgaggacacattcttcccaagccccgagagcagctgcggtacccagagttttgggttgttggaccctaaattgtgctatctgttggacggaatcctgttcatttacggagtgatcctgaccgcattgttcctgcgggttaagttttccagatccgcagacgcacccgcttaccaacaagggcagaaccaactctacaatgaacttaatttggggcggagggaagagtacgacgttctggacaaaaggaggggacgagatcccgagatgggcggaaagcctcagcgaaggaagaatccgcaagaggggctttataacgaactccagaaagataaaatggcagaagcctatagtgagattgggatgaagggagaaaggaggaggggtaaaggtcacgatgggttgtaccaaggattgagcacagccactaaagatacctatgatgcgctccacatgcaggccctgccgccaaga

SEQ ID NO: 2802 - DNA, 3276 bp, Artificial Sequence
  Synthetic Polynucloetide
atggccttaccagtgaccgccttgctcctgccgctggccttgctgctccacgccgccaggccggaagtgcagctggttgaatctggcggaggactggttcagcctggcggatctctgagactgtcttgtgccgccagcggcttcagcttcagcgacttttggatgagctgggtccgacaggcccctggcaaaggacttgaatgggtcgccacaatcagccaggccggcagcgagaaggactacgtggactctgtgaagggcagattcaccatcagccgggacaacgccaagaagtccctgtacctccagatgaacagcctgagagccgaggacaccgccgtgtactattgtgcctctggcgtgtacagcttcgactacagaggccagggcaccctggtcacagtctcttctggtaccggcggaggcggatctggcggcggaggtagcggtggcggaggatctgaattcgagatcgtgctgacacagtctcccgccacactgtcactgtctccaggcgaaagagccacactgagctgtagagccagcagcaacgtgatctccagctacgtgcactggtatcagcagaagcctggacaggcccctcggctgctgatctacagcacaagcaatctggcctctggcatccccgccagattttctggctctggaagcggcaccgacttcaccctgaccataagcagcctggaacctgaggacttcgccgtgtactactgccagcagtatagcggctaccctctgaccttcggccagggcacaagactggaaatcaaactcgaggacctgaagaacgtgttcccacctgaggtggccgtgttcgagcctagcgaggccgagatcagccacacccagaaagccaccctcgtgtgcctggctaccggcttctaccccgaccatgtggaactgtcttggtgggtcaacggcaaagaggtgcacagcggcgtgtctaccgacccccagccactgaaagaacagcccgccctgaacgacagccggtactgcctgagcagcagactgagagtgtccgccaccttctggcagaacccccggaaccacttcagatgccaggtgcagttctacggcctgagcgagaacgacgagtggacccaggacagagccaagcccgtgacccagatcgtgtctgccgaagcctggggcagagccgattgcggatcccagagcttcggcctgctggaccccaagctgtgctacctgctggatggcatcctgttcatctacggcgtgatcctgaccgccctgttcctgagagtgaagttcagcagaagcgccgacgcccctgcctaccagcagggacagaaccaactgtacaacgagctgaacctgggcagacgggaagagtacgacgtgctggacaagcggagaggcagggaccctgagatgggcggaaagccccagcggagaaagaacccccaggaaggactgtataacgaactccagaaagacaagatggccgaagcctacagcgagatcggcatgaagggcgagcggagaagaggcaagggccacgatggcctgtaccagggcctgagcaccgccaccaaggacacctatgacgccctgcacatgcaggccctgcctccaagaagggccaagcgatctggatctggagcaacaaacttctcactactcaaacaagcaggtgacgtggaggagaatcccgggcctactagtatggactggatttggcgcatccttttccttgtcggcgctgctaccggcgcgcattccgggccccagctccagctgcaagagtctggacctggcctggtcaagcctagcgagacactgagcctgacctgtaccgtgtccggcgatagcatcagcagcggcgattactactggggctggatcagacagcctcctggcaaaggactggaatggatcggccacatctactacagcggcgtgacctactacaaccccagcctgaagtccagagtgaccatcagcgtggacaccagccggaaccagttctccctgaagctgtctagcgtgacagccgccgataccgccgtgtactactgcaccagagaggacagcagcaactggcggagtagaggccagggaacactggtcacagttagctctggatccggcggaggcggaagtggaggcggaggatctggcggcggaggctctttcgaagaagtgcaactggtggaaagtggcggcggactggtgcaacctggaagaagcctgagactgtcctgtgccgccagcggctactctatcacaagcgcctactactggaactgggtccgacaggctcctggcaaaggactggaatgggtgtcctacatcagctacgacggcagaaacaactacaaccccagcctgaagaaccgcttcaccatcagccgggacaacgccaagaagtccctgtacctccagatgaacagcctgagagccgaggacacagccctgtactattgcgccaaagagggcgactacgacgtcggcaactactacgctatggactactggggccagggaaccaccgtgactgtctcttctacgcgtatccagaaccctgatcctgccgtgtaccagctgcgggatagcaagagcagcgacaagagcgtgtgtctgttcaccgacttcgacagccagaccaacgtgtcccagagcaaggactccgacgtgtacatcaccgataagaccgtgctggacatgcggagcatggacttcaagagcaactccgccgtggcctggtccaacaagtccgatttcgcctgcgccaacgccttcaacaacagcattatccccgaggacacattcttcccaagccccgagagcagctgcggtacccagagttttgggttgttggaccctaaattgtgctatctgttggacggaatcctgttcatttacggagtgatcctgaccgcattgttcctgcgggttaagttttccagatccgcagacgcacccgcttaccaacaagggcagaaccaactctacaatgaacttaatttggggcggagggaagagtacgacgttctggacaaaaggaggggacgagatcccgagatgggcggaaagcctcagcgaaggaagaatccgcaagaggggctttataacgaactccagaaagataaaatggcagaagcctatagtgagattgggatgaagggagaaaggaggaggggtaaaggtcacgatgggttgtaccaaggattgagcacagccactaaagatacctatgatgcgctccacatgcaggccctgccgccaaga

SEQ ID NO: 2803 - DNA, 3273 bp, Artificial Sequence
  Synthetic Polynucloetide
atggccttaccagtgaccgccttgctcctgccgctggccttgctgctccacgccgccaggccggaagtgcagctggttgaatctggcggaggactggttcagcctggcggatctctgagactgtcttgtgccgccagcggcttcagcttcagcgacttttggatgagctgggtccgacaggcccctggcaaaggacttgaatgggtcgccacaatcagccaggccggcagcgagaaggactacgtggactctgtgaagggcagattcaccatcagccgggacaacgccaagaagtccctgtacctccagatgaacagcctgagagccgaggacaccgccgtgtactattgtgcctctggcgtgtacagcttcgactacagaggccagggcaccctggtcacagtctcttctggtaccggcggaggcggatctggcggcggaggtagcggtggcggaggatctgaattcgacgtggtcatgacacagaccccactgagcctgcctgtgtctctgggagatcaggccagcatctcctgtagaagcagccagagcctggtgcacagcaacggcaacacctacctgcggtggtatctccagaagcctggacagagccccaaggtgctgatctacaaggtgtccaacagagtgtccggcgtgcccgatagattttctggcagcggctctggcaccgacttcaccctgaagatcaatagagtggaagccgaggacctgggcgtgtacttctgtagccagagcacccatgtgccttggacctttggcggaggcaccaagctggaaatcaagctcgaggacctgaagaacgtgttcccacctgaggtggccgtgttcgagcctagcgaggccgagatcagccacacccagaaagccaccctcgtgtgcctggctaccggcttctaccccgaccatgtggaactgtcttggtgggtcaacggcaaagaggtgcacagcggcgtgtctaccgacccccagccactgaaagaacagcccgccctgaacgacagccggtactgcctgagcagcagactgagagtgtccgccaccttctggcagaacccccggaaccacttcagatgccaggtgcagttctacggcctgagcgagaacgacgagtggacccaggacagagccaagcccgtgacccagatcgtgtctgccgaagcctggggcagagccgattgcggatcccagagcttcggcctgctggaccccaagctgtgctacctgctggatggcatcctgttcatctacggcgtgatcctgaccgccctgttcctgagagtgaagttcagcagaagcgccgacgcccctgcctaccagcagggacagaaccaactgtacaacgagctgaacctgggcagacgggaagagtacgacgtgctggacaagcggagaggcagggaccctgagatgggcggaaagccccagcggagaaagaacccccaggaaggactgtataacgaactccagaaagacaagatggccgaagcctacagcgagatcggcatgaagggcgagcggagaagaggcaagggccacgatggcctgtaccagggcctgagcaccgccaccaaggacacctatgacgccctgcacatgcaggccctgcctccaagaagggccaagcgatctggatctggagcaacaaacttctcactactcaaacaagcaggtgacgtggaggagaatcccgggcctactagtatggactggatttggcgcatccttttccttgtcggcgctgctaccggcgcgcattccgggccccagctccagctgcaagagtctggacctggcctggtcaagcctagcgagacactgagcctgacctgtaccgtgtccggcgatagcatcagcagcggcgattactactggggctggatcagacagcctcctggcaaaggactggaatggatcggccacatctactacagcggcgtgacctactacaaccccagcctgaagtccagagtgaccatcagcgtggacaccagccggaaccagttctccctgaagctgtctagcgtgacagccgccgataccgccgtgtactactgcaccagagaggacagcagcaactggcggagtagaggccagggaacactggtcacagttagctctggatccggcggaggcggaagtggaggcggaggatctggcggcggaggctctttcgaaggcgtgaagctggacgagacaggcggaggacttgttcaacctggcggagccatgaagctgagctgtgtgaccagcggctttaccttcggccactactggatgaactgggtccgacagtcccctgagaaaggactggaatgggtcgcccagttcagaaacaagccctacaactacgaaacctactacagcgacagcgtgaagggcagattcaccatcagccgggacgacagcaagtccagcgtgtacctccagatgaacaacctgcgcgtggaagataccggcatctactactgtaccggggccagctacggcatggaatatctcggccagggcaccagcgtgaccgtgtctacaacgcgtatccagaaccctgatcctgccgtgtaccagctgcgggatagcaagagcagcgacaagagcgtgtgtctgttcaccgacttcgacagccagaccaacgtgtcccagagcaaggactccgacgtgtacatcaccgataagaccgtgctggacatgcggagcatggacttcaagagcaactccgccgtggcctggtccaacaagtccgatttcgcctgcgccaacgccttcaacaacagcattatccccgaggacacattcttcccaagccccgagagcagctgcggtacccagagttttgggttgttggaccctaaattgtgctatctgttggacggaatcctgttcatttacggagtgatcctgaccgcattgttcctgcgggttaagttttccagatccgcagacgcacccgcttaccaacaagggcagaaccaactctacaatgaacttaatttggggcggagggaagagtacgacgttctggacaaaaggaggggacgagatcccgagatgggcggaaagcctcagcgaaggaagaatccgcaagaggggctttataacgaactccagaaagataaaatggcagaagcctatagtgagattgggatgaagggagaaaggaggaggggtaaaggtcacgatgggttgtaccaaggattgagcacagccactaaagatacctatgatgcgctccacatgcaggccctgccgccaaga

SEQ ID NO: 2804 - DNA, 3291 bp, Artificial Sequence
  Synthetic Polynucloetide
atggccttaccagtgaccgccttgctcctgccgctggccttgctgctccacgccgccaggccggaagtgcagctggttgaatctggcggaggactggttcagcctggcggatctctgagactgtcttgtgccgccagcggcttcagcttcagcgacttttggatgagctgggtccgacaggcccctggcaaaggacttgaatgggtcgccacaatcagccaggccggcagcgagaaggactacgtggactctgtgaagggcagattcaccatcagccgggacaacgccaagaagtccctgtacctccagatgaacagcctgagagccgaggacaccgccgtgtactattgtgcctctggcgtgtacagcttcgactacagaggccagggcaccctggtcacagtctcttctggtaccggcggaggcggatctggcggcggaggtagcggtggcggaggatctgaattccaggtgcaactggtggaatctggcggcaatctggttcagcctggcggctctctgagactgtcttgtgccgccagcggcttcaccttcggcagcttttctatgagctgggtccgacaagctcctggcggaggacttgaatgggtggcaggactgtctgccagaagcagcctgacacactacgccgactctgtgaagggcagattcaccatcagccgggacaacgccaagaacagcgtgtacctccagatgaacagcctgagagtggaagataccgccgtgtactactgcgccagaagaagctacgacagcagcggctactggggccacttctacagctacatggatgtgtggggccagggcaccctggttacagtttctctcgaggacctgaagaacgtgttcccacctgaggtggccgtgttcgagcctagcgaggccgagatcagccacacccagaaagccaccctcgtgtgcctggctaccggcttctaccccgaccatgtggaactgtcttggtgggtcaacggcaaagaggtgcacagcggcgtgtctaccgacccccagccactgaaagaacagcccgccctgaacgacagccggtactgcctgagcagcagactgagagtgtccgccaccttctggcagaacccccggaaccacttcagatgccaggtgcagttctacggcctgagcgagaacgacgagtggacccaggacagagccaagcccgtgacccagatcgtgtctgccgaagcctggggcagagccgattgcggatcccagagcttcggcctgctggaccccaagctgtgctacctgctggatggcatcctgttcatctacggcgtgatcctgaccgccctgttcctgagagtgaagttcagcagaagcgccgacgcccctgcctaccagcagggacagaaccaactgtacaacgagctgaacctgggcagacgggaagagtacgacgtgctggacaagcggagaggcagggaccctgagatgggcggaaagccccagcggagaaagaacccccaggaaggactgtataacgaactccagaaagacaagatggccgaagcctacagcgagatcggcatgaagggcgagcggagaagaggcaagggccacgatggcctgtaccagggcctgagcaccgccaccaaggacacctatgacgccctgcacatgcaggccctgcctccaagaagggccaagcgatctggatctggagcaacaaacttctcactactcaaacaagcaggtgacgtggaggagaatcccgggcctactagtatggactggatttggcgcatccttttccttgtcggcgctgctaccggcgcgcattccgggccccagctccagctgcaagagtctggacctggcctggtcaagcctagcgagacactgagcctgacctgtaccgtgtccggcgatagcatcagcagcggcgattactactggggctggatcagacagcctcctggcaaaggactggaatggatcggccacatctactacagcggcgtgacctactacaaccccagcctgaagtccagagtgaccatcagcgtggacaccagccggaaccagttctccctgaagctgtctagcgtgacagccgccgataccgccgtgtactactgcaccagagaggacagcagcaactggcggagtagaggccagggaacactggtcacagttagctctggatccggcggaggcggaagtggaggcggaggatctggcggcggaggctctttcgaatctgtgctgacccagcctagctccgtgtctgctgctcctggacagaaagtgaccatctcctgtagcggcagcaccagcaacatcggcaacaactacgtgtcctggtatcagcagcaccccggcaaggcccctaagctgatgatctacgacgtgtccaagaggcccagcggcgtgccagatagattttccggcagcaagagcggcaacagcgccagcctggatattagcggactccagtctgaggacgaggccgactactattgcgccgcctgggatgatagcctgagcgagtttctgtttggcaccggcaccaagctgacagtgcttggaacgcgtatccagaaccctgatcctgccgtgtaccagctgcgggatagcaagagcagcgacaagagcgtgtgtctgttcaccgacttcgacagccagaccaacgtgtcccagagcaaggactccgacgtgtacatcaccgataagaccgtgctggacatgcggagcatggacttcaagagcaactccgccgtggcctggtccaacaagtccgatttcgcctgcgccaacgccttcaacaacagcattatccccgaggacacattcttcccaagccccgagagcagctgcggtacccagagttttgggttgttggaccctaaattgtgctatctgttggacggaatcctgttcatttacggagtgatcctgaccgcattgttcctgcgggttaagttttccagatccgcagacgcacccgcttaccaacaagggcagaaccaactctacaatgaacttaatttggggcggagggaagagtacgacgttctggacaaaaggaggggacgagatcccgagatgggcggaaagcctcagcgaaggaagaatccgcaagaggggctttataacgaactccagaaagataaaatggcagaagcctatagtgagattgggatgaagggagaaaggaggaggggtaaaggtcacgatgggttgtaccaaggattgagcacagccactaaagatacctatgatgcgctccacatgcaggccctgccgccaaga

SEQ ID NO: 2805 - DNA, 3276 bp, Artificial Sequence
  Synthetic Polynucloetide
atggccttaccagtgaccgccttgctcctgccgctggccttgctgctccacgccgccaggccggaagtgcagctggttgaatctggcggaggactggttcagcctggcggatctctgagactgtcttgtgccgccagcggcttcagcttcagcgacttttggatgagctgggtccgacaggcccctggcaaaggacttgaatgggtcgccacaatcagccaggccggcagcgagaaggactacgtggactctgtgaagggcagattcaccatcagccgggacaacgccaagaagtccctgtacctccagatgaacagcctgagagccgaggacaccgccgtgtactattgtgcctctggcgtgtacagcttcgactacagaggccagggcaccctggtcacagtctcttctggtaccggcggaggcggatctggcggcggaggtagcggtggcggaggatctgaattcgacgtggtcatgacacagagcccttctagcctgtctgccagcgtgggcgacagagtgacaatcacctgtcagagcagcctggacatcagccactacctgaactggtatcagcagaagcccggcaaggcccctaagctgctgatctacgacgccagcaatctggaaaccggcgtgcccagcagattttctggcagcggaagcggcacccacttcaccttcacaatatccagcctccagcctgaggacttcgccacctactactgccagcagtacgacaacctgcctctgacctttggcggaggcaccaagctggaaatcaagagactcgaggacctgaagaacgtgttcccacctgaggtggccgtgttcgagcctagcgaggccgagatcagccacacccagaaagccaccctcgtgtgcctggctaccggcttctaccccgaccatgtggaactgtcttggtgggtcaacggcaaagaggtgcacagcggcgtgtctaccgacccccagccactgaaagaacagcccgccctgaacgacagccggtactgcctgagcagcagactgagagtgtccgccaccttctggcagaacccccggaaccacttcagatgccaggtgcagttctacggcctgagcgagaacgacgagtggacccaggacagagccaagcccgtgacccagatcgtgtctgccgaagcctggggcagagccgattgcggatcccagagcttcggcctgctggaccccaagctgtgctacctgctggatggcatcctgttcatctacggcgtgatcctgaccgccctgttcctgagagtgaagttcagcagaagcgccgacgcccctgcctaccagcagggacagaaccaactgtacaacgagctgaacctgggcagacgggaagagtacgacgtgctggacaagcggagaggcagggaccctgagatgggcggaaagccccagcggagaaagaacccccaggaaggactgtataacgaactccagaaagacaagatggccgaagcctacagcgagatcggcatgaagggcgagcggagaagaggcaagggccacgatggcctgtaccagggcctgagcaccgccaccaaggacacctatgacgccctgcacatgcaggccctgcctccaagaagggccaagcgatctggatctggagcaacaaacttctcactactcaaacaagcaggtgacgtggaggagaatcccgggcctactagtatggactggatttggcgcatccttttccttgtcggcgctgctaccggcgcgcattccgggccccagctccagctgcaagagtctggacctggcctggtcaagcctagcgagacactgagcctgacctgtaccgtgtccggcgatagcatcagcagcggcgattactactggggctggatcagacagcctcctggcaaaggactggaatggatcggccacatctactacagcggcgtgacctactacaaccccagcctgaagtccagagtgaccatcagcgtggacaccagccggaaccagttctccctgaagctgtctagcgtgacagccgccgataccgccgtgtactactgcaccagagaggacagcagcaactggcggagtagaggccagggaacactggtcacagttagctctggatccggcggaggcggaagtggaggcggaggatctggcggcggaggctctttcgaacaagttcaactggttcaatcaggcggaggcgtggtgcaacctggtggctctctgagagtgtcttgtgctgcctctggcgtgaccctgagcgactatggaatgcactgggtccgacaggcccctggcaaaggacttgagtgggtcgccttcatcagaaacgacggcagcgacaagtattacgccgacagcgtgaagggcagattcaccatcagccgggacaacagcgagaaaaccgtgtctctccagatgtctagcctgagagccgaggacaccgccgtgtactactgtgccaagaatggcgagagcggccctctggactactggtatctggatctgtggggcagaggcaccctggtcacagtctcttctacgcgtatccagaaccctgatcctgccgtgtaccagctgcgggatagcaagagcagcgacaagagcgtgtgtctgttcaccgacttcgacagccagaccaacgtgtcccagagcaaggactccgacgtgtacatcaccgataagaccgtgctggacatgcggagcatggacttcaagagcaactccgccgtggcctggtccaacaagtccgatttcgcctgcgccaacgccttcaacaacagcattatccccgaggacacattcttcccaagccccgagagcagctgcggtacccagagttttgggttgttggaccctaaattgtgctatctgttggacggaatcctgttcatttacggagtgatcctgaccgcattgttcctgcgggttaagttttccagatccgcagacgcacccgcttaccaacaagggcagaaccaactctacaatgaacttaatttggggcggagggaagagtacgacgttctggacaaaaggaggggacgagatcccgagatgggcggaaagcctcagcgaaggaagaatccgcaagaggggctttataacgaactccagaaagataaaatggcagaagcctatagtgagattgggatgaagggagaaaggaggaggggtaaaggtcacgatgggttgtaccaaggattgagcacagccactaaagatacctatgatgcgctccacatgcaggccctgccgccaaga

SEQ ID NO: 2806 - DNA, 3288 bp, Artificial Sequence
  Synthetic Polynucloetide
atggccttaccagtgaccgccttgctcctgccgctggccttgctgctccacgccgccaggccggaagtgcagctggttgaatctggcggaggactggttcagcctggcggatctctgagactgtcttgtgccgccagcggcttcagcttcagcgacttttggatgagctgggtccgacaggcccctggcaaaggacttgaatgggtcgccacaatcagccaggccggcagcgagaaggactacgtggactctgtgaagggcagattcaccatcagccgggacaacgccaagaagtccctgtacctccagatgaacagcctgagagccgaggacaccgccgtgtactattgtgcctctggcgtgtacagcttcgactacagaggccagggcaccctggtcacagtctcttctggtaccggcggaggcggatctggcggcggaggtagcggtggcggaggatctgaattcagctacgagctgacacagcctccatccgtgtctggcacacctggacagagagtggctatctcctgtagcggcagcagcagcaacatcggcaccagaatggtcacctggtatcagcacgtgccaggcacagcccctaagctgctgatcttcaacaacaaccagcggcctagcggcgtgcccgatagattttctgccagcaagagcggcacaagcgccagcctggctatcatcggactccagtctgacgacgaggccgactactactgtgccacctgggacgacaacgtgaagtcctacgtgttcggcaccggcaccaaagtgacagtgcttggaagtagactcgaggacctgaagaacgtgttcccacctgaggtggccgtgttcgagcctagcgaggccgagatcagccacacccagaaagccaccctcgtgtgcctggctaccggcttctaccccgaccatgtggaactgtcttggtgggtcaacggcaaagaggtgcacagcggcgtgtctaccgacccccagccactgaaagaacagcccgccctgaacgacagccggtactgcctgagcagcagactgagagtgtccgccaccttctggcagaacccccggaaccacttcagatgccaggtgcagttctacggcctgagcgagaacgacgagtggacccaggacagagccaagcccgtgacccagatcgtgtctgccgaagcctggggcagagccgattgcggatcccagagcttcggcctgctggaccccaagctgtgctacctgctggatggcatcctgttcatctacggcgtgatcctgaccgccctgttcctgagagtgaagttcagcagaagcgccgacgcccctgcctaccagcagggacagaaccaactgtacaacgagctgaacctgggcagacgggaagagtacgacgtgctggacaagcggagaggcagggaccctgagatgggcggaaagccccagcggagaaagaacccccaggaaggactgtataacgaactccagaaagacaagatggccgaagcctacagcgagatcggcatgaagggcgagcggagaagaggcaagggccacgatggcctgtaccagggcctgagcaccgccaccaaggacacctatgacgccctgcacatgcaggccctgcctccaagaagggccaagcgatctggatctggagcaacaaacttctcactactcaaacaagcaggtgacgtggaggagaatcccgggcctactagtatggactggatttggcgcatccttttccttgtcggcgctgctaccggcgcgcattccgggccccagctccagctgcaagagtctggacctggcctggtcaagcctagcgagacactgagcctgacctgtaccgtgtccggcgatagcatcagcagcggcgattactactggggctggatcagacagcctcctggcaaaggactggaatggatcggccacatctactacagcggcgtgacctactacaaccccagcctgaagtccagagtgaccatcagcgtggacaccagccggaaccagttctccctgaagctgtctagcgtgacagccgccgataccgccgtgtactactgcaccagagaggacagcagcaactggcggagtagaggccagggaacactggtcacagttagctctggatccggcggaggcggaagtggaggcggaggatctggcggcggaggctctttcgaacttgaaatggcccaggttcagctccagcagtggggagctggactgctgaagcctagcgagacactgagcctgacctgtgctgtgtacggcggcagcttcagcggctactactggtcctggatcagacagcctcctggcaaaggactggaatggatcggcgagatcaaccacagcggctccaccaactacaaccccagcctgaagtccagagtgaccatcagcgtggacaccagcaagaaccagttctccctgaagctgagcagcgtgacagccgctgataccgccgtgtactattgcgctagagcccctcagtcttggtacgtgggagatgtgtggggccagggcacactggttacagtgtcatctacgcgtatccagaaccctgatcctgccgtgtaccagctgcgggatagcaagagcagcgacaagagcgtgtgtctgttcaccgacttcgacagccagaccaacgtgtcccagagcaaggactccgacgtgtacatcaccgataagaccgtgctggacatgcggagcatggacttcaagagcaactccgccgtggcctggtccaacaagtccgatttcgcctgcgccaacgccttcaacaacagcattatccccgaggacacattcttcccaagccccgagagcagctgcggtacccagagttttgggttgttggaccctaaattgtgctatctgttggacggaatcctgttcatttacggagtgatcctgaccgcattgttcctgcgggttaagttttccagatccgcagacgcacccgcttaccaacaagggcagaaccaactctacaatgaacttaatttggggcggagggaagagtacgacgttctggacaaaaggaggggacgagatcccgagatgggcggaaagcctcagcgaaggaagaatccgcaagaggggctttataacgaactccagaaagataaaatggcagaagcctatagtgagattgggatgaagggagaaaggaggaggggtaaaggtcacgatgggttgtaccaaggattgagcacagccactaaagatacctatgatgcgctccacatgcaggccctgccgccaaga

SEQ ID NO: 2807 - DNA, 3279 bp, Artificial Sequence
  Synthetic Polynucloetide
atggccttaccagtgaccgccttgctcctgccgctggccttgctgctccacgccgccaggccggaagtgcagctggttgaatctggcggaggactggttcagcctggcggatctctgagactgtcttgtgccgccagcggcttcagcttcagcgacttttggatgagctgggtccgacaggcccctggcaaaggacttgaatgggtcgccacaatcagccaggccggcagcgagaaggactacgtggactctgtgaagggcagattcaccatcagccgggacaacgccaagaagtccctgtacctccagatgaacagcctgagagccgaggacaccgccgtgtactattgtgcctctggcgtgtacagcttcgactacagaggccagggcaccctggtcacagtctcttctggtaccggcggaggcggatctggcggcggaggtagcggtggcggaggatctgaattccagtctgtgctgacacagcctcctagcctgtctgtggcccctggaaagacagccagcatcacatgcggcggcaacaacatcggcatgaagtccgtgcactggtatcagcagaggccaggacaggctcctgtgctggtcatctactacgacagcgacagaccctctggcatccccggcagattttccggcagcaactctggcaataccgccacactgaccatctccagagtggaagctggcgacgaggccgactactactgccaagtgtgggataccaccggcgatcaccctggctatgtgtttggcaccggcaccaaagtgacagtgcttctcgaggacctgaagaacgtgttcccacctgaggtggccgtgttcgagcctagcgaggccgagatcagccacacccagaaagccaccctcgtgtgcctggctaccggcttctaccccgaccatgtggaactgtcttggtgggtcaacggcaaagaggtgcacagcggcgtgtctaccgacccccagccactgaaagaacagcccgccctgaacgacagccggtactgcctgagcagcagactgagagtgtccgccaccttctggcagaacccccggaaccacttcagatgccaggtgcagttctacggcctgagcgagaacgacgagtggacccaggacagagccaagcccgtgacccagatcgtgtctgccgaagcctggggcagagccgattgcggatcccagagcttcggcctgctggaccccaagctgtgctacctgctggatggcatcctgttcatctacggcgtgatcctgaccgccctgttcctgagagtgaagttcagcagaagcgccgacgcccctgcctaccagcagggacagaaccaactgtacaacgagctgaacctgggcagacgggaagagtacgacgtgctggacaagcggagaggcagggaccctgagatgggcggaaagccccagcggagaaagaacccccaggaaggactgtataacgaactccagaaagacaagatggccgaagcctacagcgagatcggcatgaagggcgagcggagaagaggcaagggccacgatggcctgtaccagggcctgagcaccgccaccaaggacacctatgacgccctgcacatgcaggccctgcctccaagaagggccaagcgatctggatctggagcaacaaacttctcactactcaaacaagcaggtgacgtggaggagaatcccgggcctactagtatggactggatttggcgcatccttttccttgtcggcgctgctaccggcgcgcattccgggccccagctccagctgcaagagtctggacctggcctggtcaagcctagcgagacactgagcctgacctgtaccgtgtccggcgatagcatcagcagcggcgattactactggggctggatcagacagcctcctggcaaaggactggaatggatcggccacatctactacagcggcgtgacctactacaaccccagcctgaagtccagagtgaccatcagcgtggacaccagccggaaccagttctccctgaagctgtctagcgtgacagccgccgataccgccgtgtactactgcaccagagaggacagcagcaactggcggagtagaggccagggaacactggtcacagttagctctggatccggcggaggcggaagtggaggcggaggatctggcggcggaggctctttcgaacaagttcaactggttcagagcggagccgaagtgaagaaacctggcagcagcgtgaaggtgtcctgcaaagcaagcggcggcacctttagcagctacgccatctcttgggtccgacaggcacctggacaaggactggaatggatgggcggcatcatccccatcttcggcacagccaattacgcccagaaattccagggcagagtgaccatcaccgccgacgagtctacaagcaccgcctacatggaactgagcagcctgagaagcgaggacaccgccgtgtactattgtgccagaggcgtgtacggctacagcggctctgccccttatgatgagtggggccagggaaccctggtcaccgtttcttctacgcgtatccagaaccctgatcctgccgtgtaccagctgcgggatagcaagagcagcgacaagagcgtgtgtctgttcaccgacttcgacagccagaccaacgtgtcccagagcaaggactccgacgtgtacatcaccgataagaccgtgctggacatgcggagcatggacttcaagagcaactccgccgtggcctggtccaacaagtccgatttcgcctgcgccaacgccttcaacaacagcattatccccgaggacacattcttcccaagccccgagagcagctgcggtacccagagttttgggttgttggaccctaaattgtgctatctgttggacggaatcctgttcatttacggagtgatcctgaccgcattgttcctgcgggttaagttttccagatccgcagacgcacccgcttaccaacaagggcagaaccaactctacaatgaacttaatttggggcggagggaagagtacgacgttctggacaaaaggaggggacgagatcccgagatgggcggaaagcctcagcgaaggaagaatccgcaagaggggctttataacgaactccagaaagataaaatggcagaagcctatagtgagattgggatgaagggagaaaggaggaggggtaaaggtcacgatgggttgtaccaaggattgagcacagccactaaagatacctatgatgcgctccacatgcaggccctgccgccaaga

SEQ ID NO: 2808 - DNA, 3273 bp, Artificial Sequence
  Synthetic Polynucloetide
atggccttaccagtgaccgccttgctcctgccgctggccttgctgctccacgccgccaggccggaagtgcagctggttgaatctggcggaggactggttcagcctggcggatctctgagactgtcttgtgccgccagcggcttcagcttcagcgacttttggatgagctgggtccgacaggcccctggcaaaggacttgaatgggtcgccacaatcagccaggccggcagcgagaaggactacgtggactctgtgaagggcagattcaccatcagccgggacaacgccaagaagtccctgtacctccagatgaacagcctgagagccgaggacaccgccgtgtactattgtgcctctggcgtgtacagcttcgactacagaggccagggcaccctggtcacagtctcttctggtaccggcggaggcggatctggcggcggaggtagcggtggcggaggatctgaattcgaggtgcaactggttgagtctggcggaggactggtgcagcctggaagaagcctgagactgtcttgtgccgccagcggcttcaccttcgacgattatgccatgcactgggtccgacaggcccctggcaaaggacttgaatgggtgtccggcatctcctggaacagcggctctatcggctacgccgattccgtgaagggcagattcaccatcagccgggacaacgccaagaacagcctgtacctccagatgaactccctgagagccgaggacacagccctgtactactgcgccaaagacaaaggcggaggctactacgacttttggagcggcagcgattattggggccagggcacactggtcacagtgtctagcctcgaggacctgaagaacgtgttcccacctgaggtggccgtgttcgagcctagcgaggccgagatcagccacacccagaaagccaccctcgtgtgcctggctaccggcttctaccccgaccatgtggaactgtcttggtgggtcaacggcaaagaggtgcacagcggcgtgtctaccgacccccagccactgaaagaacagcccgccctgaacgacagccggtactgcctgagcagcagactgagagtgtccgccaccttctggcagaacccccggaaccacttcagatgccaggtgcagttctacggcctgagcgagaacgacgagtggacccaggacagagccaagcccgtgacccagatcgtgtctgccgaagcctggggcagagccgattgcggatcccagagcttcggcctgctggaccccaagctgtgctacctgctggatggcatcctgttcatctacggcgtgatcctgaccgccctgttcctgagagtgaagttcagcagaagcgccgacgcccctgcctaccagcagggacagaaccaactgtacaacgagctgaacctgggcagacgggaagagtacgacgtgctggacaagcggagaggcagggaccctgagatgggcggaaagccccagcggagaaagaacccccaggaaggactgtataacgaactccagaaagacaagatggccgaagcctacagcgagatcggcatgaagggcgagcggagaagaggcaagggccacgatggcctgtaccagggcctgagcaccgccaccaaggacacctatgacgccctgcacatgcaggccctgcctccaagaagggccaagcgatctggatctggagcaacaaacttctcactactcaaacaagcaggtgacgtggaggagaatcccgggcctactagtatggactggatttggcgcatccttttccttgtcggcgctgctaccggcgcgcattccgggccccagctccagctgcaagagtctggacctggcctggtcaagcctagcgagacactgagcctgacctgtaccgtgtccggcgatagcatcagcagcggcgattactactggggctggatcagacagcctcctggcaaaggactggaatggatcggccacatctactacagcggcgtgacctactacaaccccagcctgaagtccagagtgaccatcagcgtggacaccagccggaaccagttctccctgaagctgtctagcgtgacagccgccgataccgccgtgtactactgcaccagagaggacagcagcaactggcggagtagaggccagggaacactggtcacagttagctctggatccggcggaggcggaagtggaggcggaggatctggcggcggaggctctttcgaatcttctgagctgacacaggaccctgccgtgtctgttgctctgggccagacagtgcggattacctgtcagggcgatagcctgagaagctactacgcctcctggtatcagcagaagccaggccaggctcctgtgctggtcatctacggcaagaacaacagacccagcggcatccccgatagattcagcggaagcagctctggcaataccgccagcctgacaattactggcgctcaggccgaggacgaggccgactactactgcaacagcagagatagcagcggctgggttttcggcggaggcacaaaactgacagtgctgacgcgtatccagaaccctgatcctgccgtgtaccagctgcgggatagcaagagcagcgacaagagcgtgtgtctgttcaccgacttcgacagccagaccaacgtgtcccagagcaaggactccgacgtgtacatcaccgataagaccgtgctggacatgcggagcatggacttcaagagcaactccgccgtggcctggtccaacaagtccgatttcgcctgcgccaacgccttcaacaacagcattatccccgaggacacattcttcccaagccccgagagcagctgcggtacccagagttttgggttgttggaccctaaattgtgctatctgttggacggaatcctgttcatttacggagtgatcctgaccgcattgttcctgcgggttaagttttccagatccgcagacgcacccgcttaccaacaagggcagaaccaactctacaatgaacttaatttggggcggagggaagagtacgacgttctggacaaaaggaggggacgagatcccgagatgggcggaaagcctcagcgaaggaagaatccgcaagaggggctttataacgaactccagaaagataaaatggcagaagcctatagtgagattgggatgaagggagaaaggaggaggggtaaaggtcacgatgggttgtaccaaggattgagcacagccactaaagatacctatgatgcgctccacatgcaggccctgccgccaaga

SEQ ID NO: 2809 - DNA, 3300 bp, Artificial Sequence
  Synthetic Polynucloetide
atggccttaccagtgaccgccttgctcctgccgctggccttgctgctccacgccgccaggccggaagtgcagctggttgaatctggcggaggactggttcagcctggcggatctctgagactgtcttgtgccgccagcggcttcagcttcagcgacttttggatgagctgggtccgacaggcccctggcaaaggacttgaatgggtcgccacaatcagccaggccggcagcgagaaggactacgtggactctgtgaagggcagattcaccatcagccgggacaacgccaagaagtccctgtacctccagatgaacagcctgagagccgaggacaccgccgtgtactattgtgcctctggcgtgtacagcttcgactacagaggccagggcaccctggtcacagtctcttctggtaccggcggaggcggatctggcggcggaggtagcggtggcggaggatctgaattcgaagtgcagctccagcagtctggacctggcctggttaagcctagccagacactgagcctgacctgtgccatcagcggcgatagcgtgctgagcaacagcgacacctggaactggatcagacagagccctagcagaggactggaatggctgggcagaacctaccacagaagcacttggtacgacgactacgccagctctgtgcggggcagagtgtccatcaatgtggacaccagcaagaaccagtacagcctgcaactgaacgccgtgacacctgaggataccggcgtgtactactgcgccagagacagactccaggacggcaactcttggagcgacgcctttgatgtgtggggccagggcacaatggtcaccgtttctagcctcgaggacctgaagaacgtgttcccacctgaggtggccgtgttcgagcctagcgaggccgagatcagccacacccagaaagccaccctcgtgtgcctggctaccggcttctaccccgaccatgtggaactgtcttggtgggtcaacggcaaagaggtgcacagcggcgtgtctaccgacccccagccactgaaagaacagcccgccctgaacgacagccggtactgcctgagcagcagactgagagtgtccgccaccttctggcagaacccccggaaccacttcagatgccaggtgcagttctacggcctgagcgagaacgacgagtggacccaggacagagccaagcccgtgacccagatcgtgtctgccgaagcctggggcagagccgattgcggatcccagagcttcggcctgctggaccccaagctgtgctacctgctggatggcatcctgttcatctacggcgtgatcctgaccgccctgttcctgagagtgaagttcagcagaagcgccgacgcccctgcctaccagcagggacagaaccaactgtacaacgagctgaacctgggcagacgggaagagtacgacgtgctggacaagcggagaggcagggaccctgagatgggcggaaagccccagcggagaaagaacccccaggaaggactgtataacgaactccagaaagacaagatggccgaagcctacagcgagatcggcatgaagggcgagcggagaagaggcaagggccacgatggcctgtaccagggcctgagcaccgccaccaaggacacctatgacgccctgcacatgcaggccctgcctccaagaagggccaagcgatctggatctggagcaacaaacttctcactactcaaacaagcaggtgacgtggaggagaatcccgggcctactagtatggactggatttggcgcatccttttccttgtcggcgctgctaccggcgcgcattccgggccccagctccagctgcaagagtctggacctggcctggtcaagcctagcgagacactgagcctgacctgtaccgtgtccggcgatagcatcagcagcggcgattactactggggctggatcagacagcctcctggcaaaggactggaatggatcggccacatctactacagcggcgtgacctactacaaccccagcctgaagtccagagtgaccatcagcgtggacaccagccggaaccagttctccctgaagctgtctagcgtgacagccgccgataccgccgtgtactactgcaccagagaggacagcagcaactggcggagtagaggccagggaacactggtcacagttagctctggatccggcggaggcggaagtggaggcggaggatctggcggcggaggctctttcgaacaatctgctctgacacagcctgccagcgtgtcaggatctcctggacagagcatcaccatctcttgcaccggcaccagctctgatgtcggcggctacaattacgtgtcctggtatcagcagcaccccggcaaggcccctaagctgatgatctacgacgtgtccaacagacccagcggcgtgtccaatagattctccggcagcaagagcggcaacaccgccagcctgacaatttctggactgcaagccgaggacgaggccgactactactgtagcagctacaccagcagcagcacactggtgtacgtgttcggcacaggcaccaaagtgaccgtgcttacgcgtatccagaaccctgatcctgccgtgtaccagctgcgggatagcaagagcagcgacaagagcgtgtgtctgttcaccgacttcgacagccagaccaacgtgtcccagagcaaggactccgacgtgtacatcaccgataagaccgtgctggacatgcggagcatggacttcaagagcaactccgccgtggcctggtccaacaagtccgatttcgcctgcgccaacgccttcaacaacagcattatccccgaggacacattcttcccaagccccgagagcagctgcggtacccagagttttgggttgttggaccctaaattgtgctatctgttggacggaatcctgttcatttacggagtgatcctgaccgcattgttcctgcgggttaagttttccagatccgcagacgcacccgcttaccaacaagggcagaaccaactctacaatgaacttaatttggggcggagggaagagtacgacgttctggacaaaaggaggggacgagatcccgagatgggcggaaagcctcagcgaaggaagaatccgcaagaggggctttataacgaactccagaaagataaaatggcagaagcctatagtgagattgggatgaagggagaaaggaggaggggtaaaggtcacgatgggttgtaccaaggattgagcacagccactaaagatacctatgatgcgctccacatgcaggccctgccgccaaga

SEQ ID NO: 2810 - DNA, 3234 bp, Artificial Sequence
  Synthetic Polynucloetide
atggccttaccagtgaccgccttgctcctgccgctggccttgctgctccacgccgccaggccggaagtgcagctggttgaatctggcggaggactggttcagcctggcggatctctgagactgtcttgtgccgccagcggcttcagcttcagcgacttttggatgagctgggtccgacaggcccctggcaaaggacttgaatgggtcgccacaatcagccaggccggcagcgagaaggactacgtggactctgtgaagggcagattcaccatcagccgggacaacgccaagaagtccctgtacctccagatgaacagcctgagagccgaggacaccgccgtgtactattgtgcctctggcgtgtacagcttcgactacagaggccagggcaccctggtcacagtctcttctggtaccggcggaggcggatctggcggcggaggtagcggtggcggaggatctgaattccaggtgcaactggttcagtctggggccgaagtgaagaaacctggggcctctgtgaaggtgtcctgcaaggcttccggctacacctttaccagctacgacatcaactgggtccgacaggccacaggccaaggactggaatggatgggctggatgaaccccaacagcggcaataccggctacgcccagaaattccagggcagagtgaccatgaccagaaacaccagcatcagcaccgcctacatggaactgagcagcctgagaagcgaggacaccgccgtgtactattgcgccagaggcgacagcaccaaggtggaaatcaaactcgaggacctgaagaacgtgttcccacctgaggtggccgtgttcgagcctagcgaggccgagatcagccacacccagaaagccaccctcgtgtgcctggctaccggcttctaccccgaccatgtggaactgtcttggtgggtcaacggcaaagaggtgcacagcggcgtgtctaccgacccccagccactgaaagaacagcccgccctgaacgacagccggtactgcctgagcagcagactgagagtgtccgccaccttctggcagaacccccggaaccacttcagatgccaggtgcagttctacggcctgagcgagaacgacgagtggacccaggacagagccaagcccgtgacccagatcgtgtctgccgaagcctggggcagagccgattgcggatcccagagcttcggcctgctggaccccaagctgtgctacctgctggatggcatcctgttcatctacggcgtgatcctgaccgccctgttcctgagagtgaagttcagcagaagcgccgacgcccctgcctaccagcagggacagaaccaactgtacaacgagctgaacctgggcagacgggaagagtacgacgtgctggacaagcggagaggcagggaccctgagatgggcggaaagccccagcggagaaagaacccccaggaaggactgtataacgaactccagaaagacaagatggccgaagcctacagcgagatcggcatgaagggcgagcggagaagaggcaagggccacgatggcctgtaccagggcctgagcaccgccaccaaggacacctatgacgccctgcacatgcaggccctgcctccaagaagggccaagcgatctggatctggagcaacaaacttctcactactcaaacaagcaggtgacgtggaggagaatcccgggcctactagtatggactggatttggcgcatccttttccttgtcggcgctgctaccggcgcgcattccgggccccagctccagctgcaagagtctggacctggcctggtcaagcctagcgagacactgagcctgacctgtaccgtgtccggcgatagcatcagcagcggcgattactactggggctggatcagacagcctcctggcaaaggactggaatggatcggccacatctactacagcggcgtgacctactacaaccccagcctgaagtccagagtgaccatcagcgtggacaccagccggaaccagttctccctgaagctgtctagcgtgacagccgccgataccgccgtgtactactgcaccagagaggacagcagcaactggcggagtagaggccagggaacactggtcacagttagctctggatccggcggaggcggaagtggaggcggaggatctggcggcggaggctctttcgaacaatctgtgctgacccagcctagatccgtgtctggctctcctggacagagcgtgaccatctcttgtaccggcaccagctctgatgtcggcggctacaattacgtgtcctggtatcagcagcaccccggcgaagcccctaagctgattatctacgacgccgacaagcggcccagcggcatcagcaatagattcagctctggcaagagcggcaacaccgccagcctgacaatcagcggactccaggtggaagatgaggccgactactactgctgctcctatgccggcggaagcacctgggttttcggaggcggtacaaaagtgaccgtgctgacgcgtatccagaaccctgatcctgccgtgtaccagctgcgggatagcaagagcagcgacaagagcgtgtgtctgttcaccgacttcgacagccagaccaacgtgtcccagagcaaggactccgacgtgtacatcaccgataagaccgtgctggacatgcggagcatggacttcaagagcaactccgccgtggcctggtccaacaagtccgatttcgcctgcgccaacgccttcaacaacagcattatccccgaggacacattcttcccaagccccgagagcagctgcggtacccagagttttgggttgttggaccctaaattgtgctatctgttggacggaatcctgttcatttacggagtgatcctgaccgcattgttcctgcgggttaagttttccagatccgcagacgcacccgcttaccaacaagggcagaaccaactctacaatgaacttaatttggggcggagggaagagtacgacgttctggacaaaaggaggggacgagatcccgagatgggcggaaagcctcagcgaaggaagaatccgcaagaggggctttataacgaactccagaaagataaaatggcagaagcctatagtgagattgggatgaagggagaaaggaggaggggtaaaggtcacgatgggttgtaccaaggattgagcacagccactaaagatacctatgatgcgctccacatgcaggccctgccgccaaga

SEQ ID NO: 2811 - DNA, 3300 bp, Artificial Sequence
  Synthetic Polynucloetide
atggccttaccagtgaccgccttgctcctgccgctggccttgctgctccacgccgccaggccggaagtgcagctggttgaatctggcggaggactggttcagcctggcggatctctgagactgtcttgtgccgccagcggcttcagcttcagcgacttttggatgagctgggtccgacaggcccctggcaaaggacttgaatgggtcgccacaatcagccaggccggcagcgagaaggactacgtggactctgtgaagggcagattcaccatcagccgggacaacgccaagaagtccctgtacctccagatgaacagcctgagagccgaggacaccgccgtgtactattgtgcctctggcgtgtacagcttcgactacagaggccagggcaccctggtcacagtctcttctggtaccggcggaggcggatctggcggcggaggtagcggtggcggaggatctgaattcgaagtgcagctccagcagtctggacctggcctggttaagcctagccagacactgagcctgacctgtgccatcagcggcgatagcgtgtcctctaatagcgccgcctggaactggatcagacagagccctagcagaggactggaatggctgggcagaacctactaccgcagcaagtggtacagcgactacgccgtgtccgtgaagtcccggatcaccatcaatcccgacaccagcaagaaccagttcagcctgcaactgaacagcgtgacccctgaggataccgccgtgtactactgcgccagagatccctacgacttttggagcggctaccccgacgcctttgacatctggggacagggcacaatggtcaccgtttctagcctcgaggacctgaagaacgtgttcccacctgaggtggccgtgttcgagcctagcgaggccgagatcagccacacccagaaagccaccctcgtgtgcctggctaccggcttctaccccgaccatgtggaactgtcttggtgggtcaacggcaaagaggtgcacagcggcgtgtctaccgacccccagccactgaaagaacagcccgccctgaacgacagccggtactgcctgagcagcagactgagagtgtccgccaccttctggcagaacccccggaaccacttcagatgccaggtgcagttctacggcctgagcgagaacgacgagtggacccaggacagagccaagcccgtgacccagatcgtgtctgccgaagcctggggcagagccgattgcggatcccagagcttcggcctgctggaccccaagctgtgctacctgctggatggcatcctgttcatctacggcgtgatcctgaccgccctgttcctgagagtgaagttcagcagaagcgccgacgcccctgcctaccagcagggacagaaccaactgtacaacgagctgaacctgggcagacgggaagagtacgacgtgctggacaagcggagaggcagggaccctgagatgggcggaaagccccagcggagaaagaacccccaggaaggactgtataacgaactccagaaagacaagatggccgaagcctacagcgagatcggcatgaagggcgagcggagaagaggcaagggccacgatggcctgtaccagggcctgagcaccgccaccaaggacacctatgacgccctgcacatgcaggccctgcctccaagaagggccaagcgatctggatctggagcaacaaacttctcactactcaaacaagcaggtgacgtggaggagaatcccgggcctactagtatggactggatttggcgcatccttttccttgtcggcgctgctaccggcgcgcattccgggccccagctccagctgcaagagtctggacctggcctggtcaagcctagcgagacactgagcctgacctgtaccgtgtccggcgatagcatcagcagcggcgattactactggggctggatcagacagcctcctggcaaaggactggaatggatcggccacatctactacagcggcgtgacctactacaaccccagcctgaagtccagagtgaccatcagcgtggacaccagccggaaccagttctccctgaagctgtctagcgtgacagccgccgataccgccgtgtactactgcaccagagaggacagcagcaactggcggagtagaggccagggaacactggtcacagttagctctggatccggcggaggcggaagtggaggcggaggatctggcggcggaggctctttcgaacaatctgctctgacacagcctgccagcgtgtcaggatctcctggacagagcatcaccatctcttgcaccggcaccagctctgatgtcggcggctacaattacgtgtcctggtatcagcagcaccccggcaaggcccctaaagtgattatcagcgaagtgaacaacagacccagcggcgtgtcccacagattcagcggctctaagtctggcaacaccgccagcctgacaatctctggactgcaagccgaggacgaggccgactacttctgtagcagctacaccagcggcagaaccctgtacgtgttcggcacaggcagcaaagtgacagtgctgggaacgcgtatccagaaccctgatcctgccgtgtaccagctgcgggatagcaagagcagcgacaagagcgtgtgtctgttcaccgacttcgacagccagaccaacgtgtcccagagcaaggactccgacgtgtacatcaccgataagaccgtgctggacatgcggagcatggacttcaagagcaactccgccgtggcctggtccaacaagtccgatttcgcctgcgccaacgccttcaacaacagcattatccccgaggacacattcttcccaagccccgagagcagctgcggtacccagagttttgggttgttggaccctaaattgtgctatctgttggacggaatcctgttcatttacggagtgatcctgaccgcattgttcctgcgggttaagttttccagatccgcagacgcacccgcttaccaacaagggcagaaccaactctacaatgaacttaatttggggcggagggaagagtacgacgttctggacaaaaggaggggacgagatcccgagatgggcggaaagcctcagcgaaggaagaatccgcaagaggggctttataacgaactccagaaagataaaatggcagaagcctatagtgagattgggatgaagggagaaaggaggaggggtaaaggtcacgatgggttgtaccaaggattgagcacagccactaaagatacctatgatgcgctccacatgcaggccctgccgccaaga

SEQ ID NO: 2812 - DNA, 3297 bp, Artificial Sequence
  Synthetic Polynucloetide
atggccttaccagtgaccgccttgctcctgccgctggccttgctgctccacgccgccaggccggaagtgcagctggttgaatctggcggaggactggttcagcctggcggatctctgagactgtcttgtgccgccagcggcttcagcttcagcgacttttggatgagctgggtccgacaggcccctggcaaaggacttgaatgggtcgccacaatcagccaggccggcagcgagaaggactacgtggactctgtgaagggcagattcaccatcagccgggacaacgccaagaagtccctgtacctccagatgaacagcctgagagccgaggacaccgccgtgtactattgtgcctctggcgtgtacagcttcgactacagaggccagggcaccctggtcacagtctcttctggtaccggcggaggcggatctggcggcggaggtagcggtggcggaggatctgaattccaatctgctctgacacagcctgccagcgcctctggatctcctggacagagcgtgaccatctcctgtaccggcacctcttctgatgtcggcggctacaactacgtgtcctggtatcagcagcaccccggcaaggcccctaagctgatgatctacgacgtgtccaacagacccagcggcgtgtccaatagattctccggcagcaagagcggcaacaccgccagcctgacaatttctggactgcaagccgaggacgaggccgactactactgtagcagctacaccagcagcagcacactgtacgtgttcggcacaggcacccagctcacagttcttctcgaggacctgaagaacgtgttcccacctgaggtggccgtgttcgagcctagcgaggccgagatcagccacacccagaaagccaccctcgtgtgcctggctaccggcttctaccccgaccatgtggaactgtcttggtgggtcaacggcaaagaggtgcacagcggcgtgtctaccgacccccagccactgaaagaacagcccgccctgaacgacagccggtactgcctgagcagcagactgagagtgtccgccaccttctggcagaacccccggaaccacttcagatgccaggtgcagttctacggcctgagcgagaacgacgagtggacccaggacagagccaagcccgtgacccagatcgtgtctgccgaagcctggggcagagccgattgcggatcccagagcttcggcctgctggaccccaagctgtgctacctgctggatggcatcctgttcatctacggcgtgatcctgaccgccctgttcctgagagtgaagttcagcagaagcgccgacgcccctgcctaccagcagggacagaaccaactgtacaacgagctgaacctgggcagacgggaagagtacgacgtgctggacaagcggagaggcagggaccctgagatgggcggaaagccccagcggagaaagaacccccaggaaggactgtataacgaactccagaaagacaagatggccgaagcctacagcgagatcggcatgaagggcgagcggagaagaggcaagggccacgatggcctgtaccagggcctgagcaccgccaccaaggacacctatgacgccctgcacatgcaggccctgcctccaagaagggccaagcgatctggatctggagcaacaaacttctcactactcaaacaagcaggtgacgtggaggagaatcccgggcctactagtatggactggatttggcgcatccttttccttgtcggcgctgctaccggcgcgcattccgggccccagctccagctgcaagagtctggacctggcctggtcaagcctagcgagacactgagcctgacctgtaccgtgtccggcgatagcatcagcagcggcgattactactggggctggatcagacagcctcctggcaaaggactggaatggatcggccacatctactacagcggcgtgacctactacaaccccagcctgaagtccagagtgaccatcagcgtggacaccagccggaaccagttctccctgaagctgtctagcgtgacagccgccgataccgccgtgtactactgcaccagagaggacagcagcaactggcggagtagaggccagggaacactggtcacagttagctctggatccggcggaggcggaagtggaggcggaggatctggcggcggaggctctttcgaagaagtgcagctccagcagtctggacctggcctggttaagcctagccagacactgagcctgacctgtgccatcagcggcgattccatgctgagcaacagcgacacctggaactggatcagacagagccccagcagaggcctggaatggctgggcagaacataccacagaagcacttggtacgacgactacgccagctctgtgcggggcagagtgtccatcaatgtggacaccagcaagaaccagtacagcctgcaactgaacgccgtgacacctgaggataccggcgtgtactactgtgccagagtgcggctccaggacggcaattcttggagcgacgcctttgatgtgtggggccagggcacaatggtcaccgtttctagcacgcgtatccagaaccctgatcctgccgtgtaccagctgcgggatagcaagagcagcgacaagagcgtgtgtctgttcaccgacttcgacagccagaccaacgtgtcccagagcaaggactccgacgtgtacatcaccgataagaccgtgctggacatgcggagcatggacttcaagagcaactccgccgtggcctggtccaacaagtccgatttcgcctgcgccaacgccttcaacaacagcattatccccgaggacacattcttcccaagccccgagagcagctgcggtacccagagttttgggttgttggaccctaaattgtgctatctgttggacggaatcctgttcatttacggagtgatcctgaccgcattgttcctgcgggttaagttttccagatccgcagacgcacccgcttaccaacaagggcagaaccaactctacaatgaacttaatttggggcggagggaagagtacgacgttctggacaaaaggaggggacgagatcccgagatgggcggaaagcctcagcgaaggaagaatccgcaagaggggctttataacgaactccagaaagataaaatggcagaagcctatagtgagattgggatgaagggagaaaggaggaggggtaaaggtcacgatgggttgtaccaaggattgagcacagccactaaagatacctatgatgcgctccacatgcaggccctgccgccaaga

SEQ ID NO: 2813 - DNA, 3297 bp, Artificial Sequence
  Synthetic Polynucloetide
atggccttaccagtgaccgccttgctcctgccgctggccttgctgctccacgccgccaggccggaagtgcagctggttgaatctggcggaggactggttcagcctggcggatctctgagactgtcttgtgccgccagcggcttcagcttcagcgacttttggatgagctgggtccgacaggcccctggcaaaggacttgaatgggtcgccacaatcagccaggccggcagcgagaaggactacgtggactctgtgaagggcagattcaccatcagccgggacaacgccaagaagtccctgtacctccagatgaacagcctgagagccgaggacaccgccgtgtactattgtgcctctggcgtgtacagcttcgactacagaggccagggcaccctggtcacagtctcttctggtaccggcggaggcggatctggcggcggaggtagcggtggcggaggatctgaattcgacgtgatgctgacccagacaccactgagcctgcctgtgtctctgggcgatcaggccagcatctcctgtagaagcagccagagcatcctgcacagcaccggcgatacctacctggaatggtatctccagaagcctggacagagccccaagctgctgattaacaaggtgtccaaccggctgagcggcgtgcccgatagattttctggcagcggctctggcaccgacttcaccctgaagatcagcagagtggaagccgaggacctgggcgtgtactactgcttccaaggcagccatgttccttggacctttggcggaggcaccaagctggaaatcaagagagctgacgccgctcctaccgtgtccatctttcctctcgaggacctgaagaacgtgttcccacctgaggtggccgtgttcgagcctagcgaggccgagatcagccacacccagaaagccaccctcgtgtgcctggctaccggcttctaccccgaccatgtggaactgtcttggtgggtcaacggcaaagaggtgcacagcggcgtgtctaccgacccccagccactgaaagaacagcccgccctgaacgacagccggtactgcctgagcagcagactgagagtgtccgccaccttctggcagaacccccggaaccacttcagatgccaggtgcagttctacggcctgagcgagaacgacgagtggacccaggacagagccaagcccgtgacccagatcgtgtctgccgaagcctggggcagagccgattgcggatcccagagcttcggcctgctggaccccaagctgtgctacctgctggatggcatcctgttcatctacggcgtgatcctgaccgccctgttcctgagagtgaagttcagcagaagcgccgacgcccctgcctaccagcagggacagaaccaactgtacaacgagctgaacctgggcagacgggaagagtacgacgtgctggacaagcggagaggcagggaccctgagatgggcggaaagccccagcggagaaagaacccccaggaaggactgtataacgaactccagaaagacaagatggccgaagcctacagcgagatcggcatgaagggcgagcggagaagaggcaagggccacgatggcctgtaccagggcctgagcaccgccaccaaggacacctatgacgccctgcacatgcaggccctgcctccaagaagggccaagcgatctggatctggagcaacaaacttctcactactcaaacaagcaggtgacgtggaggagaatcccgggcctactagtatggactggatttggcgcatccttttccttgtcggcgctgctaccggcgcgcattccgggccccagctccagctgcaagagtctggacctggcctggtcaagcctagcgagacactgagcctgacctgtaccgtgtccggcgatagcatcagcagcggcgattactactggggctggatcagacagcctcctggcaaaggactggaatggatcggccacatctactacagcggcgtgacctactacaaccccagcctgaagtccagagtgaccatcagcgtggacaccagccggaaccagttctccctgaagctgtctagcgtgacagccgccgataccgccgtgtactactgcaccagagaggacagcagcaactggcggagtagaggccagggaacactggtcacagttagctctggatccggcggaggcggaagtggaggcggaggatctggcggcggaggctctttcgaacaagtgaagctccagcagagcggccctagccttgtgaaacctggcgcttccgtgaagatgagctgcaaggccagcggctacaccttcaccgatttctacatgaaatgggtcaagcagagccacggcaagtctctggaatggatcggcgacatcaaccccaacatcggagacaccttctacaaccagaagttcaagggcaaagccacactgaccgtggacaagagcagcagcaccgcctacatgcagctcaacagcctgaccagcgaggacagcgccgtgtacttttgttccgtgggctacttcgacgtgtggggagccggaacaaccgtgacagtctcttctacgcgtatccagaaccctgatcctgccgtgtaccagctgcgggatagcaagagcagcgacaagagcgtgtgtctgttcaccgacttcgacagccagaccaacgtgtcccagagcaaggactccgacgtgtacatcaccgataagaccgtgctggacatgcggagcatggacttcaagagcaactccgccgtggcctggtccaacaagtccgatttcgcctgcgccaacgccttcaacaacagcattatccccgaggacacattcttcccaagccccgagagcagctgcggtacccagagttttgggttgttggaccctaaattgtgctatctgttggacggaatcctgttcatttacggagtgatcctgaccgcattgttcctgcgggttaagttttccagatccgcagacgcacccgcttaccaacaagggcagaaccaactctacaatgaacttaatttggggcggagggaagagtacgacgttctggacaaaaggaggggacgagatcccgagatgggcggaaagcctcagcgaaggaagaatccgcaagaggggctttataacgaactccagaaagataaaatggcagaagcctatagtgagattgggatgaagggagaaaggaggaggggtaaaggtcacgatgggttgtaccaaggattgagcacagccactaaagatacctatgatgcgctccacatgcaggccctgccgccaaga

SEQ ID NO: 2814 - DNA, 3285 bp, Artificial Sequence
  Synthetic Polynucloetide
atggccttaccagtgaccgccttgctcctgccgctggccttgctgctccacgccgccaggccggaagtgcagctggttgaatctggcggaggactggttcagcctggcggatctctgagactgtcttgtgccgccagcggcttcagcttcagcgacttttggatgagctgggtccgacaggcccctggcaaaggacttgaatgggtcgccacaatcagccaggccggcagcgagaaggactacgtggactctgtgaagggcagattcaccatcagccgggacaacgccaagaagtccctgtacctccagatgaacagcctgagagccgaggacaccgccgtgtactattgtgcctctggcgtgtacagcttcgactacagaggccagggcaccctggtcacagtctcttctggtaccggcggaggcggatctggcggcggaggtagcggtggcggaggatctgaattcgagatcgtgctgacacagtctcccgccacactgtcactgtctccaggcgaaagagccacactgagctgtagagccagccagagcgtgtccatctacctggcctggtatcagcagaagcctggacaggctccccggctgctgatctacgatgccagcaatagagccacaggcatccccgccagattttctggctctggcagcggcaccgatttcaccctgaccataagcagcctggaacctgaggacttcgccgtgtactactgccagcagagaagcaactggcctcctttcacattcggccctggcaccaaggtggacatcaaactcgaggacctgaagaacgtgttcccacctgaggtggccgtgttcgagcctagcgaggccgagatcagccacacccagaaagccaccctcgtgtgcctggctaccggcttctaccccgaccatgtggaactgtcttggtgggtcaacggcaaagaggtgcacagcggcgtgtctaccgacccccagccactgaaagaacagcccgccctgaacgacagccggtactgcctgagcagcagactgagagtgtccgccaccttctggcagaacccccggaaccacttcagatgccaggtgcagttctacggcctgagcgagaacgacgagtggacccaggacagagccaagcccgtgacccagatcgtgtctgccgaagcctggggcagagccgattgcggatcccagagcttcggcctgctggaccccaagctgtgctacctgctggatggcatcctgttcatctacggcgtgatcctgaccgccctgttcctgagagtgaagttcagcagaagcgccgacgcccctgcctaccagcagggacagaaccaactgtacaacgagctgaacctgggcagacgggaagagtacgacgtgctggacaagcggagaggcagggaccctgagatgggcggaaagccccagcggagaaagaacccccaggaaggactgtataacgaactccagaaagacaagatggccgaagcctacagcgagatcggcatgaagggcgagcggagaagaggcaagggccacgatggcctgtaccagggcctgagcaccgccaccaaggacacctatgacgccctgcacatgcaggccctgcctccaagaagggccaagcgatctggatctggagcaacaaacttctcactactcaaacaagcaggtgacgtggaggagaatcccgggcctactagtatggactggatttggcgcatccttttccttgtcggcgctgctaccggcgcgcattccgggccccagctccagctgcaagagtctggacctggcctggtcaagcctagcgagacactgagcctgacctgtaccgtgtccggcgatagcatcagcagcggcgattactactggggctggatcagacagcctcctggcaaaggactggaatggatcggccacatctactacagcggcgtgacctactacaaccccagcctgaagtccagagtgaccatcagcgtggacaccagccggaaccagttctccctgaagctgtctagcgtgacagccgccgataccgccgtgtactactgcaccagagaggacagcagcaactggcggagtagaggccagggaacactggtcacagttagctctggatccggcggaggcggaagtggaggcggaggatctggcggcggaggctctttcgaacaggtgcagcttgttgaaagcggaggcggagttgtgcagcctggcagaagtctgagactgtcttgtgccgccagcggcttcaccttcagcagctatggaatgcactgggtccgacaggcccctggcaaaggacttgaatgggttgccgtgatctgggacgacggcagcaacaagtattacgtggacagcgtgaagggcagattcaccatcagccgggacaacagcaagaacaccctgtacctccagatgaacagcctgagagccgaggacacagccgtgtattattgcgccagagatgactactacggcagcggctccttcaacagctactatggcacagacgtgtggggccagggcacaacagttaccgttagctctacgcgtatccagaaccctgatcctgccgtgtaccagctgcgggatagcaagagcagcgacaagagcgtgtgtctgttcaccgacttcgacagccagaccaacgtgtcccagagcaaggactccgacgtgtacatcaccgataagaccgtgctggacatgcggagcatggacttcaagagcaactccgccgtggcctggtccaacaagtccgatttcgcctgcgccaacgccttcaacaacagcattatccccgaggacacattcttcccaagccccgagagcagctgcggtacccagagttttgggttgttggaccctaaattgtgctatctgttggacggaatcctgttcatttacggagtgatcctgaccgcattgttcctgcgggttaagttttccagatccgcagacgcacccgcttaccaacaagggcagaaccaactctacaatgaacttaatttggggcggagggaagagtacgacgttctggacaaaaggaggggacgagatcccgagatgggcggaaagcctcagcgaaggaagaatccgcaagaggggctttataacgaactccagaaagataaaatggcagaagcctatagtgagattgggatgaagggagaaaggaggaggggtaaaggtcacgatgggttgtaccaaggattgagcacagccactaaagatacctatgatgcgctccacatgcaggccctgccgccaaga

SEQ ID NO: 2815 - DNA, 3240 bp, Artificial Sequence
  Synthetic Polynucloetide
atggccttaccagtgaccgccttgctcctgccgctggccttgctgctccacgccgccaggccggaagtgcagctggttgaatctggcggaggactggttcagcctggcggatctctgagactgtcttgtgccgccagcggcttcagcttcagcgacttttggatgagctgggtccgacaggcccctggcaaaggacttgaatgggtcgccacaatcagccaggccggcagcgagaaggactacgtggactctgtgaagggcagattcaccatcagccgggacaacgccaagaagtccctgtacctccagatgaacagcctgagagccgaggacaccgccgtgtactattgtgcctctggcgtgtacagcttcgactacagaggccagggcaccctggtcacagtctcttctggtaccggcggaggcggatctggcggcggaggtagcggtggcggaggatctgaattcgacatccagatgacacagagccctagcagcctgtctgccagcgtgggagacagagtgaccatcacctgtagagccagccagggcatctcttcttggctggcctggtatcagcagaagcccgagaaggcccctaagagcctgatctatgccgccagctctctccagagcggagtgcctagcagattttctggcagcggctccggcaccgatttcaccctgacaatatccagcctccagcctgaggacttcgccacctactactgccagcagtacaacagctacccctacaccttcggccagggcaccaagctggaaatcaaactcgaggacctgaagaacgtgttcccacctgaggtggccgtgttcgagcctagcgaggccgagatcagccacacccagaaagccaccctcgtgtgcctggctaccggcttctaccccgaccatgtggaactgtcttggtgggtcaacggcaaagaggtgcacagcggcgtgtctaccgacccccagccactgaaagaacagcccgccctgaacgacagccggtactgcctgagcagcagactgagagtgtccgccaccttctggcagaacccccggaaccacttcagatgccaggtgcagttctacggcctgagcgagaacgacgagtggacccaggacagagccaagcccgtgacccagatcgtgtctgccgaagcctggggcagagccgattgcggatcccagagcttcggcctgctggaccccaagctgtgctacctgctggatggcatcctgttcatctacggcgtgatcctgaccgccctgttcctgagagtgaagttcagcagaagcgccgacgcccctgcctaccagcagggacagaaccaactgtacaacgagctgaacctgggcagacgggaagagtacgacgtgctggacaagcggagaggcagggaccctgagatgggcggaaagccccagcggagaaagaacccccaggaaggactgtataacgaactccagaaagacaagatggccgaagcctacagcgagatcggcatgaagggcgagcggagaagaggcaagggccacgatggcctgtaccagggcctgagcaccgccaccaaggacacctatgacgccctgcacatgcaggccctgcctccaagaagggccaagcgatctggatctggagcaacaaacttctcactactcaaacaagcaggtgacgtggaggagaatcccgggcctactagtatggactggatttggcgcatccttttccttgtcggcgctgctaccggcgcgcattccgggccccagctccagctgcaagagtctggacctggcctggtcaagcctagcgagacactgagcctgacctgtaccgtgtccggcgatagcatcagcagcggcgattactactggggctggatcagacagcctcctggcaaaggactggaatggatcggccacatctactacagcggcgtgacctactacaaccccagcctgaagtccagagtgaccatcagcgtggacaccagccggaaccagttctccctgaagctgtctagcgtgacagccgccgataccgccgtgtactactgcaccagagaggacagcagcaactggcggagtagaggccagggaacactggtcacagttagctctggatccggcggaggcggaagtggaggcggaggatctggcggcggaggctctttcgaagaagtgcaactggttcaatctggcggcggactggttcatccaggcggttctctgagactgagctgtgccggctctggcttcaccttcagcacctacctgatgtactgggtccgacaggcccctggcaagacactggaatgggtgtccgctattggcagcggaggcgatacctactacgccgactctgtgaagggcagattcaccatcagccgggacaacgccaagaacagcctgtacctccagatgaactccctgagagccgaggacatggccgtgtactactgtgccagaggactcggctattggggccagggaacactggtcacagtgtcctctacgcgtatccagaaccctgatcctgccgtgtaccagctgcgggatagcaagagcagcgacaagagcgtgtgtctgttcaccgacttcgacagccagaccaacgtgtcccagagcaaggactccgacgtgtacatcaccgataagaccgtgctggacatgcggagcatggacttcaagagcaactccgccgtggcctggtccaacaagtccgatttcgcctgcgccaacgccttcaacaacagcattatccccgaggacacattcttcccaagccccgagagcagctgcggtacccagagttttgggttgttggaccctaaattgtgctatctgttggacggaatcctgttcatttacggagtgatcctgaccgcattgttcctgcgggttaagttttccagatccgcagacgcacccgcttaccaacaagggcagaaccaactctacaatgaacttaatttggggcggagggaagagtacgacgttctggacaaaaggaggggacgagatcccgagatgggcggaaagcctcagcgaaggaagaatccgcaagaggggctttataacgaactccagaaagataaaatggcagaagcctatagtgagattgggatgaagggagaaaggaggaggggtaaaggtcacgatgggttgtaccaaggattgagcacagccactaaagatacctatgatgcgctccacatgcaggccctgccgccaaga

SEQ ID NO: 2816 - DNA, 3297 bp, Artificial Sequence
  Synthetic Polynucloetide
atggccttaccagtgaccgccttgctcctgccgctggccttgctgctccacgccgccaggccggaagtgcagctggttgaatctggcggaggactggttcagcctggcggatctctgagactgtcttgtgccgccagcggcttcagcttcagcgacttttggatgagctgggtccgacaggcccctggcaaaggacttgaatgggtcgccacaatcagccaggccggcagcgagaaggactacgtggactctgtgaagggcagattcaccatcagccgggacaacgccaagaagtccctgtacctccagatgaacagcctgagagccgaggacaccgccgtgtactattgtgcctctggcgtgtacagcttcgactacagaggccagggcaccctggtcacagtctcttctggtaccggcggaggcggatctggcggcggaggtagcggtggcggaggatctgaattcctgcctgttctgacacagcctccatccgtgtctgtggcccctggaaagaccgccagaatcacatgcggcggcaacaacatcggcagcaagagcgtgcactggtatcagcagaagcctggacaggctcctgtgctggtggtgtacgacgacagcgatagacctagcggcatccccgagagattcagcggcagcaattccggcaataccgccacactgaccatcagcagagtggaagctggcgacgaggccgactactactgccaagtgtgggacagcagcagcgactacgtggtgtttggcggcggaacaaagctgacagtgcttctcgaggacctgaagaacgtgttcccacctgaggtggccgtgttcgagcctagcgaggccgagatcagccacacccagaaagccaccctcgtgtgcctggctaccggcttctaccccgaccatgtggaactgtcttggtgggtcaacggcaaagaggtgcacagcggcgtgtctaccgacccccagccactgaaagaacagcccgccctgaacgacagccggtactgcctgagcagcagactgagagtgtccgccaccttctggcagaacccccggaaccacttcagatgccaggtgcagttctacggcctgagcgagaacgacgagtggacccaggacagagccaagcccgtgacccagatcgtgtctgccgaagcctggggcagagccgattgcggatcccagagcttcggcctgctggaccccaagctgtgctacctgctggatggcatcctgttcatctacggcgtgatcctgaccgccctgttcctgagagtgaagttcagcagaagcgccgacgcccctgcctaccagcagggacagaaccaactgtacaacgagctgaacctgggcagacgggaagagtacgacgtgctggacaagcggagaggcagggaccctgagatgggcggaaagccccagcggagaaagaacccccaggaaggactgtataacgaactccagaaagacaagatggccgaagcctacagcgagatcggcatgaagggcgagcggagaagaggcaagggccacgatggcctgtaccagggcctgagcaccgccaccaaggacacctatgacgccctgcacatgcaggccctgcctccaagaagggccaagcgatctggatctggagcaacaaacttctcactactcaaacaagcaggtgacgtggaggagaatcccgggcctactagtatggactggatttggcgcatccttttccttgtcggcgctgctaccggcgcgcattccgggccccagctccagctgcaagagtctggacctggcctggtcaagcctagcgagacactgagcctgacctgtaccgtgtccggcgatagcatcagcagcggcgattactactggggctggatcagacagcctcctggcaaaggactggaatggatcggccacatctactacagcggcgtgacctactacaaccccagcctgaagtccagagtgaccatcagcgtggacaccagccggaaccagttctccctgaagctgtctagcgtgacagccgccgataccgccgtgtactactgcaccagagaggacagcagcaactggcggagtagaggccagggaacactggtcacagttagctctggatccggcggaggcggaagtggaggcggaggatctggcggcggaggctctttcgaagaagttcaactggtgcagagcggagccgaagtgaagaagccaggcgagagcctgaagattagctgcaaaggcagcggctacagcttcaccagctactggatcggctgggtccgacagatgcctggcaaaggactggaatggatgggcatcatctaccccggcgacagcgacaccagatacagccctagctttcagggccaagtgaccatctccgccgacaagagcatcagcacagcctacctccagtggtcctctctgaaggccagcgataccgccatgtactactgcgccagacaagtctggggatggcaaggcggcatgtaccccaggtctaactggtggtacaacctggactcttggggccagggcacactggtcacagtctcttctacgcgtatccagaaccctgatcctgccgtgtaccagctgcgggatagcaagagcagcgacaagagcgtgtgtctgttcaccgacttcgacagccagaccaacgtgtcccagagcaaggactccgacgtgtacatcaccgataagaccgtgctggacatgcggagcatggacttcaagagcaactccgccgtggcctggtccaacaagtccgatttcgcctgcgccaacgccttcaacaacagcattatccccgaggacacattcttcccaagccccgagagcagctgcggtacccagagttttgggttgttggaccctaaattgtgctatctgttggacggaatcctgttcatttacggagtgatcctgaccgcattgttcctgcgggttaagttttccagatccgcagacgcacccgcttaccaacaagggcagaaccaactctacaatgaacttaatttggggcggagggaagagtacgacgttctggacaaaaggaggggacgagatcccgagatgggcggaaagcctcagcgaaggaagaatccgcaagaggggctttataacgaactccagaaagataaaatggcagaagcctatagtgagattgggatgaagggagaaaggaggaggggtaaaggtcacgatgggttgtaccaaggattgagcacagccactaaagatacctatgatgcgctccacatgcaggccctgccgccaaga

SEQ ID NO: 2817 - DNA, 3276 bp, Artificial Sequence
  Synthetic Polynucloetide
atggccttaccagtgaccgccttgctcctgccgctggccttgctgctccacgccgccaggccggaagtgcagctggttgaatctggcggaggactggttcagcctggcggatctctgagactgtcttgtgccgccagcggcttcagcttcagcgacttttggatgagctgggtccgacaggcccctggcaaaggacttgaatgggtcgccacaatcagccaggccggcagcgagaaggactacgtggactctgtgaagggcagattcaccatcagccgggacaacgccaagaagtccctgtacctccagatgaacagcctgagagccgaggacaccgccgtgtactattgtgcctctggcgtgtacagcttcgactacagaggccagggcaccctggtcacagtctcttctggtaccggcggaggcggatctggcggcggaggtagcggtggcggaggatctgaattcgagctggtcatgacacagagccctgcttctctggccgtgtcactgggacagagagccaccatctcttgcagagccagcgagagcgtggacagctacggcaagagcttcatgcactggtatcagctcaagcccggccagcctcctaagctgctgatctacagagcctccaacctggaaagcggcgtgccagccagattttctggcagcggcagcagaaccgacttcaccctgaccattgatcccgtggaagccgatgatgccgccacctactactgccagcagaacaacgaggacccctggacatttggcggaggcaccaagctggaaatcaaactcgaggacctgaagaacgtgttcccacctgaggtggccgtgttcgagcctagcgaggccgagatcagccacacccagaaagccaccctcgtgtgcctggctaccggcttctaccccgaccatgtggaactgtcttggtgggtcaacggcaaagaggtgcacagcggcgtgtctaccgacccccagccactgaaagaacagcccgccctgaacgacagccggtactgcctgagcagcagactgagagtgtccgccaccttctggcagaacccccggaaccacttcagatgccaggtgcagttctacggcctgagcgagaacgacgagtggacccaggacagagccaagcccgtgacccagatcgtgtctgccgaagcctggggcagagccgattgcggatcccagagcttcggcctgctggaccccaagctgtgctacctgctggatggcatcctgttcatctacggcgtgatcctgaccgccctgttcctgagagtgaagttcagcagaagcgccgacgcccctgcctaccagcagggacagaaccaactgtacaacgagctgaacctgggcagacgggaagagtacgacgtgctggacaagcggagaggcagggaccctgagatgggcggaaagccccagcggagaaagaacccccaggaaggactgtataacgaactccagaaagacaagatggccgaagcctacagcgagatcggcatgaagggcgagcggagaagaggcaagggccacgatggcctgtaccagggcctgagcaccgccaccaaggacacctatgacgccctgcacatgcaggccctgcctccaagaagggccaagcgatctggatctggagcaacaaacttctcactactcaaacaagcaggtgacgtggaggagaatcccgggcctactagtatggactggatttggcgcatccttttccttgtcggcgctgctaccggcgcgcattccgggccccagctccagctgcaagagtctggacctggcctggtcaagcctagcgagacactgagcctgacctgtaccgtgtccggcgatagcatcagcagcggcgattactactggggctggatcagacagcctcctggcaaaggactggaatggatcggccacatctactacagcggcgtgacctactacaaccccagcctgaagtccagagtgaccatcagcgtggacaccagccggaaccagttctccctgaagctgtctagcgtgacagccgccgataccgccgtgtactactgcaccagagaggacagcagcaactggcggagtagaggccagggaacactggtcacagttagctctggatccggcggaggcggaagtggaggcggaggatctggcggcggaggctctttcgaagaagtgcagctcgaacagtctggccccgagcttgtgaaacctggcgcttccgtgaagatgagctgcaaggccagcggctacaccttcaccaactactacatgaaatgggtcaagcagagccacggcaagtccctggaatggatcggcgatctgaaccccaacaacggcgacaccttctacaaccagaagttcaagggcaaagccacactgaccgtggacaagagcagcaacaccgcctacatgcagctcaactccctgaccagcgaggacagcgccgtgtactactgtgccagaaccggcagatacgaagagaacgctatggactactggggccagggcacaagcgtgacagtctcttctacgcgtatccagaaccctgatcctgccgtgtaccagctgcgggatagcaagagcagcgacaagagcgtgtgtctgttcaccgacttcgacagccagaccaacgtgtcccagagcaaggactccgacgtgtacatcaccgataagaccgtgctggacatgcggagcatggacttcaagagcaactccgccgtggcctggtccaacaagtccgatttcgcctgcgccaacgccttcaacaacagcattatccccgaggacacattcttcccaagccccgagagcagctgcggtacccagagttttgggttgttggaccctaaattgtgctatctgttggacggaatcctgttcatttacggagtgatcctgaccgcattgttcctgcgggttaagttttccagatccgcagacgcacccgcttaccaacaagggcagaaccaactctacaatgaacttaatttggggcggagggaagagtacgacgttctggacaaaaggaggggacgagatcccgagatgggcggaaagcctcagcgaaggaagaatccgcaagaggggctttataacgaactccagaaagataaaatggcagaagcctatagtgagattgggatgaagggagaaaggaggaggggtaaaggtcacgatgggttgtaccaaggattgagcacagccactaaagatacctatgatgcgctccacatgcaggccctgccgccaaga

SEQ ID NO: 2818 - DNA, 3258 bp, Artificial Sequence
  Synthetic Polynucloetide
atggccttaccagtgaccgccttgctcctgccgctggccttgctgctccacgccgccaggccggaagtgcagctggttgaatctggcggaggactggttcagcctggcggatctctgagactgtcttgtgccgccagcggcttcagcttcagcgacttttggatgagctgggtccgacaggcccctggcaaaggacttgaatgggtcgccacaatcagccaggccggcagcgagaaggactacgtggactctgtgaagggcagattcaccatcagccgggacaacgccaagaagtccctgtacctccagatgaacagcctgagagccgaggacaccgccgtgtactattgtgcctctggcgtgtacagcttcgactacagaggccagggcaccctggtcacagtctcttctggtaccggcggaggcggatctggcggcggaggtagcggtggcggaggatctgaattcgacgtggtcatgacacagagcccttctagcctgtctgccagcgtgggcgacagagtgaccatcacctgtatggcctccgaggacatctacatccggctggcctggtatcagcagaagcctggaaacgcccctaagctgctgatctacgccgccacctctctggaaacaggcgtgccaagcagattttccggcagcggctctggcaccgatttcaccctgacaatatccagcctccagcctgaggacttcgccacctactactgccagcagtattggagcagcccctggacatttggcggaggcaccaaggtggaaatcaaactcgaggacctgaagaacgtgttcccacctgaggtggccgtgttcgagcctagcgaggccgagatcagccacacccagaaagccaccctcgtgtgcctggctaccggcttctaccccgaccatgtggaactgtcttggtgggtcaacggcaaagaggtgcacagcggcgtgtctaccgacccccagccactgaaagaacagcccgccctgaacgacagccggtactgcctgagcagcagactgagagtgtccgccaccttctggcagaacccccggaaccacttcagatgccaggtgcagttctacggcctgagcgagaacgacgagtggacccaggacagagccaagcccgtgacccagatcgtgtctgccgaagcctggggcagagccgattgcggatcccagagcttcggcctgctggaccccaagctgtgctacctgctggatggcatcctgttcatctacggcgtgatcctgaccgccctgttcctgagagtgaagttcagcagaagcgccgacgcccctgcctaccagcagggacagaaccaactgtacaacgagctgaacctgggcagacgggaagagtacgacgtgctggacaagcggagaggcagggaccctgagatgggcggaaagccccagcggagaaagaacccccaggaaggactgtataacgaactccagaaagacaagatggccgaagcctacagcgagatcggcatgaagggcgagcggagaagaggcaagggccacgatggcctgtaccagggcctgagcaccgccaccaaggacacctatgacgccctgcacatgcaggccctgcctccaagaagggccaagcgatctggatctggagcaacaaacttctcactactcaaacaagcaggtgacgtggaggagaatcccgggcctactagtatggactggatttggcgcatccttttccttgtcggcgctgctaccggcgcgcattccgggccccagctccagctgcaagagtctggacctggcctggtcaagcctagcgagacactgagcctgacctgtaccgtgtccggcgatagcatcagcagcggcgattactactggggctggatcagacagcctcctggcaaaggactggaatggatcggccacatctactacagcggcgtgacctactacaaccccagcctgaagtccagagtgaccatcagcgtggacaccagccggaaccagttctccctgaagctgtctagcgtgacagccgccgataccgccgtgtactactgcaccagagaggacagcagcaactggcggagtagaggccagggaacactggtcacagttagctctggatccggcggaggcggaagtggaggcggaggatctggcggcggaggctctttcgaacaggttcagctgcaagagtctggccccggactggtcaagcctagccaaacactgagcctgacctgtaccgtgtccggctacagcatcaccagcgactacacctggaactggatcagacagcctcctggcaacggactggaatggatcggctacatcacctacagcggcagcaccagctacaaccccagcctgaaaagccgggtgctgatctccgtggacaccagcaagaatcaggtgtccctgaagctgagcagcgtgacagccgctgataccgccgtgtactactgtgccagactggggagaagatacacaatggactactggggccagggcaccaccgtgacagtttcttctacgcgtatccagaaccctgatcctgccgtgtaccagctgcgggatagcaagagcagcgacaagagcgtgtgtctgttcaccgacttcgacagccagaccaacgtgtcccagagcaaggactccgacgtgtacatcaccgataagaccgtgctggacatgcggagcatggacttcaagagcaactccgccgtggcctggtccaacaagtccgatttcgcctgcgccaacgccttcaacaacagcattatccccgaggacacattcttcccaagccccgagagcagctgcggtacccagagttttgggttgttggaccctaaattgtgctatctgttggacggaatcctgttcatttacggagtgatcctgaccgcattgttcctgcgggttaagttttccagatccgcagacgcacccgcttaccaacaagggcagaaccaactctacaatgaacttaatttggggcggagggaagagtacgacgttctggacaaaaggaggggacgagatcccgagatgggcggaaagcctcagcgaaggaagaatccgcaagaggggctttataacgaactccagaaagataaaatggcagaagcctatagtgagattgggatgaagggagaaaggaggaggggtaaaggtcacgatgggttgtaccaaggattgagcacagccactaaagatacctatgatgcgctccacatgcaggccctgccgccaaga

SEQ ID NO: 2819 - DNA, 3270 bp, Artificial Sequence
  Synthetic Polynucloetide
atggccttaccagtgaccgccttgctcctgccgctggccttgctgctccacgccgccaggccggaagtgcagctggttgaatctggcggaggactggttcagcctggcggatctctgagactgtcttgtgccgccagcggcttcagcttcagcgacttttggatgagctgggtccgacaggcccctggcaaaggacttgaatgggtcgccacaatcagccaggccggcagcgagaaggactacgtggactctgtgaagggcagattcaccatcagccgggacaacgccaagaagtccctgtacctccagatgaacagcctgagagccgaggacaccgccgtgtactattgtgcctctggcgtgtacagcttcgactacagaggccagggcaccctggtcacagtctcttctggtaccggcggaggcggatctggcggcggaggtagcggtggcggaggatctgaattcgatattgtgctgactcagagccctgccactctgagccttagtccaggcgacagagctaccatctcctgtagggcctctgaatccgtgaccattctgggctctcatctcatatattggtatcaacaaaagccgggccagcctccacggctgctcattcaactggcctctaacgtgcagaccggcgtgccagctagattttctggctctggctcccggaccgactttacactgacaatcagctccgtggaacccgaagattttgccgtctattattgcctccagtccaggaccattcctcggacattcggccagggaacaaaactcgaaatcaagcggctcgaggacctgaagaacgtgttcccacctgaggtggccgtgttcgagcctagcgaggccgagatcagccacacccagaaagccaccctcgtgtgcctggctaccggcttctaccccgaccatgtggaactgtcttggtgggtcaacggcaaagaggtgcacagcggcgtgtctaccgacccccagccactgaaagaacagcccgccctgaacgacagccggtactgcctgagcagcagactgagagtgtccgccaccttctggcagaacccccggaaccacttcagatgccaggtgcagttctacggcctgagcgagaacgacgagtggacccaggacagagccaagcccgtgacccagatcgtgtctgccgaagcctggggcagagccgattgcggatcccagagcttcggcctgctggaccccaagctgtgctacctgctggatggcatcctgttcatctacggcgtgatcctgaccgccctgttcctgagagtgaagttcagcagaagcgccgacgcccctgcctaccagcagggacagaaccaactgtacaacgagctgaacctgggcagacgggaagagtacgacgtgctggacaagcggagaggcagggaccctgagatgggcggaaagccccagcggagaaagaacccccaggaaggactgtataacgaactccagaaagacaagatggccgaagcctacagcgagatcggcatgaagggcgagcggagaagaggcaagggccacgatggcctgtaccagggcctgagcaccgccaccaaggacacctatgacgccctgcacatgcaggccctgcctccaagaagggccaagcgatctggatctggagcaacaaacttctcactactcaaacaagcaggtgacgtggaggagaatcccgggcctactagtatggactggatttggcgcatccttttccttgtcggcgctgctaccggcgcgcattccgggccccagctccagctgcaagagtctggacctggcctggtcaagcctagcgagacactgagcctgacctgtaccgtgtccggcgatagcatcagcagcggcgattactactggggctggatcagacagcctcctggcaaaggactggaatggatcggccacatctactacagcggcgtgacctactacaaccccagcctgaagtccagagtgaccatcagcgtggacaccagccggaaccagttctccctgaagctgtctagcgtgacagccgccgataccgccgtgtactactgcaccagagaggacagcagcaactggcggagtagaggccagggaacactggtcacagttagctctggatccggcggaggcggaagtggaggcggaggatctggcggcggaggctctttcgaacaggtgcagctcgttcagagtggccccgaagtgaaaaagccaggcgagtccgtgaagatttcctgcaaagcctccggctacacattccggcactactctatgaattgggtcaagcaggccccaggccagggccttaagtggatgggacgcatcaataccgagtccggcgtgccaatctacgccgatgacttcaaaggccggttcagcttcaccgtggatacctctgcctccaccgcctacctggaaatcagcagcctgaccagcgaggatacagctgtgtacttctgtagcaacgattacctctacagcctggatttctggggacagggaaccacactgaccgtgtctagcacgcgtatccagaaccctgatcctgccgtgtaccagctgcgggatagcaagagcagcgacaagagcgtgtgtctgttcaccgacttcgacagccagaccaacgtgtcccagagcaaggactccgacgtgtacatcaccgataagaccgtgctggacatgcggagcatggacttcaagagcaactccgccgtggcctggtccaacaagtccgatttcgcctgcgccaacgccttcaacaacagcattatccccgaggacacattcttcccaagccccgagagcagctgcggtacccagagttttgggttgttggaccctaaattgtgctatctgttggacggaatcctgttcatttacggagtgatcctgaccgcattgttcctgcgggttaagttttccagatccgcagacgcacccgcttaccaacaagggcagaaccaactctacaatgaacttaatttggggcggagggaagagtacgacgttctggacaaaaggaggggacgagatcccgagatgggcggaaagcctcagcgaaggaagaatccgcaagaggggctttataacgaactccagaaagataaaatggcagaagcctatagtgagattgggatgaagggagaaaggaggaggggtaaaggtcacgatgggttgtaccaaggattgagcacagccactaaagatacctatgatgcgctccacatgcaggccctgccgccaaga

SEQ ID NO: 2820 - DNA, 3270 bp, Artificial Sequence
  Synthetic Polynucloetide
atggccttaccagtgaccgccttgctcctgccgctggccttgctgctccacgccgccaggccggaagtgcagctggttgaatctggcggaggactggttcagcctggcggatctctgagactgtcttgtgccgccagcggcttcagcttcagcgacttttggatgagctgggtccgacaggcccctggcaaaggacttgaatgggtcgccacaatcagccaggccggcagcgagaaggactacgtggactctgtgaagggcagattcaccatcagccgggacaacgccaagaagtccctgtacctccagatgaacagcctgagagccgaggacaccgccgtgtactattgtgcctctggcgtgtacagcttcgactacagaggccagggcaccctggtcacagtctcttctggtaccggcggaggcggatctggcggcggaggtagcggtggcggaggatctgaattcgacatcgtgctgacacagtctcccgccacactgtcactgagccctggcgatagagccacactgagctgtagagccagcgagagcgtgacaatcctgggcagccacctgatctactggtatcagcagaagcccggacaggcccctagactgctgattcagctcgccagcaatgtgcagacaggcatccctgccagattttccggcagcggcagcagaaccgatttcaccctgaccataagcagcctggaacctgaggacttcgccgtgtactactgcctccagagccggacaatccccagaacctttggacagggcaccaagctggaaatcaagagactcgaggacctgaagaacgtgttcccacctgaggtggccgtgttcgagcctagcgaggccgagatcagccacacccagaaagccaccctcgtgtgcctggctaccggcttctaccccgaccatgtggaactgtcttggtgggtcaacggcaaagaggtgcacagcggcgtgtctaccgacccccagccactgaaagaacagcccgccctgaacgacagccggtactgcctgagcagcagactgagagtgtccgccaccttctggcagaacccccggaaccacttcagatgccaggtgcagttctacggcctgagcgagaacgacgagtggacccaggacagagccaagcccgtgacccagatcgtgtctgccgaagcctggggcagagccgattgcggatcccagagcttcggcctgctggaccccaagctgtgctacctgctggatggcatcctgttcatctacggcgtgatcctgaccgccctgttcctgagagtgaagttcagcagaagcgccgacgcccctgcctaccagcagggacagaaccaactgtacaacgagctgaacctgggcagacgggaagagtacgacgtgctggacaagcggagaggcagggaccctgagatgggcggaaagccccagcggagaaagaacccccaggaaggactgtataacgaactccagaaagacaagatggccgaagcctacagcgagatcggcatgaagggcgagcggagaagaggcaagggccacgatggcctgtaccagggcctgagcaccgccaccaaggacacctatgacgccctgcacatgcaggccctgcctccaagaagggccaagcgatctggatctggagcaacaaacttctcactactcaaacaagcaggtgacgtggaggagaatcccgggcctactagtatggactggatttggcgcatccttttccttgtcggcgctgctaccggcgcgcattccgggccccagctccagctgcaagagtctggacctggcctggtcaagcctagcgagacactgagcctgacctgtaccgtgtccggcgatagcatcagcagcggcgattactactggggctggatcagacagcctcctggcaaaggactggaatggatcggccacatctactacagcggcgtgacctactacaaccccagcctgaagtccagagtgaccatcagcgtggacaccagccggaaccagttctccctgaagctgtctagcgtgacagccgccgataccgccgtgtactactgcaccagagaggacagcagcaactggcggagtagaggccagggaacactggtcacagttagctctggatccggcggaggcggaagtggaggcggaggatctggcggcggaggctctttcgaacaggttcagctggtgcagtctggcagcgagctgaagaaacctggcgagagcgtgaagatcagctgcaaggccagcggctacaccttcacacactacagcatgaactgggtccgacaggcccctggacaaggactggaatggatgggcagaatcaacaccgagacaggcgagcccctgtacgccgacgatttcaagggcagattcgtgttcagcctggacaccagcgccagcacagcctatctccagatcagctctctgaaggccgaggacaccgccgtgtactactgctccaacgactacctgtactccctggactattggggccagggcacactggtcacagtgtctagtacgcgtatccagaaccctgatcctgccgtgtaccagctgcgggatagcaagagcagcgacaagagcgtgtgtctgttcaccgacttcgacagccagaccaacgtgtcccagagcaaggactccgacgtgtacatcaccgataagaccgtgctggacatgcggagcatggacttcaagagcaactccgccgtggcctggtccaacaagtccgatttcgcctgcgccaacgccttcaacaacagcattatccccgaggacacattcttcccaagccccgagagcagctgcggtacccagagttttgggttgttggaccctaaattgtgctatctgttggacggaatcctgttcatttacggagtgatcctgaccgcattgttcctgcgggttaagttttccagatccgcagacgcacccgcttaccaacaagggcagaaccaactctacaatgaacttaatttggggcggagggaagagtacgacgttctggacaaaaggaggggacgagatcccgagatgggcggaaagcctcagcgaaggaagaatccgcaagaggggctttataacgaactccagaaagataaaatggcagaagcctatagtgagattgggatgaagggagaaaggaggaggggtaaaggtcacgatgggttgtaccaaggattgagcacagccactaaagatacctatgatgcgctccacatgcaggccctgccgccaaga

SEQ ID NO: 2821 - DNA, 3273 bp, Artificial Sequence
  Synthetic Polynucloetide
atggccttaccagtgaccgccttgctcctgccgctggccttgctgctccacgccgccaggccggaagtgcagctggttgaatctggcggaggactggttcagcctggcggatctctgagactgtcttgtgccgccagcggcttcagcttcagcgacttttggatgagctgggtccgacaggcccctggcaaaggacttgaatgggtcgccacaatcagccaggccggcagcgagaaggactacgtggactctgtgaagggcagattcaccatcagccgggacaacgccaagaagtccctgtacctccagatgaacagcctgagagccgaggacaccgccgtgtactattgtgcctctggcgtgtacagcttcgactacagaggccagggcaccctggtcacagtctcttctggtaccggcggaggcggatctggcggcggaggtagcggtggcggaggatctgaattcgacatccagctgactcagagccctagctttctgagcgccagcgtgggcgacagagtgaccattacatgtagagccagccagggcatcagcaccgacctgaactggtatcagcagaagcctggcaaggcccctaagctgctgatctacgccgccagcaatctggaaagcggcgtgccaagcagattttccggctctggcagcggcaccgagttcaccctgacaatatctagcctccagcctgaggacttcgccacctactactgccagcagagctacaactggccctacacctttggcggaggcaccaaggtggaaatcaagagactcgaggacctgaagaacgtgttcccacctgaggtggccgtgttcgagcctagcgaggccgagatcagccacacccagaaagccaccctcgtgtgcctggctaccggcttctaccccgaccatgtggaactgtcttggtgggtcaacggcaaagaggtgcacagcggcgtgtctaccgacccccagccactgaaagaacagcccgccctgaacgacagccggtactgcctgagcagcagactgagagtgtccgccaccttctggcagaacccccggaaccacttcagatgccaggtgcagttctacggcctgagcgagaacgacgagtggacccaggacagagccaagcccgtgacccagatcgtgtctgccgaagcctggggcagagccgattgcggatcccagagcttcggcctgctggaccccaagctgtgctacctgctggatggcatcctgttcatctacggcgtgatcctgaccgccctgttcctgagagtgaagttcagcagaagcgccgacgcccctgcctaccagcagggacagaaccaactgtacaacgagctgaacctgggcagacgggaagagtacgacgtgctggacaagcggagaggcagggaccctgagatgggcggaaagccccagcggagaaagaacccccaggaaggactgtataacgaactccagaaagacaagatggccgaagcctacagcgagatcggcatgaagggcgagcggagaagaggcaagggccacgatggcctgtaccagggcctgagcaccgccaccaaggacacctatgacgccctgcacatgcaggccctgcctccaagaagggccaagcgatctggatctggagcaacaaacttctcactactcaaacaagcaggtgacgtggaggagaatcccgggcctactagtatggactggatttggcgcatccttttccttgtcggcgctgctaccggcgcgcattccgggccccagctccagctgcaagagtctggacctggcctggtcaagcctagcgagacactgagcctgacctgtaccgtgtccggcgatagcatcagcagcggcgattactactggggctggatcagacagcctcctggcaaaggactggaatggatcggccacatctactacagcggcgtgacctactacaaccccagcctgaagtccagagtgaccatcagcgtggacaccagccggaaccagttctccctgaagctgtctagcgtgacagccgccgataccgccgtgtactactgcaccagagaggacagcagcaactggcggagtagaggccagggaacactggtcacagttagctctggatccggcggaggcggaagtggaggcggaggatctggcggcggaggctctttcgaagaagttcagctggttgaatcaggcggaggactcgtgaaacctggcggctctctgagactgtcttgtgccgccagcggcttcaccttcagcaacttcgagatgaactgggtccgacaggccccaggcaaaggactggaatgggtgtccggcatcagctccaatggccggtacatcaactacgccgacagcgtgaagggcagattcaccatcagccgggacaacgccaagaacagcctgtacctccagatgaactccctgagagccgaggacaccgccgtgtactattgtgccagagtggtggacttcgaccaggactacaacggcttcgactattggggccagggcaccctggttaccgttagctctacgcgtatccagaaccctgatcctgccgtgtaccagctgcgggatagcaagagcagcgacaagagcgtgtgtctgttcaccgacttcgacagccagaccaacgtgtcccagagcaaggactccgacgtgtacatcaccgataagaccgtgctggacatgcggagcatggacttcaagagcaactccgccgtggcctggtccaacaagtccgatttcgcctgcgccaacgccttcaacaacagcattatccccgaggacacattcttcccaagccccgagagcagctgcggtacccagagttttgggttgttggaccctaaattgtgctatctgttggacggaatcctgttcatttacggagtgatcctgaccgcattgttcctgcgggttaagttttccagatccgcagacgcacccgcttaccaacaagggcagaaccaactctacaatgaacttaatttggggcggagggaagagtacgacgttctggacaaaaggaggggacgagatcccgagatgggcggaaagcctcagcgaaggaagaatccgcaagaggggctttataacgaactccagaaagataaaatggcagaagcctatagtgagattgggatgaagggagaaaggaggaggggtaaaggtcacgatgggttgtaccaaggattgagcacagccactaaagatacctatgatgcgctccacatgcaggccctgccgccaaga

SEQ ID NO: 2822 - DNA, 3267 bp, Artificial Sequence
  Synthetic Polynucloetide
atggccttaccagtgaccgccttgctcctgccgctggccttgctgctccacgccgccaggccggaagtgcagctggttgaatctggcggaggactggttcagcctggcggatctctgagactgtcttgtgccgccagcggcttcagcttcagcgacttttggatgagctgggtccgacaggcccctggcaaaggacttgaatgggtcgccacaatcagccaggccggcagcgagaaggactacgtggactctgtgaagggcagattcaccatcagccgggacaacgccaagaagtccctgtacctccagatgaacagcctgagagccgaggacaccgccgtgtactattgtgcctctggcgtgtacagcttcgactacagaggccagggcaccctggtcacagtctcttctggtaccggcggaggcggatctggcggcggaggtagcggtggcggaggatctgaattcgacatccaactgactcagagccccagctttctgagcgcctctgtgggcgacagagtgaccatcacatgtagtctcagcctgggcatcagcacatggcgggattggtttccgccgaggcttggcaggggccttgagccgctgacctacgccgccagcacactgcaaagcggagtgcctagcagattttccggcagcggctctggcaccgagttcaccctgacaatatccagcctccagcctgaggacttcgccacctactactgccagcagctcaacagctaccctctgacctttggcggaggcaccaaggtggaaatcaagagactcgaggacctgaagaacgtgttcccacctgaggtggccgtgttcgagcctagcgaggccgagatcagccacacccagaaagccaccctcgtgtgcctggctaccggcttctaccccgaccatgtggaactgtcttggtgggtcaacggcaaagaggtgcacagcggcgtgtctaccgacccccagccactgaaagaacagcccgccctgaacgacagccggtactgcctgagcagcagactgagagtgtccgccaccttctggcagaacccccggaaccacttcagatgccaggtgcagttctacggcctgagcgagaacgacgagtggacccaggacagagccaagcccgtgacccagatcgtgtctgccgaagcctggggcagagccgattgcggatcccagagcttcggcctgctggaccccaagctgtgctacctgctggatggcatcctgttcatctacggcgtgatcctgaccgccctgttcctgagagtgaagttcagcagaagcgccgacgcccctgcctaccagcagggacagaaccaactgtacaacgagctgaacctgggcagacgggaagagtacgacgtgctggacaagcggagaggcagggaccctgagatgggcggaaagccccagcggagaaagaacccccaggaaggactgtataacgaactccagaaagacaagatggccgaagcctacagcgagatcggcatgaagggcgagcggagaagaggcaagggccacgatggcctgtaccagggcctgagcaccgccaccaaggacacctatgacgccctgcacatgcaggccctgcctccaagaagggccaagcgatctggatctggagcaacaaacttctcactactcaaacaagcaggtgacgtggaggagaatcccgggcctactagtatggactggatttggcgcatccttttccttgtcggcgctgctaccggcgcgcattccgggccccagctccagctgcaagagtctggacctggcctggtcaagcctagcgagacactgagcctgacctgtaccgtgtccggcgatagcatcagcagcggcgattactactggggctggatcagacagcctcctggcaaaggactggaatggatcggccacatctactacagcggcgtgacctactacaaccccagcctgaagtccagagtgaccatcagcgtggacaccagccggaaccagttctccctgaagctgtctagcgtgacagccgccgataccgccgtgtactactgcaccagagaggacagcagcaactggcggagtagaggccagggaacactggtcacagttagctctggatccggcggaggcggaagtggaggcggaggatctggcggcggaggctctttcgaagaagttcaactggttgagtctggtggcggcctggttaagcctggcggatctctgagactgagctgtgccgccagcggcttcacctttagcacatacggcatgagctgggtccgacaggcccctggaaaaggacttgagtgggtcgcctacatcaacaacggctccggctacatctactacgccgacagcgtgaagggcagattcaccatcagccgggacaacgccaagaacagcctgtacctccagatgaactccctgagagccgaggacaccgccgtgtactattgtgccagaggacagtggtggagcggcggagactttgattattggggccagggcaccctggtcaccgtttcttctacgcgtatccagaaccctgatcctgccgtgtaccagctgcgggatagcaagagcagcgacaagagcgtgtgtctgttcaccgacttcgacagccagaccaacgtgtcccagagcaaggactccgacgtgtacatcaccgataagaccgtgctggacatgcggagcatggacttcaagagcaactccgccgtggcctggtccaacaagtccgatttcgcctgcgccaacgccttcaacaacagcattatccccgaggacacattcttcccaagccccgagagcagctgcggtacccagagttttgggttgttggaccctaaattgtgctatctgttggacggaatcctgttcatttacggagtgatcctgaccgcattgttcctgcgggttaagttttccagatccgcagacgcacccgcttaccaacaagggcagaaccaactctacaatgaacttaatttggggcggagggaagagtacgacgttctggacaaaaggaggggacgagatcccgagatgggcggaaagcctcagcgaaggaagaatccgcaagaggggctttataacgaactccagaaagataaaatggcagaagcctatagtgagattgggatgaagggagaaaggaggaggggtaaaggtcacgatgggttgtaccaaggattgagcacagccactaaagatacctatgatgcgctccacatgcaggccctgccgccaaga

SEQ ID NO: 2823 - DNA, 3270 bp, Artificial Sequence
  Synthetic Polynucloetide
atggccttaccagtgaccgccttgctcctgccgctggccttgctgctccacgccgccaggccggaagtgcagctggttgaatctggcggaggactggttcagcctggcggatctctgagactgtcttgtgccgccagcggcttcagcttcagcgacttttggatgagctgggtccgacaggcccctggcaaaggacttgaatgggtcgccacaatcagccaggccggcagcgagaaggactacgtggactctgtgaagggcagattcaccatcagccgggacaacgccaagaagtccctgtacctccagatgaacagcctgagagccgaggacaccgccgtgtactattgtgcctctggcgtgtacagcttcgactacagaggccagggcaccctggtcacagtctcttctggtaccggcggaggcggatctggcggcggaggtagcggtggcggaggatctgaattcgagatcgtgctgacacagtctcccgccacactgtcactgtctccaggcgaaagagccacactgagctgtagcgccagcagcagcgtgtcctacatgtactggtatcagcagaagcccggacaggcccctagactgctgatctacagaaccagcaacctggcctctggcatccccgccagattttctggctctggcagcggcaccgatttcaccctgaccataagcagcctggaacctgaggacttcgccgtgtactactgccagcagtaccacagctaccccaccacctttggacagggcaccaaggtggaaatcaagcggacagttctcgaggacctgaagaacgtgttcccacctgaggtggccgtgttcgagcctagcgaggccgagatcagccacacccagaaagccaccctcgtgtgcctggctaccggcttctaccccgaccatgtggaactgtcttggtgggtcaacggcaaagaggtgcacagcggcgtgtctaccgacccccagccactgaaagaacagcccgccctgaacgacagccggtactgcctgagcagcagactgagagtgtccgccaccttctggcagaacccccggaaccacttcagatgccaggtgcagttctacggcctgagcgagaacgacgagtggacccaggacagagccaagcccgtgacccagatcgtgtctgccgaagcctggggcagagccgattgcggatcccagagcttcggcctgctggaccccaagctgtgctacctgctggatggcatcctgttcatctacggcgtgatcctgaccgccctgttcctgagagtgaagttcagcagaagcgccgacgcccctgcctaccagcagggacagaaccaactgtacaacgagctgaacctgggcagacgggaagagtacgacgtgctggacaagcggagaggcagggaccctgagatgggcggaaagccccagcggagaaagaacccccaggaaggactgtataacgaactccagaaagacaagatggccgaagcctacagcgagatcggcatgaagggcgagcggagaagaggcaagggccacgatggcctgtaccagggcctgagcaccgccaccaaggacacctatgacgccctgcacatgcaggccctgcctccaagaagggccaagcgatctggatctggagcaacaaacttctcactactcaaacaagcaggtgacgtggaggagaatcccgggcctactagtatggactggatttggcgcatccttttccttgtcggcgctgctaccggcgcgcattccgggccccagctccagctgcaagagtctggacctggcctggtcaagcctagcgagacactgagcctgacctgtaccgtgtccggcgatagcatcagcagcggcgattactactggggctggatcagacagcctcctggcaaaggactggaatggatcggccacatctactacagcggcgtgacctactacaaccccagcctgaagtccagagtgaccatcagcgtggacaccagccggaaccagttctccctgaagctgtctagcgtgacagccgccgataccgccgtgtactactgcaccagagaggacagcagcaactggcggagtagaggccagggaacactggtcacagttagctctggatccggcggaggcggaagtggaggcggaggatctggcggcggaggctctttcgaagaagtgcagctggttgaatcaggtggcggcctggttcaacctggcggatctctgagactgtcttgtgccgccagcggcttcagcttcaacacctacgccatgaactgggtccgacaggctcctggcaaaggactggaatgggtgtcccacatcagaagcaagagcaacaacttcgccacctactacgccgacagcgtgaaggacagattcaccatcagccgggacaacgccaagaacagcctgtacctccagatgaactccctgagagccgaggacaccgccgtgtattattgcgccagacaaggcggcgacttccctatggattattggggccagggcaccctggtcaccgtttcttctacgcgtatccagaaccctgatcctgccgtgtaccagctgcgggatagcaagagcagcgacaagagcgtgtgtctgttcaccgacttcgacagccagaccaacgtgtcccagagcaaggactccgacgtgtacatcaccgataagaccgtgctggacatgcggagcatggacttcaagagcaactccgccgtggcctggtccaacaagtccgatttcgcctgcgccaacgccttcaacaacagcattatccccgaggacacattcttcccaagccccgagagcagctgcggtacccagagttttgggttgttggaccctaaattgtgctatctgttggacggaatcctgttcatttacggagtgatcctgaccgcattgttcctgcgggttaagttttccagatccgcagacgcacccgcttaccaacaagggcagaaccaactctacaatgaacttaatttggggcggagggaagagtacgacgttctggacaaaaggaggggacgagatcccgagatgggcggaaagcctcagcgaaggaagaatccgcaagaggggctttataacgaactccagaaagataaaatggcagaagcctatagtgagattgggatgaagggagaaaggaggaggggtaaaggtcacgatgggttgtaccaaggattgagcacagccactaaagatacctatgatgcgctccacatgcaggccctgccgccaaga

SEQ ID NO: 2824 - DNA, 3258 bp, Artificial Sequence
  Synthetic Polynucloetide
atggccttaccagtgaccgccttgctcctgccgctggccttgctgctccacgccgccaggccggaagtgcagctggttgaatctggcggaggactggttcagcctggcggatctctgagactgtcttgtgccgccagcggcttcagcttcagcgacttttggatgagctgggtccgacaggcccctggcaaaggacttgaatgggtcgccacaatcagccaggccggcagcgagaaggactacgtggactctgtgaagggcagattcaccatcagccgggacaacgccaagaagtccctgtacctccagatgaacagcctgagagccgaggacaccgccgtgtactattgtgcctctggcgtgtacagcttcgactacagaggccagggcaccctggtcacagtctcttctggtaccggcggaggcggatctggcggcggaggtagcggtggcggaggatctgaattcgacgtggtcatgacacagagcccttctagcctgtctgccagcgtgggcgacagagtgaccatcacctgtaaagccagcgaggacatctacatccggctggcctggtatcagcagaagcctggaaaggcccctaagctgctgatctacgccgccacctctctggaaacaggcgtgccaagcagattttccggcagcggctctggcaccgatttcaccctgacaatatccagcctccagcctgaggacttcgccacctactactgccagcagtattggaccacaccttggacctttggcggaggcaccaaggtggaaatcaaactcgaggacctgaagaacgtgttcccacctgaggtggccgtgttcgagcctagcgaggccgagatcagccacacccagaaagccaccctcgtgtgcctggctaccggcttctaccccgaccatgtggaactgtcttggtgggtcaacggcaaagaggtgcacagcggcgtgtctaccgacccccagccactgaaagaacagcccgccctgaacgacagccggtactgcctgagcagcagactgagagtgtccgccaccttctggcagaacccccggaaccacttcagatgccaggtgcagttctacggcctgagcgagaacgacgagtggacccaggacagagccaagcccgtgacccagatcgtgtctgccgaagcctggggcagagccgattgcggatcccagagcttcggcctgctggaccccaagctgtgctacctgctggatggcatcctgttcatctacggcgtgatcctgaccgccctgttcctgagagtgaagttcagcagaagcgccgacgcccctgcctaccagcagggacagaaccaactgtacaacgagctgaacctgggcagacgggaagagtacgacgtgctggacaagcggagaggcagggaccctgagatgggcggaaagccccagcggagaaagaacccccaggaaggactgtataacgaactccagaaagacaagatggccgaagcctacagcgagatcggcatgaagggcgagcggagaagaggcaagggccacgatggcctgtaccagggcctgagcaccgccaccaaggacacctatgacgccctgcacatgcaggccctgcctccaagaagggccaagcgatctggatctggagcaacaaacttctcactactcaaacaagcaggtgacgtggaggagaatcccgggcctactagtatggactggatttggcgcatccttttccttgtcggcgctgctaccggcgcgcattccgggccccagctccagctgcaagagtctggacctggcctggtcaagcctagcgagacactgagcctgacctgtaccgtgtccggcgatagcatcagcagcggcgattactactggggctggatcagacagcctcctggcaaaggactggaatggatcggccacatctactacagcggcgtgacctactacaaccccagcctgaagtccagagtgaccatcagcgtggacaccagccggaaccagttctccctgaagctgtctagcgtgacagccgccgataccgccgtgtactactgcaccagagaggacagcagcaactggcggagtagaggccagggaacactggtcacagttagctctggatccggcggaggcggaagtggaggcggaggatctggcggcggaggctctttcgaacaggtgcagctccaagagtctggccctggactggtcaagcctagccagacactgagcctgacctgtaccgtgtccggctacagcatcaccatcgactacacctggaactggatcagacagcctcctggcaaaggactggaatggatcggctacatcacctacagcggcagcaccgactacaaccccagcctgaaaagccgggtgctgatctccgtggacaccagcaagaatcaggtgtccctgaagctgagcagcgtgacagccgctgataccgccgtgtactactgtgccagactgggcagaagatacgccctggattattggggccagggcaccaccgtgacagtgtcatctacgcgtatccagaaccctgatcctgccgtgtaccagctgcgggatagcaagagcagcgacaagagcgtgtgtctgttcaccgacttcgacagccagaccaacgtgtcccagagcaaggactccgacgtgtacatcaccgataagaccgtgctggacatgcggagcatggacttcaagagcaactccgccgtggcctggtccaacaagtccgatttcgcctgcgccaacgccttcaacaacagcattatccccgaggacacattcttcccaagccccgagagcagctgcggtacccagagttttgggttgttggaccctaaattgtgctatctgttggacggaatcctgttcatttacggagtgatcctgaccgcattgttcctgcgggttaagttttccagatccgcagacgcacccgcttaccaacaagggcagaaccaactctacaatgaacttaatttggggcggagggaagagtacgacgttctggacaaaaggaggggacgagatcccgagatgggcggaaagcctcagcgaaggaagaatccgcaagaggggctttataacgaactccagaaagataaaatggcagaagcctatagtgagattgggatgaagggagaaaggaggaggggtaaaggtcacgatgggttgtaccaaggattgagcacagccactaaagatacctatgatgcgctccacatgcaggccctgccgccaaga

SEQ ID NO: 2825 - DNA, 3270 bp, Artificial Sequence
  Synthetic Polynucloetide
atggccttaccagtgaccgccttgctcctgccgctggccttgctgctccacgccgccaggccggaagtgcagctggttgaatctggcggaggactggttcagcctggcggatctctgagactgtcttgtgccgccagcggcttcagcttcagcgacttttggatgagctgggtccgacaggcccctggcaaaggacttgaatgggtcgccacaatcagccaggccggcagcgagaaggactacgtggactctgtgaagggcagattcaccatcagccgggacaacgccaagaagtccctgtacctccagatgaacagcctgagagccgaggacaccgccgtgtactattgtgcctctggcgtgtacagcttcgactacagaggccagggcaccctggtcacagtctcttctggtaccggcggaggcggatctggcggcggaggtagcggtggcggaggatctgaattcgacatccagatgacccagaccacaagcagcctgtctgccagcctgggcgacagagtgaccatctcttgtagagccagccaggacatcagcaactacctgaactggtatcagcagaaacccgacggcaccgtgaagctgctgatctactacaccagcatcctgcacagcggcgtgcccagcagattttctggctctggcagcggcaccgactacagcctgaccatcagcaatctggaacaagaggacttcgctacctacttctgccagcaaggcaacaccctgccttggacatttggcggaggcaccaagctggaaatcaaagctctcgaggacctgaagaacgtgttcccacctgaggtggccgtgttcgagcctagcgaggccgagatcagccacacccagaaagccaccctcgtgtgcctggctaccggcttctaccccgaccatgtggaactgtcttggtgggtcaacggcaaagaggtgcacagcggcgtgtctaccgacccccagccactgaaagaacagcccgccctgaacgacagccggtactgcctgagcagcagactgagagtgtccgccaccttctggcagaacccccggaaccacttcagatgccaggtgcagttctacggcctgagcgagaacgacgagtggacccaggacagagccaagcccgtgacccagatcgtgtctgccgaagcctggggcagagccgattgcggatcccagagcttcggcctgctggaccccaagctgtgctacctgctggatggcatcctgttcatctacggcgtgatcctgaccgccctgttcctgagagtgaagttcagcagaagcgccgacgcccctgcctaccagcagggacagaaccaactgtacaacgagctgaacctgggcagacgggaagagtacgacgtgctggacaagcggagaggcagggaccctgagatgggcggaaagccccagcggagaaagaacccccaggaaggactgtataacgaactccagaaagacaagatggccgaagcctacagcgagatcggcatgaagggcgagcggagaagaggcaagggccacgatggcctgtaccagggcctgagcaccgccaccaaggacacctatgacgccctgcacatgcaggccctgcctccaagaagggccaagcgatctggatctggagcaacaaacttctcactactcaaacaagcaggtgacgtggaggagaatcccgggcctactagtatggactggatttggcgcatccttttccttgtcggcgctgctaccggcgcgcattccgggccccagctccagctgcaagagtctggacctggcctggtcaagcctagcgagacactgagcctgacctgtaccgtgtccggcgatagcatcagcagcggcgattactactggggctggatcagacagcctcctggcaaaggactggaatggatcggccacatctactacagcggcgtgacctactacaaccccagcctgaagtccagagtgaccatcagcgtggacaccagccggaaccagttctccctgaagctgtctagcgtgacagccgccgataccgccgtgtactactgcaccagagaggacagcagcaactggcggagtagaggccagggaacactggtcacagttagctctggatccggcggaggcggaagtggaggcggaggatctggcggcggaggctctttcgaagtgcaactggttgaatctggcggcggactggttaagcctggcggatctctgaagctgagctgtgccgcctctggcttcgccttcagcatctacgatatgagctgggtccgacagacccctgagaagagactggaatgggtcgcctacatctctagcggcggagggacctactatcccgacacagtgaagggcagattcaccatctccagagacaacgccaagaacaccctgtacctccagatgagcagcctgaagtccgaggacaccgccatgtactactgcgccagacacagcggctatggcacacattggggagtgctgtttgcctactggggccagggaacactggtcacagtttctgctacgcgtatccagaaccctgatcctgccgtgtaccagctgcgggatagcaagagcagcgacaagagcgtgtgtctgttcaccgacttcgacagccagaccaacgtgtcccagagcaaggactccgacgtgtacatcaccgataagaccgtgctggacatgcggagcatggacttcaagagcaactccgccgtggcctggtccaacaagtccgatttcgcctgcgccaacgccttcaacaacagcattatccccgaggacacattcttcccaagccccgagagcagctgcggtacccagagttttgggttgttggaccctaaattgtgctatctgttggacggaatcctgttcatttacggagtgatcctgaccgcattgttcctgcgggttaagttttccagatccgcagacgcacccgcttaccaacaagggcagaaccaactctacaatgaacttaatttggggcggagggaagagtacgacgttctggacaaaaggaggggacgagatcccgagatgggcggaaagcctcagcgaaggaagaatccgcaagaggggctttataacgaactccagaaagataaaatggcagaagcctatagtgagattgggatgaagggagaaaggaggaggggtaaaggtcacgatgggttgtaccaaggattgagcacagccactaaagatacctatgatgcgctccacatgcaggccctgccgccaaga

SEQ ID NO: 2826 - DNA, 3303 bp, Artificial Sequence
  Synthetic Polynucloetide
atggccttaccagtgaccgccttgctcctgccgctggccttgctgctccacgccgccaggccggaagtgcagctggttgaatctggcggaggactggttcagcctggcggatctctgagactgtcttgtgccgccagcggcttcagcttcagcgacttttggatgagctgggtccgacaggcccctggcaaaggacttgaatgggtcgccacaatcagccaggccggcagcgagaaggactacgtggactctgtgaagggcagattcaccatcagccgggacaacgccaagaagtccctgtacctccagatgaacagcctgagagccgaggacaccgccgtgtactattgtgcctctggcgtgtacagcttcgactacagaggccagggcaccctggtcacagtctcttctggtaccggcggaggcggatctggcggcggaggtagcggtggcggaggatctgaattcgacatcgtgatgacacagagccctgatagcctggccgtgtctctgggagagagagccaccatcaactgcaagagcagccagagcctgctgtacagaagcaaccagaagaactacctggcctggtatcagcagaagcccggccagcctcctaagctgctgatctactgggccagcaccagagaaagcggcgtgcccgatagattttctggctctggcagcggcaccgacttcaccctgacaatttctagcctgcaagccgaggacgtggccgtgtactactgccagcagtattacaactaccccagaaccttcggccagggcaccaaggtggaaatcaagagaacagttctcgaggacctgaagaacgtgttcccacctgaggtggccgtgttcgagcctagcgaggccgagatcagccacacccagaaagccaccctcgtgtgcctggctaccggcttctaccccgaccatgtggaactgtcttggtgggtcaacggcaaagaggtgcacagcggcgtgtctaccgacccccagccactgaaagaacagcccgccctgaacgacagccggtactgcctgagcagcagactgagagtgtccgccaccttctggcagaacccccggaaccacttcagatgccaggtgcagttctacggcctgagcgagaacgacgagtggacccaggacagagccaagcccgtgacccagatcgtgtctgccgaagcctggggcagagccgattgcggatcccagagcttcggcctgctggaccccaagctgtgctacctgctggatggcatcctgttcatctacggcgtgatcctgaccgccctgttcctgagagtgaagttcagcagaagcgccgacgcccctgcctaccagcagggacagaaccaactgtacaacgagctgaacctgggcagacgggaagagtacgacgtgctggacaagcggagaggcagggaccctgagatgggcggaaagccccagcggagaaagaacccccaggaaggactgtataacgaactccagaaagacaagatggccgaagcctacagcgagatcggcatgaagggcgagcggagaagaggcaagggccacgatggcctgtaccagggcctgagcaccgccaccaaggacacctatgacgccctgcacatgcaggccctgcctccaagaagggccaagcgatctggatctggagcaacaaacttctcactactcaaacaagcaggtgacgtggaggagaatcccgggcctactagtatggactggatttggcgcatccttttccttgtcggcgctgctaccggcgcgcattccgggccccagctccagctgcaagagtctggacctggcctggtcaagcctagcgagacactgagcctgacctgtaccgtgtccggcgatagcatcagcagcggcgattactactggggctggatcagacagcctcctggcaaaggactggaatggatcggccacatctactacagcggcgtgacctactacaaccccagcctgaagtccagagtgaccatcagcgtggacaccagccggaaccagttctccctgaagctgtctagcgtgacagccgccgataccgccgtgtactactgcaccagagaggacagcagcaactggcggagtagaggccagggaacactggtcacagttagctctggatccggcggaggcggaagtggaggcggaggatctggcggcggaggctctttcgaagaagttcagctgcttgaatcaggcggcggactggttcaacctggcggatctctgagactgagctgtgccgccagcggctacagcatcacaagcgactatgcctggaactgggtccgacaggcccctggcaaaggactggaatgggtgtcctacatcagcaacagcggcagcaccagctacaaccccagcctgaagtcccggttcaccatcagcagagacaacagcaagaacaccctgtacctccagatgaacagcctgagagctgaggacaccgccgtgtattattgcgccaaagagcggaactacgactacgacgattactactacgctatggactactggggccagggaaccctggtcacagtctcttctacgcgtatccagaaccctgatcctgccgtgtaccagctgcgggatagcaagagcagcgacaagagcgtgtgtctgttcaccgacttcgacagccagaccaacgtgtcccagagcaaggactccgacgtgtacatcaccgataagaccgtgctggacatgcggagcatggacttcaagagcaactccgccgtggcctggtccaacaagtccgatttcgcctgcgccaacgccttcaacaacagcattatccccgaggacacattcttcccaagccccgagagcagctgcggtacccagagttttgggttgttggaccctaaattgtgctatctgttggacggaatcctgttcatttacggagtgatcctgaccgcattgttcctgcgggttaagttttccagatccgcagacgcacccgcttaccaacaagggcagaaccaactctacaatgaacttaatttggggcggagggaagagtacgacgttctggacaaaaggaggggacgagatcccgagatgggcggaaagcctcagcgaaggaagaatccgcaagaggggctttataacgaactccagaaagataaaatggcagaagcctatagtgagattgggatgaagggagaaaggaggaggggtaaaggtcacgatgggttgtaccaaggattgagcacagccactaaagatacctatgatgcgctccacatgcaggccctgccgccaaga

SEQ ID NO: 2827 - DNA, 3282 bp, Artificial Sequence
  Synthetic Polynucloetide
atggccttaccagtgaccgccttgctcctgccgctggccttgctgctccacgccgccaggccggaagtgcagctggttgaatctggcggaggactggttcagcctggcggatctctgagactgtcttgtgccgccagcggcttcagcttcagcgacttttggatgagctgggtccgacaggcccctggcaaaggacttgaatgggtcgccacaatcagccaggccggcagcgagaaggactacgtggactctgtgaagggcagattcaccatcagccgggacaacgccaagaagtccctgtacctccagatgaacagcctgagagccgaggacaccgccgtgtactattgtgcctctggcgtgtacagcttcgactacagaggccagggcaccctggtcacagtctcttctggtaccggcggaggcggatctggcggcggaggtagcggtggcggaggatctgaattcgacgtggtcatgacacagagccctctgagcctgcctgtgacacttggacagcctgccagcatcagctgtagaagcagccagagcctgctgcacagcagcggcaatacctacctggaatggtatcagcagaggcccggacagagccccagacctctgatctacaagatcagcacccggttcagcggcgtgcccgatagattttctggctctggcagcggcaccgacttcaccctgaagattagcagagtggaagccgaggacgtgggcgtgtactactgcttccaaggcagccacgtgccatacacctttggcggcggaacaaaggtggaaatcaagagactcgaggacctgaagaacgtgttcccacctgaggtggccgtgttcgagcctagcgaggccgagatcagccacacccagaaagccaccctcgtgtgcctggctaccggcttctaccccgaccatgtggaactgtcttggtgggtcaacggcaaagaggtgcacagcggcgtgtctaccgacccccagccactgaaagaacagcccgccctgaacgacagccggtactgcctgagcagcagactgagagtgtccgccaccttctggcagaacccccggaaccacttcagatgccaggtgcagttctacggcctgagcgagaacgacgagtggacccaggacagagccaagcccgtgacccagatcgtgtctgccgaagcctggggcagagccgattgcggatcccagagcttcggcctgctggaccccaagctgtgctacctgctggatggcatcctgttcatctacggcgtgatcctgaccgccctgttcctgagagtgaagttcagcagaagcgccgacgcccctgcctaccagcagggacagaaccaactgtacaacgagctgaacctgggcagacgggaagagtacgacgtgctggacaagcggagaggcagggaccctgagatgggcggaaagccccagcggagaaagaacccccaggaaggactgtataacgaactccagaaagacaagatggccgaagcctacagcgagatcggcatgaagggcgagcggagaagaggcaagggccacgatggcctgtaccagggcctgagcaccgccaccaaggacacctatgacgccctgcacatgcaggccctgcctccaagaagggccaagcgatctggatctggagcaacaaacttctcactactcaaacaagcaggtgacgtggaggagaatcccgggcctactagtatggactggatttggcgcatccttttccttgtcggcgctgctaccggcgcgcattccgggccccagctccagctgcaagagtctggacctggcctggtcaagcctagcgagacactgagcctgacctgtaccgtgtccggcgatagcatcagcagcggcgattactactggggctggatcagacagcctcctggcaaaggactggaatggatcggccacatctactacagcggcgtgacctactacaaccccagcctgaagtccagagtgaccatcagcgtggacaccagccggaaccagttctccctgaagctgtctagcgtgacagccgccgataccgccgtgtactactgcaccagagaggacagcagcaactggcggagtagaggccagggaacactggtcacagttagctctggatccggcggaggcggaagtggaggcggaggatctggcggcggaggctctttcgaacaagttcagctggttcagagcggagccgaagtgaagaaacctggggcctctgtgaaggtgtcctgcaaagcctctggcctgaccatcgaggactactacatgcactgggtccgacaggcccctggacaaggacttgaatggatgggctggatcgaccccgagaacggcgatacagagtacggccctaagttccagggcagagtgaccatgaccagagacaccagcatcaacaccgcctacatggaactgagccggctgagatccgatgacaccgccgtgtactattgcgccgtgcacaatgcccactacggcacttggtttgcctattggggccagggcacactggtcaccgttagctctacgcgtatccagaaccctgatcctgccgtgtaccagctgcgggatagcaagagcagcgacaagagcgtgtgtctgttcaccgacttcgacagccagaccaacgtgtcccagagcaaggactccgacgtgtacatcaccgataagaccgtgctggacatgcggagcatggacttcaagagcaactccgccgtggcctggtccaacaagtccgatttcgcctgcgccaacgccttcaacaacagcattatccccgaggacacattcttcccaagccccgagagcagctgcggtacccagagttttgggttgttggaccctaaattgtgctatctgttggacggaatcctgttcatttacggagtgatcctgaccgcattgttcctgcgggttaagttttccagatccgcagacgcacccgcttaccaacaagggcagaaccaactctacaatgaacttaatttggggcggagggaagagtacgacgttctggacaaaaggaggggacgagatcccgagatgggcggaaagcctcagcgaaggaagaatccgcaagaggggctttataacgaactccagaaagataaaatggcagaagcctatagtgagattgggatgaagggagaaaggaggaggggtaaaggtcacgatgggttgtaccaaggattgagcacagccactaaagatacctatgatgcgctccacatgcaggccctgccgccaaga

SEQ ID NO: 2828 - DNA, 3258 bp, Artificial Sequence
  Synthetic Polynucloetide
atggccttaccagtgaccgccttgctcctgccgctggccttgctgctccacgccgccaggccggaagtgcagctggttgaatctggcggaggactggttcagcctggcggatctctgagactgtcttgtgccgccagcggcttcagcttcagcgacttttggatgagctgggtccgacaggcccctggcaaaggacttgaatgggtcgccacaatcagccaggccggcagcgagaaggactacgtggactctgtgaagggcagattcaccatcagccgggacaacgccaagaagtccctgtacctccagatgaacagcctgagagccgaggacaccgccgtgtactattgtgcctctggcgtgtacagcttcgactacagaggccagggcaccctggtcacagtctcttctggtaccggcggaggcggatctggcggcggaggtagcggtggcggaggatctgaattcgacatccagatgacacagagccctagcagcctgtctgccagcgtgggagacagagtgaccatcacctgtagagccagcgagaacatctacagcaacctggcctggtatcagcagaagcctggcaaggcccctaagctgctgatctacgccgccaccaatctggctgatggcgtgccaagcagattttccggctctggcagcggcaccgatttcaccctgacaatatccagcctccagcctgaggacttcgccacctactactgccagcacttttggggcacccctacattcggccagggcaccaaggtggaaatcaagagaacagttctcgaggacctgaagaacgtgttcccacctgaggtggccgtgttcgagcctagcgaggccgagatcagccacacccagaaagccaccctcgtgtgcctggctaccggcttctaccccgaccatgtggaactgtcttggtgggtcaacggcaaagaggtgcacagcggcgtgtctaccgacccccagccactgaaagaacagcccgccctgaacgacagccggtactgcctgagcagcagactgagagtgtccgccaccttctggcagaacccccggaaccacttcagatgccaggtgcagttctacggcctgagcgagaacgacgagtggacccaggacagagccaagcccgtgacccagatcgtgtctgccgaagcctggggcagagccgattgcggatcccagagcttcggcctgctggaccccaagctgtgctacctgctggatggcatcctgttcatctacggcgtgatcctgaccgccctgttcctgagagtgaagttcagcagaagcgccgacgcccctgcctaccagcagggacagaaccaactgtacaacgagctgaacctgggcagacgggaagagtacgacgtgctggacaagcggagaggcagggaccctgagatgggcggaaagccccagcggagaaagaacccccaggaaggactgtataacgaactccagaaagacaagatggccgaagcctacagcgagatcggcatgaagggcgagcggagaagaggcaagggccacgatggcctgtaccagggcctgagcaccgccaccaaggacacctatgacgccctgcacatgcaggccctgcctccaagaagggccaagcgatctggatctggagcaacaaacttctcactactcaaacaagcaggtgacgtggaggagaatcccgggcctactagtatggactggatttggcgcatccttttccttgtcggcgctgctaccggcgcgcattccgggccccagctccagctgcaagagtctggacctggcctggtcaagcctagcgagacactgagcctgacctgtaccgtgtccggcgatagcatcagcagcggcgattactactggggctggatcagacagcctcctggcaaaggactggaatggatcggccacatctactacagcggcgtgacctactacaaccccagcctgaagtccagagtgaccatcagcgtggacaccagccggaaccagttctccctgaagctgtctagcgtgacagccgccgataccgccgtgtactactgcaccagagaggacagcagcaactggcggagtagaggccagggaacactggtcacagttagctctggatccggcggaggcggaagtggaggcggaggatctggcggcggaggctctttcgaagaagtgcagctggttgaatcaggtggcggcctggttcaacctggcggatctctgagactgagctgtgccgcctctggcttcagcctgacaaattacggcgtgcactgggtccgacaggcccctggaaaaggactggaatgggtgtccgtgatttggagcggcggcagcaccgattacaacgccgccttcatcagccggttcaccatcagcgccgacaccagcaagaataccgcctacctccagatgaactccctgagagccgaggacaccgccgtgtactattgcgccagagaactgatccacgctatggacaactggggccagggaaccctggtcacagtctcttctacgcgtatccagaaccctgatcctgccgtgtaccagctgcgggatagcaagagcagcgacaagagcgtgtgtctgttcaccgacttcgacagccagaccaacgtgtcccagagcaaggactccgacgtgtacatcaccgataagaccgtgctggacatgcggagcatggacttcaagagcaactccgccgtggcctggtccaacaagtccgatttcgcctgcgccaacgccttcaacaacagcattatccccgaggacacattcttcccaagccccgagagcagctgcggtacccagagttttgggttgttggaccctaaattgtgctatctgttggacggaatcctgttcatttacggagtgatcctgaccgcattgttcctgcgggttaagttttccagatccgcagacgcacccgcttaccaacaagggcagaaccaactctacaatgaacttaatttggggcggagggaagagtacgacgttctggacaaaaggaggggacgagatcccgagatgggcggaaagcctcagcgaaggaagaatccgcaagaggggctttataacgaactccagaaagataaaatggcagaagcctatagtgagattgggatgaagggagaaaggaggaggggtaaaggtcacgatgggttgtaccaaggattgagcacagccactaaagatacctatgatgcgctccacatgcaggccctgccgccaaga

SEQ ID NO: 2829 - DNA, 3279 bp, Artificial Sequence
  Synthetic Polynucloetide
atggccttaccagtgaccgccttgctcctgccgctggccttgctgctccacgccgccaggccggaagtgcagctggttgaatctggcggaggactggttcagcctggcggatctctgagactgtcttgtgccgccagcggcttcagcttcagcgacttttggatgagctgggtccgacaggcccctggcaaaggacttgaatgggtcgccacaatcagccaggccggcagcgagaaggactacgtggactctgtgaagggcagattcaccatcagccgggacaacgccaagaagtccctgtacctccagatgaacagcctgagagccgaggacaccgccgtgtactattgtgcctctggcgtgtacagcttcgactacagaggccagggcaccctggtcacagtctcttctggtaccggcggaggcggatctggcggcggaggtagcggtggcggaggatctgaattcgacttcgtgatgacacagagccctctgagcctgcctgtgacacctggcgaacctgccagcatcagctgtagaagcagccagagcatcgtgcacagcaacggcaacacctacctggaatggtatctccagaagcctggacagagcccacagctgctgatctacaaggtgtccaacagattcagcggcgtgcccgacagattttctggcagcggctctggcaccgacttcaccctgaagattagcagagtggaagccgaggacgtgggcgtgtactactgcttccaaggctctcacgtgcccctgacctttggacagggcaccaagctggaaatcaagagactcgaggacctgaagaacgtgttcccacctgaggtggccgtgttcgagcctagcgaggccgagatcagccacacccagaaagccaccctcgtgtgcctggctaccggcttctaccccgaccatgtggaactgtcttggtgggtcaacggcaaagaggtgcacagcggcgtgtctaccgacccccagccactgaaagaacagcccgccctgaacgacagccggtactgcctgagcagcagactgagagtgtccgccaccttctggcagaacccccggaaccacttcagatgccaggtgcagttctacggcctgagcgagaacgacgagtggacccaggacagagccaagcccgtgacccagatcgtgtctgccgaagcctggggcagagccgattgcggatcccagagcttcggcctgctggaccccaagctgtgctacctgctggatggcatcctgttcatctacggcgtgatcctgaccgccctgttcctgagagtgaagttcagcagaagcgccgacgcccctgcctaccagcagggacagaaccaactgtacaacgagctgaacctgggcagacgggaagagtacgacgtgctggacaagcggagaggcagggaccctgagatgggcggaaagccccagcggagaaagaacccccaggaaggactgtataacgaactccagaaagacaagatggccgaagcctacagcgagatcggcatgaagggcgagcggagaagaggcaagggccacgatggcctgtaccagggcctgagcaccgccaccaaggacacctatgacgccctgcacatgcaggccctgcctccaagaagggccaagcgatctggatctggagcaacaaacttctcactactcaaacaagcaggtgacgtggaggagaatcccgggcctactagtatggactggatttggcgcatccttttccttgtcggcgctgctaccggcgcgcattccgggccccagctccagctgcaagagtctggacctggcctggtcaagcctagcgagacactgagcctgacctgtaccgtgtccggcgatagcatcagcagcggcgattactactggggctggatcagacagcctcctggcaaaggactggaatggatcggccacatctactacagcggcgtgacctactacaaccccagcctgaagtccagagtgaccatcagcgtggacaccagccggaaccagttctccctgaagctgtctagcgtgacagccgccgataccgccgtgtactactgcaccagagaggacagcagcaactggcggagtagaggccagggaacactggtcacagttagctctggatccggcggaggcggaagtggaggcggaggatctggcggcggaggctctttcgaagaagtgcagctggttgaaagcggagccgaagtgaagaaacctggggcctctgtgaaggtgtcctgcaaggccagcggctacacctttaccagctactggattcactgggtccgacaggcccctggacaaggacttgagtggatgggcgagaacgacccctccaacggcaggaccaactacaacgagaagttcaagaaccgcgtgaccctgaccgtggacaccagcatctctaccgcctacatggaactgagccggctgagatccgatgacaccgccgtgtactattgcgccagaggacccaactacttttacagcatggactactggggccagggcacaatggtcaccgttagctctacgcgtatccagaaccctgatcctgccgtgtaccagctgcgggatagcaagagcagcgacaagagcgtgtgtctgttcaccgacttcgacagccagaccaacgtgtcccagagcaaggactccgacgtgtacatcaccgataagaccgtgctggacatgcggagcatggacttcaagagcaactccgccgtggcctggtccaacaagtccgatttcgcctgcgccaacgccttcaacaacagcattatccccgaggacacattcttcccaagccccgagagcagctgcggtacccagagttttgggttgttggaccctaaattgtgctatctgttggacggaatcctgttcatttacggagtgatcctgaccgcattgttcctgcgggttaagttttccagatccgcagacgcacccgcttaccaacaagggcagaaccaactctacaatgaacttaatttggggcggagggaagagtacgacgttctggacaaaaggaggggacgagatcccgagatgggcggaaagcctcagcgaaggaagaatccgcaagaggggctttataacgaactccagaaagataaaatggcagaagcctatagtgagattgggatgaagggagaaaggaggaggggtaaaggtcacgatgggttgtaccaaggattgagcacagccactaaagatacctatgatgcgctccacatgcaggccctgccgccaaga

SEQ ID NO: 2830 - DNA, 3258 bp, Artificial Sequence
  Synthetic Polynucloetide
atggccttaccagtgaccgccttgctcctgccgctggccttgctgctccacgccgccaggccggaagtgcagctggttgaatctggcggaggactggttcagcctggcggatctctgagactgtcttgtgccgccagcggcttcagcttcagcgacttttggatgagctgggtccgacaggcccctggcaaaggacttgaatgggtcgccacaatcagccaggccggcagcgagaaggactacgtggactctgtgaagggcagattcaccatcagccgggacaacgccaagaagtccctgtacctccagatgaacagcctgagagccgaggacaccgccgtgtactattgtgcctctggcgtgtacagcttcgactacagaggccagggcaccctggtcacagtctcttctggtaccggcggaggcggatctggcggcggaggtagcggtggcggaggatctgaattcgacatccagctgactcagagccctagctttctgagcgccagcgtgggcgacagagtgaccatcacatgtagcgccagatccagcatcagcttcatgtactggtatcagcagaagcccggcaaggcccctaagctgctgatctacgacaccagcaatctggcctctggcgtgcccagcagattttctggaagcggcagcggcaccgagttcaccctgacaatctctagcctggaagccgaggatgccgccacctactattgccagcagtggtccagctatcccctgacatttggacagggcaccaagctggaaatcaaactcgaggacctgaagaacgtgttcccacctgaggtggccgtgttcgagcctagcgaggccgagatcagccacacccagaaagccaccctcgtgtgcctggctaccggcttctaccccgaccatgtggaactgtcttggtgggtcaacggcaaagaggtgcacagcggcgtgtctaccgacccccagccactgaaagaacagcccgccctgaacgacagccggtactgcctgagcagcagactgagagtgtccgccaccttctggcagaacccccggaaccacttcagatgccaggtgcagttctacggcctgagcgagaacgacgagtggacccaggacagagccaagcccgtgacccagatcgtgtctgccgaagcctggggcagagccgattgcggatcccagagcttcggcctgctggaccccaagctgtgctacctgctggatggcatcctgttcatctacggcgtgatcctgaccgccctgttcctgagagtgaagttcagcagaagcgccgacgcccctgcctaccagcagggacagaaccaactgtacaacgagctgaacctgggcagacgggaagagtacgacgtgctggacaagcggagaggcagggaccctgagatgggcggaaagccccagcggagaaagaacccccaggaaggactgtataacgaactccagaaagacaagatggccgaagcctacagcgagatcggcatgaagggcgagcggagaagaggcaagggccacgatggcctgtaccagggcctgagcaccgccaccaaggacacctatgacgccctgcacatgcaggccctgcctccaagaagggccaagcgatctggatctggagcaacaaacttctcactactcaaacaagcaggtgacgtggaggagaatcccgggcctactagtatggactggatttggcgcatccttttccttgtcggcgctgctaccggcgcgcattccgggccccagctccagctgcaagagtctggacctggcctggtcaagcctagcgagacactgagcctgacctgtaccgtgtccggcgatagcatcagcagcggcgattactactggggctggatcagacagcctcctggcaaaggactggaatggatcggccacatctactacagcggcgtgacctactacaaccccagcctgaagtccagagtgaccatcagcgtggacaccagccggaaccagttctccctgaagctgtctagcgtgacagccgccgataccgccgtgtactactgcaccagagaggacagcagcaactggcggagtagaggccagggaacactggtcacagttagctctggatccggcggaggcggaagtggaggcggaggatctggcggcggaggctctttcgaacaggttcagctggttcagtctggggccgaagtgaagaaacctggggcctctgtgaaggtgtcctgcaaggcttccggctacacctttaccggctcttggatgaactgggtccgacaggctcctggacagggactcgaatggatcggcagaatctatcctggcgacggcgagacaaactacaacggcaagttcaaggaccgcgtgacaatcaccgccgacaagagcacaagcaccgcctacatggaactgagcagcctgcggagcgaagataccgccgtgtactactgcgcccggatctacggcaacaacgtgtacttcgatgtgtggggccagggcacaaccgtgacagtctcttctacgcgtatccagaaccctgatcctgccgtgtaccagctgcgggatagcaagagcagcgacaagagcgtgtgtctgttcaccgacttcgacagccagaccaacgtgtcccagagcaaggactccgacgtgtacatcaccgataagaccgtgctggacatgcggagcatggacttcaagagcaactccgccgtggcctggtccaacaagtccgatttcgcctgcgccaacgccttcaacaacagcattatccccgaggacacattcttcccaagccccgagagcagctgcggtacccagagttttgggttgttggaccctaaattgtgctatctgttggacggaatcctgttcatttacggagtgatcctgaccgcattgttcctgcgggttaagttttccagatccgcagacgcacccgcttaccaacaagggcagaaccaactctacaatgaacttaatttggggcggagggaagagtacgacgttctggacaaaaggaggggacgagatcccgagatgggcggaaagcctcagcgaaggaagaatccgcaagaggggctttataacgaactccagaaagataaaatggcagaagcctatagtgagattgggatgaagggagaaaggaggaggggtaaaggtcacgatgggttgtaccaaggattgagcacagccactaaagatacctatgatgcgctccacatgcaggccctgccgccaaga

SEQ ID NO: 2831 - DNA, 3282 bp, Artificial Sequence
  Synthetic Polynucloetide
atggccttaccagtgaccgccttgctcctgccgctggccttgctgctccacgccgccaggccggaagtgcagctggttgaatctggcggaggactggttcagcctggcggatctctgagactgtcttgtgccgccagcggcttcagcttcagcgacttttggatgagctgggtccgacaggcccctggcaaaggacttgaatgggtcgccacaatcagccaggccggcagcgagaaggactacgtggactctgtgaagggcagattcaccatcagccgggacaacgccaagaagtccctgtacctccagatgaacagcctgagagccgaggacaccgccgtgtactattgtgcctctggcgtgtacagcttcgactacagaggccagggcaccctggtcacagtctcttctggtaccggcggaggcggatctggcggcggaggtagcggtggcggaggatctgaattccagctggtgctgacacagtctccaagcgcctctgccagcctgggatctagcgtgaagctgacctgtacactgagcagcggccacaagaccgacaccatcgactggtatcagcagcagcctggcaaggcccctagatacctgatgaagctggaaggcagcggcagctacaacaaaggctctggcgtgcccgatagattcagcggcagttcttctggcgctgattggtatctgaccatcagcagcctccagagcgaggacgaggccgattactactgcggcacagactaccccggcaactacctgtttggcggcggaacacagctgacagtgcttggcctcgaggacctgaagaacgtgttcccacctgaggtggccgtgttcgagcctagcgaggccgagatcagccacacccagaaagccaccctcgtgtgcctggctaccggcttctaccccgaccatgtggaactgtcttggtgggtcaacggcaaagaggtgcacagcggcgtgtctaccgacccccagccactgaaagaacagcccgccctgaacgacagccggtactgcctgagcagcagactgagagtgtccgccaccttctggcagaacccccggaaccacttcagatgccaggtgcagttctacggcctgagcgagaacgacgagtggacccaggacagagccaagcccgtgacccagatcgtgtctgccgaagcctggggcagagccgattgcggatcccagagcttcggcctgctggaccccaagctgtgctacctgctggatggcatcctgttcatctacggcgtgatcctgaccgccctgttcctgagagtgaagttcagcagaagcgccgacgcccctgcctaccagcagggacagaaccaactgtacaacgagctgaacctgggcagacgggaagagtacgacgtgctggacaagcggagaggcagggaccctgagatgggcggaaagccccagcggagaaagaacccccaggaaggactgtataacgaactccagaaagacaagatggccgaagcctacagcgagatcggcatgaagggcgagcggagaagaggcaagggccacgatggcctgtaccagggcctgagcaccgccaccaaggacacctatgacgccctgcacatgcaggccctgcctccaagaagggccaagcgatctggatctggagcaacaaacttctcactactcaaacaagcaggtgacgtggaggagaatcccgggcctactagtatggactggatttggcgcatccttttccttgtcggcgctgctaccggcgcgcattccgggccccagctccagctgcaagagtctggacctggcctggtcaagcctagcgagacactgagcctgacctgtaccgtgtccggcgatagcatcagcagcggcgattactactggggctggatcagacagcctcctggcaaaggactggaatggatcggccacatctactacagcggcgtgacctactacaaccccagcctgaagtccagagtgaccatcagcgtggacaccagccggaaccagttctccctgaagctgtctagcgtgacagccgccgataccgccgtgtactactgcaccagagaggacagcagcaactggcggagtagaggccagggaacactggtcacagttagctctggatccggcggaggcggaagtggaggcggaggatctggcggcggaggctctttcgaacaagaacagctggttgaaagcggcggaggactggttcaacctggcggttctctgagactgagctgtgccgccagcggcttcaccttcagcgactactacatgagctggatcagacaggccccaggcaaaggactggaatgggtcgccacaatctaccccagcagcggcaagacctactacgccgattctgccaagggcagactgaccatctccagcgacaacgccaaggacagcctgtacctccagatgaacagcctgagagccgaggacaccgccgtgtactactgcaccagagatagctacgccgacgacgccgctctgtttgacatttggggccagggcaccaccgtgaccgtttcttctacgcgtatccagaaccctgatcctgccgtgtaccagctgcgggatagcaagagcagcgacaagagcgtgtgtctgttcaccgacttcgacagccagaccaacgtgtcccagagcaaggactccgacgtgtacatcaccgataagaccgtgctggacatgcggagcatggacttcaagagcaactccgccgtggcctggtccaacaagtccgatttcgcctgcgccaacgccttcaacaacagcattatccccgaggacacattcttcccaagccccgagagcagctgcggtacccagagttttgggttgttggaccctaaattgtgctatctgttggacggaatcctgttcatttacggagtgatcctgaccgcattgttcctgcgggttaagttttccagatccgcagacgcacccgcttaccaacaagggcagaaccaactctacaatgaacttaatttggggcggagggaagagtacgacgttctggacaaaaggaggggacgagatcccgagatgggcggaaagcctcagcgaaggaagaatccgcaagaggggctttataacgaactccagaaagataaaatggcagaagcctatagtgagattgggatgaagggagaaaggaggaggggtaaaggtcacgatgggttgtaccaaggattgagcacagccactaaagatacctatgatgcgctccacatgcaggccctgccgccaaga

SEQ ID NO: 2832 - DNA, 3270 bp, Artificial Sequence
  Synthetic Polynucloetide
atggccttaccagtgaccgccttgctcctgccgctggccttgctgctccacgccgccaggccggaagtgcagctggttgaatctggcggaggactggttcagcctggcggatctctgagactgtcttgtgccgccagcggcttcagcttcagcgacttttggatgagctgggtccgacaggcccctggcaaaggacttgaatgggtcgccacaatcagccaggccggcagcgagaaggactacgtggactctgtgaagggcagattcaccatcagccgggacaacgccaagaagtccctgtacctccagatgaacagcctgagagccgaggacaccgccgtgtactattgtgcctctggcgtgtacagcttcgactacagaggccagggcaccctggtcacagtctcttctggtaccggcggaggcggatctggcggcggaggtagcggtggcggaggatctgaattcgagattgtgttgacacagtctcccgataccctgtcactgtcacccggcgagaaggcaacgctgagttgcagagcaagccagtcagtctcctcttcttttctggcctggtatcagcaaaaaccaggtcaggcaccatctctcctgatttacgttgccagcagacgggcggctggcattcccgacaggttctctggaagcggatctgggaccgattttaccctgacaattagccgcttggagcccgaagactttggtatgttttactgccagcactacggaaggacacctttcacatttggcccgggcacgaaagtcgatataaaacgcctcgaggacctgaagaacgtgttcccacctgaggtggccgtgttcgagcctagcgaggccgagatcagccacacccagaaagccaccctcgtgtgcctggctaccggcttctaccccgaccatgtggaactgtcttggtgggtcaacggcaaagaggtgcacagcggcgtgtctaccgacccccagccactgaaagaacagcccgccctgaacgacagccggtactgcctgagcagcagactgagagtgtccgccaccttctggcagaacccccggaaccacttcagatgccaggtgcagttctacggcctgagcgagaacgacgagtggacccaggacagagccaagcccgtgacccagatcgtgtctgccgaagcctggggcagagccgattgcggatcccagagcttcggcctgctggaccccaagctgtgctacctgctggatggcatcctgttcatctacggcgtgatcctgaccgccctgttcctgagagtgaagttcagcagaagcgccgacgcccctgcctaccagcagggacagaaccaactgtacaacgagctgaacctgggcagacgggaagagtacgacgtgctggacaagcggagaggcagggaccctgagatgggcggaaagccccagcggagaaagaacccccaggaaggactgtataacgaactccagaaagacaagatggccgaagcctacagcgagatcggcatgaagggcgagcggagaagaggcaagggccacgatggcctgtaccagggcctgagcaccgccaccaaggacacctatgacgccctgcacatgcaggccctgcctccaagaagggccaagcgatctggatctggagcaacaaacttctcactactcaaacaagcaggtgacgtggaggagaatcccgggcctactagtatggactggatttggcgcatccttttccttgtcggcgctgctaccggcgcgcattccgggccccagctccagctgcaagagtctggacctggcctggtcaagcctagcgagacactgagcctgacctgtaccgtgtccggcgatagcatcagcagcggcgattactactggggctggatcagacagcctcctggcaaaggactggaatggatcggccacatctactacagcggcgtgacctactacaaccccagcctgaagtccagagtgaccatcagcgtggacaccagccggaaccagttctccctgaagctgtctagcgtgacagccgccgataccgccgtgtactactgcaccagagaggacagcagcaactggcggagtagaggccagggaacactggtcacagttagctctggatccggcggaggcggaagtggaggcggaggatctggcggcggaggctctttcgaacagatccagttggtggaatcagggggcggtgtggtgcagccgggtaggagcctgagactgtcatgcgtggcgtctggcttcacattcaagaactacggcatgcactgggtgcgacaggcccccggaaagggtttggagtgggtcgccgtgatctggtacgacggatctaatgagtattacggagatcctgtgaagggaaggttcaccatctcccgcgacaatagcaaaaatatgctctacctgcaaatgaactcactcagggcggatgatacggcggtctactattgcgctcgctcagggattgctgtggccggcgcattcgattactggggacagggtaccctggtgacagtatcaagcacgcgtatccagaaccctgatcctgccgtgtaccagctgcgggatagcaagagcagcgacaagagcgtgtgtctgttcaccgacttcgacagccagaccaacgtgtcccagagcaaggactccgacgtgtacatcaccgataagaccgtgctggacatgcggagcatggacttcaagagcaactccgccgtggcctggtccaacaagtccgatttcgcctgcgccaacgccttcaacaacagcattatccccgaggacacattcttcccaagccccgagagcagctgcggtacccagagttttgggttgttggaccctaaattgtgctatctgttggacggaatcctgttcatttacggagtgatcctgaccgcattgttcctgcgggttaagttttccagatccgcagacgcacccgcttaccaacaagggcagaaccaactctacaatgaacttaatttggggcggagggaagagtacgacgttctggacaaaaggaggggacgagatcccgagatgggcggaaagcctcagcgaaggaagaatccgcaagaggggctttataacgaactccagaaagataaaatggcagaagcctatagtgagattgggatgaagggagaaaggaggaggggtaaaggtcacgatgggttgtaccaaggattgagcacagccactaaagatacctatgatgcgctccacatgcaggccctgccgccaaga

SEQ ID NO: 2833 - DNA, 3288 bp, Artificial Sequence
  Synthetic Polynucloetide
atggccttaccagtgaccgccttgctcctgccgctggccttgctgctccacgccgccaggccggaagtgcagctggttgaatctggcggaggactggttcagcctggcggatctctgagactgtcttgtgccgccagcggcttcagcttcagcgacttttggatgagctgggtccgacaggcccctggcaaaggacttgaatgggtcgccacaatcagccaggccggcagcgagaaggactacgtggactctgtgaagggcagattcaccatcagccgggacaacgccaagaagtccctgtacctccagatgaacagcctgagagccgaggacaccgccgtgtactattgtgcctctggcgtgtacagcttcgactacagaggccagggcaccctggtcacagtctcttctggtaccggcggaggcggatctggcggcggaggtagcggtggcggaggatctgaattcgacattcagatgacccaaagcccgtccagcctgtccgccagcctgggagatagagtgacaatcacgtgtagagcttcccaagggataagaaatgatctcgggtggtatcagcagaagcccggcaaagcccccaaaaggcttatatatgctagtagtacactgcagtctggagttccttcccgattttcaggtagcggctccggtacagagttcaccctcacgataagctcactccagcctgaggatttcgcaacgtactactgcctccagcacaacaattttccctggactttcggccagggcaccaaggtggagatcaagaggctcgaggacctgaagaacgtgttcccacctgaggtggccgtgttcgagcctagcgaggccgagatcagccacacccagaaagccaccctcgtgtgcctggctaccggcttctaccccgaccatgtggaactgtcttggtgggtcaacggcaaagaggtgcacagcggcgtgtctaccgacccccagccactgaaagaacagcccgccctgaacgacagccggtactgcctgagcagcagactgagagtgtccgccaccttctggcagaacccccggaaccacttcagatgccaggtgcagttctacggcctgagcgagaacgacgagtggacccaggacagagccaagcccgtgacccagatcgtgtctgccgaagcctggggcagagccgattgcggatcccagagcttcggcctgctggaccccaagctgtgctacctgctggatggcatcctgttcatctacggcgtgatcctgaccgccctgttcctgagagtgaagttcagcagaagcgccgacgcccctgcctaccagcagggacagaaccaactgtacaacgagctgaacctgggcagacgggaagagtacgacgtgctggacaagcggagaggcagggaccctgagatgggcggaaagccccagcggagaaagaacccccaggaaggactgtataacgaactccagaaagacaagatggccgaagcctacagcgagatcggcatgaagggcgagcggagaagaggcaagggccacgatggcctgtaccagggcctgagcaccgccaccaaggacacctatgacgccctgcacatgcaggccctgcctccaagaagggccaagcgatctggatctggagcaacaaacttctcactactcaaacaagcaggtgacgtggaggagaatcccgggcctactagtatggactggatttggcgcatccttttccttgtcggcgctgctaccggcgcgcattccgggccccagctccagctgcaagagtctggacctggcctggtcaagcctagcgagacactgagcctgacctgtaccgtgtccggcgatagcatcagcagcggcgattactactggggctggatcagacagcctcctggcaaaggactggaatggatcggccacatctactacagcggcgtgacctactacaaccccagcctgaagtccagagtgaccatcagcgtggacaccagccggaaccagttctccctgaagctgtctagcgtgacagccgccgataccgccgtgtactactgcaccagagaggacagcagcaactggcggagtagaggccagggaacactggtcacagttagctctggatccggcggaggcggaagtggaggcggaggatctggcggcggaggctctttcgaacaagttactttgaaggagtctggacctgtactggtgaagccaaccgagacactgacactcacgtgtacagtgagtggtttttccttgatcaacgcaaggatgggcgtcagctggatcaggcaaccccctggcaaggctctggaatggctcgctcacatattcagcaatgccgaaaaaagctaccggacaagcctgaaatcccgcctgactatttccaaggacacttctaagtctcaggtggtgctgaccatgaccaacatggacccggtggacaccgccacctattactgcgcaagaatccctgggtatggtgggaatggtgactaccattattatgggatggatgtgtgggggcaaggcacaaccgtaacggtctcaagcacgcgtatccagaaccctgatcctgccgtgtaccagctgcgggatagcaagagcagcgacaagagcgtgtgtctgttcaccgacttcgacagccagaccaacgtgtcccagagcaaggactccgacgtgtacatcaccgataagaccgtgctggacatgcggagcatggacttcaagagcaactccgccgtggcctggtccaacaagtccgatttcgcctgcgccaacgccttcaacaacagcattatccccgaggacacattcttcccaagccccgagagcagctgcggtacccagagttttgggttgttggaccctaaattgtgctatctgttggacggaatcctgttcatttacggagtgatcctgaccgcattgttcctgcgggttaagttttccagatccgcagacgcacccgcttaccaacaagggcagaaccaactctacaatgaacttaatttggggcggagggaagagtacgacgttctggacaaaaggaggggacgagatcccgagatgggcggaaagcctcagcgaaggaagaatccgcaagaggggctttataacgaactccagaaagataaaatggcagaagcctatagtgagattgggatgaagggagaaaggaggaggggtaaaggtcacgatgggttgtaccaaggattgagcacagccactaaagatacctatgatgcgctccacatgcaggccctgccgccaaga

SEQ ID NO: 2834 - DNA, 3267 bp, Artificial Sequence
  Synthetic Polynucloetide
atggccttaccagtgaccgccttgctcctgccgctggccttgctgctccacgccgccaggccggaagtgcagctggttgaatctggcggaggactggttcagcctggcggatctctgagactgtcttgtgccgccagcggcttcagcttcagcgacttttggatgagctgggtccgacaggcccctggcaaaggacttgaatgggtcgccacaatcagccaggccggcagcgagaaggactacgtggactctgtgaagggcagattcaccatcagccgggacaacgccaagaagtccctgtacctccagatgaacagcctgagagccgaggacaccgccgtgtactattgtgcctctggcgtgtacagcttcgactacagaggccagggcaccctggtcacagtctcttctggtaccggcggaggcggatctggcggcggaggtagcggtggcggaggatctgaattcgacatcgtgctgacacagagccctccaagcctggctatgagcctgggaaagagagccaccatcagctgtagagccagcgagagcgtgacaatcctgggctctcacctgatccactggtatcagcagaagcccggccagcctcctacactgctgattcagctggcctccaatgtgcagacaggcgtgccagccagattttctggcagcggcagcagaaccgacttcaccctgaccattgatcccgtggaagaggacgacgtggccgtgtactactgcctccagagcagaacaatccccagaacctttggcggaggcaccaagctggaaatcaaactcgaggacctgaagaacgtgttcccacctgaggtggccgtgttcgagcctagcgaggccgagatcagccacacccagaaagccaccctcgtgtgcctggctaccggcttctaccccgaccatgtggaactgtcttggtgggtcaacggcaaagaggtgcacagcggcgtgtctaccgacccccagccactgaaagaacagcccgccctgaacgacagccggtactgcctgagcagcagactgagagtgtccgccaccttctggcagaacccccggaaccacttcagatgccaggtgcagttctacggcctgagcgagaacgacgagtggacccaggacagagccaagcccgtgacccagatcgtgtctgccgaagcctggggcagagccgattgcggatcccagagcttcggcctgctggaccccaagctgtgctacctgctggatggcatcctgttcatctacggcgtgatcctgaccgccctgttcctgagagtgaagttcagcagaagcgccgacgcccctgcctaccagcagggacagaaccaactgtacaacgagctgaacctgggcagacgggaagagtacgacgtgctggacaagcggagaggcagggaccctgagatgggcggaaagccccagcggagaaagaacccccaggaaggactgtataacgaactccagaaagacaagatggccgaagcctacagcgagatcggcatgaagggcgagcggagaagaggcaagggccacgatggcctgtaccagggcctgagcaccgccaccaaggacacctatgacgccctgcacatgcaggccctgcctccaagaagggccaagcgatctggatctggagcaacaaacttctcactactcaaacaagcaggtgacgtggaggagaatcccgggcctactagtatggactggatttggcgcatccttttccttgtcggcgctgctaccggcgcgcattccgggccccagctccagctgcaagagtctggacctggcctggtcaagcctagcgagacactgagcctgacctgtaccgtgtccggcgatagcatcagcagcggcgattactactggggctggatcagacagcctcctggcaaaggactggaatggatcggccacatctactacagcggcgtgacctactacaaccccagcctgaagtccagagtgaccatcagcgtggacaccagccggaaccagttctccctgaagctgtctagcgtgacagccgccgataccgccgtgtactactgcaccagagaggacagcagcaactggcggagtagaggccagggaacactggtcacagttagctctggatccggcggaggcggaagtggaggcggaggatctggcggcggaggctctttcgaacaaatccagctggtgcagtctggccccgagctgaagaaacctggcgagacagtgaagatcagctgcaaggccagcggctacaccttcaccgactacagcatcaactgggtcaagagagcccctggcaagggcctgaaatggatgggctggatcaacaccgaaaccagagagcccgcctacgcctacgacttcagaggcagattcgccttcagcctggaaaccagcgccagcacagcctacctccagatcaacaacctgaagtacgaggacaccgccacctacttttgcgccctggactacagctacgctatggactattggggccagggcaccagcgtgacagtctcttctacgcgtatccagaaccctgatcctgccgtgtaccagctgcgggatagcaagagcagcgacaagagcgtgtgtctgttcaccgacttcgacagccagaccaacgtgtcccagagcaaggactccgacgtgtacatcaccgataagaccgtgctggacatgcggagcatggacttcaagagcaactccgccgtggcctggtccaacaagtccgatttcgcctgcgccaacgccttcaacaacagcattatccccgaggacacattcttcccaagccccgagagcagctgcggtacccagagttttgggttgttggaccctaaattgtgctatctgttggacggaatcctgttcatttacggagtgatcctgaccgcattgttcctgcgggttaagttttccagatccgcagacgcacccgcttaccaacaagggcagaaccaactctacaatgaacttaatttggggcggagggaagagtacgacgttctggacaaaaggaggggacgagatcccgagatgggcggaaagcctcagcgaaggaagaatccgcaagaggggctttataacgaactccagaaagataaaatggcagaagcctatagtgagattgggatgaagggagaaaggaggaggggtaaaggtcacgatgggttgtaccaaggattgagcacagccactaaagatacctatgatgcgctccacatgcaggccctgccgccaaga

SEQ ID NO: 2835 - DNA, 3273 bp, Artificial Sequence
  Synthetic Polynucloetide
atggccttaccagtgaccgccttgctcctgccgctggccttgctgctccacgccgccaggccggaagtgcagctggttgaatctggcggaggactggttcagcctggcggatctctgagactgtcttgtgccgccagcggcttcagcttcagcgacttttggatgagctgggtccgacaggcccctggcaaaggacttgaatgggtcgccacaatcagccaggccggcagcgagaaggactacgtggactctgtgaagggcagattcaccatcagccgggacaacgccaagaagtccctgtacctccagatgaacagcctgagagccgaggacaccgccgtgtactattgtgcctctggcgtgtacagcttcgactacagaggccagggcaccctggtcacagtctcttctggtaccggcggaggcggatctggcggcggaggtagcggtggcggaggatctgaattcgatattcaactgacacaatcccccagctcactcagcgccagcgtgggggacagggttagctttacctgtcaagcctctcaggatataaataactttctgaactggtatcaacagaagcctgggaaggcgcccaaactcctgatctatgatgcgtccaacctggaaactggcgtgccttcacgctttagcggctctggcagtggtacagacttcacttttaccatctcttcacttcagccggaggacatcgccacatattactgtcaacagtacggaaacttgccctttacttttggaggcggcaccaaagttgaaatcaaaagactcgaggacctgaagaacgtgttcccacctgaggtggccgtgttcgagcctagcgaggccgagatcagccacacccagaaagccaccctcgtgtgcctggctaccggcttctaccccgaccatgtggaactgtcttggtgggtcaacggcaaagaggtgcacagcggcgtgtctaccgacccccagccactgaaagaacagcccgccctgaacgacagccggtactgcctgagcagcagactgagagtgtccgccaccttctggcagaacccccggaaccacttcagatgccaggtgcagttctacggcctgagcgagaacgacgagtggacccaggacagagccaagcccgtgacccagatcgtgtctgccgaagcctggggcagagccgattgcggatcccagagcttcggcctgctggaccccaagctgtgctacctgctggatggcatcctgttcatctacggcgtgatcctgaccgccctgttcctgagagtgaagttcagcagaagcgccgacgcccctgcctaccagcagggacagaaccaactgtacaacgagctgaacctgggcagacgggaagagtacgacgtgctggacaagcggagaggcagggaccctgagatgggcggaaagccccagcggagaaagaacccccaggaaggactgtataacgaactccagaaagacaagatggccgaagcctacagcgagatcggcatgaagggcgagcggagaagaggcaagggccacgatggcctgtaccagggcctgagcaccgccaccaaggacacctatgacgccctgcacatgcaggccctgcctccaagaagggccaagcgatctggatctggagcaacaaacttctcactactcaaacaagcaggtgacgtggaggagaatcccgggcctactagtatggactggatttggcgcatccttttccttgtcggcgctgctaccggcgcgcattccgggccccagctccagctgcaagagtctggacctggcctggtcaagcctagcgagacactgagcctgacctgtaccgtgtccggcgatagcatcagcagcggcgattactactggggctggatcagacagcctcctggcaaaggactggaatggatcggccacatctactacagcggcgtgacctactacaaccccagcctgaagtccagagtgaccatcagcgtggacaccagccggaaccagttctccctgaagctgtctagcgtgacagccgccgataccgccgtgtactactgcaccagagaggacagcagcaactggcggagtagaggccagggaacactggtcacagttagctctggatccggcggaggcggaagtggaggcggaggatctggcggcggaggctctttcgaacaggtccaactgcaagaaagcggacccggactggtgaagccttctgagacacttagtctgacgtgcacggtcagtggcggctccatctcctcctattattggtcatggatacgacaacccccaggtaagggcctggaatggattggctatatctactattcaggaagcacgaactacaatcccagcctgaagtcccgagtgacaatttcagtagataccagtaaaaaccagttcagtcttaaactgtcaagcgtgacagctgccgacaccgctgtgtattactgcgtctcactggtgtattgtggaggggattgttatagcgggttcgattattggggacagggaaccctggtgactgtatcttccacgcgtatccagaaccctgatcctgccgtgtaccagctgcgggatagcaagagcagcgacaagagcgtgtgtctgttcaccgacttcgacagccagaccaacgtgtcccagagcaaggactccgacgtgtacatcaccgataagaccgtgctggacatgcggagcatggacttcaagagcaactccgccgtggcctggtccaacaagtccgatttcgcctgcgccaacgccttcaacaacagcattatccccgaggacacattcttcccaagccccgagagcagctgcggtacccagagttttgggttgttggaccctaaattgtgctatctgttggacggaatcctgttcatttacggagtgatcctgaccgcattgttcctgcgggttaagttttccagatccgcagacgcacccgcttaccaacaagggcagaaccaactctacaatgaacttaatttggggcggagggaagagtacgacgttctggacaaaaggaggggacgagatcccgagatgggcggaaagcctcagcgaaggaagaatccgcaagaggggctttataacgaactccagaaagataaaatggcagaagcctatagtgagattgggatgaagggagaaaggaggaggggtaaaggtcacgatgggttgtaccaaggattgagcacagccactaaagatacctatgatgcgctccacatgcaggccctgccgccaaga

SEQ ID NO: 2836 - DNA, 3279 bp, Artificial Sequence
  Synthetic Polynucloetide
atggccttaccagtgaccgccttgctcctgccgctggccttgctgctccacgccgccaggccggaagtgcagctggttgaatctggcggaggactggttcagcctggcggatctctgagactgtcttgtgccgccagcggcttcagcttcagcgacttttggatgagctgggtccgacaggcccctggcaaaggacttgaatgggtcgccacaatcagccaggccggcagcgagaaggactacgtggactctgtgaagggcagattcaccatcagccgggacaacgccaagaagtccctgtacctccagatgaacagcctgagagccgaggacaccgccgtgtactattgtgcctctggcgtgtacagcttcgactacagaggccagggcaccctggtcacagtctcttctggtaccggcggaggcggatctggcggcggaggtagcggtggcggaggatctgaattcgatatccagctcactcaaagcccctctagtctctctgcctcagtgggggatcgggtcagttttacttgtcaagcttcacaggatatcaacaacttccttaattggtatcagcagaagccaggaaaagcacccaagctgctcatctatgatgcctcaaatttggagacgggtgttcccagtcgattctctgggtcagggtccgggaccgactttacgtttacgatctcctctctgcagcccgaagacatcgccacatactattgtcaacagtacggcaacttgcctttcacatttgggggcgggactaaggttgaaatcaagaggctcgaggacctgaagaacgtgttcccacctgaggtggccgtgttcgagcctagcgaggccgagatcagccacacccagaaagccaccctcgtgtgcctggctaccggcttctaccccgaccatgtggaactgtcttggtgggtcaacggcaaagaggtgcacagcggcgtgtctaccgacccccagccactgaaagaacagcccgccctgaacgacagccggtactgcctgagcagcagactgagagtgtccgccaccttctggcagaacccccggaaccacttcagatgccaggtgcagttctacggcctgagcgagaacgacgagtggacccaggacagagccaagcccgtgacccagatcgtgtctgccgaagcctggggcagagccgattgcggatcccagagcttcggcctgctggaccccaagctgtgctacctgctggatggcatcctgttcatctacggcgtgatcctgaccgccctgttcctgagagtgaagttcagcagaagcgccgacgcccctgcctaccagcagggacagaaccaactgtacaacgagctgaacctgggcagacgggaagagtacgacgtgctggacaagcggagaggcagggaccctgagatgggcggaaagccccagcggagaaagaacccccaggaaggactgtataacgaactccagaaagacaagatggccgaagcctacagcgagatcggcatgaagggcgagcggagaagaggcaagggccacgatggcctgtaccagggcctgagcaccgccaccaaggacacctatgacgccctgcacatgcaggccctgcctccaagaagggccaagcgatctggatctggagcaacaaacttctcactactcaaacaagcaggtgacgtggaggagaatcccgggcctactagtatggactggatttggcgcatccttttccttgtcggcgctgctaccggcgcgcattccgggccccagctccagctgcaagagtctggacctggcctggtcaagcctagcgagacactgagcctgacctgtaccgtgtccggcgatagcatcagcagcggcgattactactggggctggatcagacagcctcctggcaaaggactggaatggatcggccacatctactacagcggcgtgacctactacaaccccagcctgaagtccagagtgaccatcagcgtggacaccagccggaaccagttctccctgaagctgtctagcgtgacagccgccgataccgccgtgtactactgcaccagagaggacagcagcaactggcggagtagaggccagggaacactggtcacagttagctctggatccggcggaggcggaagtggaggcggaggatctggcggcggaggctctttcgaacaggtacagctgcaggaatctgggcccggacttgtcaagccaagtcagacactttctcttacatgtaccgtgagcggcggaagtataagcagtggaggcttttactggtcttggatacggcagcacccaggcaaaggcttggagtggattggatacattcatcattcaggatctacacactataatccatcccttaagtcccgggtcaccattagcattgatacgtctaagaatctgttcagtctcaggctgtcctccgtcactgctgccgacacagccgtgtactactgcgcctccttggtttactgcggaggcgactgttatagcggctttgattattgggggcaggggaccctcgtaaccgtgagctctacgcgtatccagaaccctgatcctgccgtgtaccagctgcgggatagcaagagcagcgacaagagcgtgtgtctgttcaccgacttcgacagccagaccaacgtgtcccagagcaaggactccgacgtgtacatcaccgataagaccgtgctggacatgcggagcatggacttcaagagcaactccgccgtggcctggtccaacaagtccgatttcgcctgcgccaacgccttcaacaacagcattatccccgaggacacattcttcccaagccccgagagcagctgcggtacccagagttttgggttgttggaccctaaattgtgctatctgttggacggaatcctgttcatttacggagtgatcctgaccgcattgttcctgcgggttaagttttccagatccgcagacgcacccgcttaccaacaagggcagaaccaactctacaatgaacttaatttggggcggagggaagagtacgacgttctggacaaaaggaggggacgagatcccgagatgggcggaaagcctcagcgaaggaagaatccgcaagaggggctttataacgaactccagaaagataaaatggcagaagcctatagtgagattgggatgaagggagaaaggaggaggggtaaaggtcacgatgggttgtaccaaggattgagcacagccactaaagatacctatgatgcgctccacatgcaggccctgccgccaaga

SEQ ID NO: 2837 - DNA, 3267 bp, Artificial Sequence
  Synthetic Polynucloetide
atggccttaccagtgaccgccttgctcctgccgctggccttgctgctccacgccgccaggccggaagtgcagctggttgaatctggcggaggactggttcagcctggcggatctctgagactgtcttgtgccgccagcggcttcagcttcagcgacttttggatgagctgggtccgacaggcccctggcaaaggacttgaatgggtcgccacaatcagccaggccggcagcgagaaggactacgtggactctgtgaagggcagattcaccatcagccgggacaacgccaagaagtccctgtacctccagatgaacagcctgagagccgaggacaccgccgtgtactattgtgcctctggcgtgtacagcttcgactacagaggccagggcaccctggtcacagtctcttctggtaccggcggaggcggatctggcggcggaggtagcggtggcggaggatctgaattcgacattcagatgacacagagccctagcagcctgagcgcctctgtgggagacagagtgaccatcacatgcaagagcagccagagcgtgctgtactccagcaatcagaagaactacctggcctggttccagcagaagcctggcaaggctcctaagctgctgatctactgggccagcaccagagaaagcggcgtgccaagcagattttctggcagcggctctggcaccgacttcaccctgacaatatccagcctccagcctgaggacttcgccacctacttttgccaccagtacctgagcagctacacattcggacagggcaccaaggtggaaatcaagcggctcgaggacctgaagaacgtgttcccacctgaggtggccgtgttcgagcctagcgaggccgagatcagccacacccagaaagccaccctcgtgtgcctggctaccggcttctaccccgaccatgtggaactgtcttggtgggtcaacggcaaagaggtgcacagcggcgtgtctaccgacccccagccactgaaagaacagcccgccctgaacgacagccggtactgcctgagcagcagactgagagtgtccgccaccttctggcagaacccccggaaccacttcagatgccaggtgcagttctacggcctgagcgagaacgacgagtggacccaggacagagccaagcccgtgacccagatcgtgtctgccgaagcctggggcagagccgattgcggatcccagagcttcggcctgctggaccccaagctgtgctacctgctggatggcatcctgttcatctacggcgtgatcctgaccgccctgttcctgagagtgaagttcagcagaagcgccgacgcccctgcctaccagcagggacagaaccaactgtacaacgagctgaacctgggcagacgggaagagtacgacgtgctggacaagcggagaggcagggaccctgagatgggcggaaagccccagcggagaaagaacccccaggaaggactgtataacgaactccagaaagacaagatggccgaagcctacagcgagatcggcatgaagggcgagcggagaagaggcaagggccacgatggcctgtaccagggcctgagcaccgccaccaaggacacctatgacgccctgcacatgcaggccctgcctccaagaagggccaagcgatctggatctggagcaacaaacttctcactactcaaacaagcaggtgacgtggaggagaatcccgggcctactagtatggactggatttggcgcatccttttccttgtcggcgctgctaccggcgcgcattccgggccccagctccagctgcaagagtctggacctggcctggtcaagcctagcgagacactgagcctgacctgtaccgtgtccggcgatagcatcagcagcggcgattactactggggctggatcagacagcctcctggcaaaggactggaatggatcggccacatctactacagcggcgtgacctactacaaccccagcctgaagtccagagtgaccatcagcgtggacaccagccggaaccagttctccctgaagctgtctagcgtgacagccgccgataccgccgtgtactactgcaccagagaggacagcagcaactggcggagtagaggccagggaacactggtcacagttagctctggatccggcggaggcggaagtggaggcggaggatctggcggcggaggctctttcgaagaggtgcagctggttgaatctggcggaggactggttcagcctggcggatctctgagactgtcttgtgccgccagcggctacaccttcaccacctattggatgcactgggtccgacaggcccctggcaaaggacttgagtgggtcggatatatcaggcccagcaccggctacacagagtacaaccagaagttcaaggaccgcttcaccatcagcgccgacaccagcaagaataccgcctacctccagatgaacagcctgagagccgaggacaccgccgtgtactactgtgccagatccagatggctgctggactattggggccagggcacactggttacagtttctacgcgtatccagaaccctgatcctgccgtgtaccagctgcgggatagcaagagcagcgacaagagcgtgtgtctgttcaccgacttcgacagccagaccaacgtgtcccagagcaaggactccgacgtgtacatcaccgataagaccgtgctggacatgcggagcatggacttcaagagcaactccgccgtggcctggtccaacaagtccgatttcgcctgcgccaacgccttcaacaacagcattatccccgaggacacattcttcccaagccccgagagcagctgcggtacccagagttttgggttgttggaccctaaattgtgctatctgttggacggaatcctgttcatttacggagtgatcctgaccgcattgttcctgcgggttaagttttccagatccgcagacgcacccgcttaccaacaagggcagaaccaactctacaatgaacttaatttggggcggagggaagagtacgacgttctggacaaaaggaggggacgagatcccgagatgggcggaaagcctcagcgaaggaagaatccgcaagaggggctttataacgaactccagaaagataaaatggcagaagcctatagtgagattgggatgaagggagaaaggaggaggggtaaaggtcacgatgggttgtaccaaggattgagcacagccactaaagatacctatgatgcgctccacatgcaggccctgccgccaaga

SEQ ID NO: 2838 - DNA, 3258 bp, Artificial Sequence
  Synthetic Polynucloetide
atggccttaccagtgaccgccttgctcctgccgctggccttgctgctccacgccgccaggccggaagtgcagctggttgaatctggcggaggactggttcagcctggcggatctctgagactgtcttgtgccgccagcggcttcagcttcagcgacttttggatgagctgggtccgacaggcccctggcaaaggacttgaatgggtcgccacaatcagccaggccggcagcgagaaggactacgtggactctgtgaagggcagattcaccatcagccgggacaacgccaagaagtccctgtacctccagatgaacagcctgagagccgaggacaccgccgtgtactattgtgcctctggcgtgtacagcttcgactacagaggccagggcaccctggtcacagtctcttctggtaccggcggaggcggatctggcggcggaggtagcggtggcggaggatctgaattcgacatccagatgacacagagccctagcagcctgtctgccagcgtgggagacagagtgaccatcacctgtagagccagccaggacatcagcaactacctgaactggtatcagcagaagcccggcaaggcccctaagctgctgatctactacaccagcagactgcacagcggcgtgcccagcagattttctggctctggcagcggcaccgacttcaccctgacaatatctagcctccagcctgaggacttcgccacctactattgccagcagggcaacaccctgccttacacatttggacagggcaccaaggtggaaatcaagagactcgaggacctgaagaacgtgttcccacctgaggtggccgtgttcgagcctagcgaggccgagatcagccacacccagaaagccaccctcgtgtgcctggctaccggcttctaccccgaccatgtggaactgtcttggtgggtcaacggcaaagaggtgcacagcggcgtgtctaccgacccccagccactgaaagaacagcccgccctgaacgacagccggtactgcctgagcagcagactgagagtgtccgccaccttctggcagaacccccggaaccacttcagatgccaggtgcagttctacggcctgagcgagaacgacgagtggacccaggacagagccaagcccgtgacccagatcgtgtctgccgaagcctggggcagagccgattgcggatcccagagcttcggcctgctggaccccaagctgtgctacctgctggatggcatcctgttcatctacggcgtgatcctgaccgccctgttcctgagagtgaagttcagcagaagcgccgacgcccctgcctaccagcagggacagaaccaactgtacaacgagctgaacctgggcagacgggaagagtacgacgtgctggacaagcggagaggcagggaccctgagatgggcggaaagccccagcggagaaagaacccccaggaaggactgtataacgaactccagaaagacaagatggccgaagcctacagcgagatcggcatgaagggcgagcggagaagaggcaagggccacgatggcctgtaccagggcctgagcaccgccaccaaggacacctatgacgccctgcacatgcaggccctgcctccaagaagggccaagcgatctggatctggagcaacaaacttctcactactcaaacaagcaggtgacgtggaggagaatcccgggcctactagtatggactggatttggcgcatccttttccttgtcggcgctgctaccggcgcgcattccgggccccagctccagctgcaagagtctggacctggcctggtcaagcctagcgagacactgagcctgacctgtaccgtgtccggcgatagcatcagcagcggcgattactactggggctggatcagacagcctcctggcaaaggactggaatggatcggccacatctactacagcggcgtgacctactacaaccccagcctgaagtccagagtgaccatcagcgtggacaccagccggaaccagttctccctgaagctgtctagcgtgacagccgccgataccgccgtgtactactgcaccagagaggacagcagcaactggcggagtagaggccagggaacactggtcacagttagctctggatccggcggaggcggaagtggaggcggaggatctggcggcggaggctctttcgaagaagtgcagctggttgaatcaggtggcggcctggttcaacctggcggatctctgagactgagctgtgccgccagcggcttcaccttcagcgactactttatgagctgggtccgacaggcccctggcaaaggacttgaatgggtcgccaccatcagcaatggcggcacctacacttactaccccgacagcgtgaagggcagattcaccatctccagagacaacagcaagaacaccctgtacctccagatgaactccctgagagccgaggacaccgccgtgtactactgcgccagattcgacggctacatcttcgactattggggccagggcaccctggtcacagtctcttctacgcgtatccagaaccctgatcctgccgtgtaccagctgcgggatagcaagagcagcgacaagagcgtgtgtctgttcaccgacttcgacagccagaccaacgtgtcccagagcaaggactccgacgtgtacatcaccgataagaccgtgctggacatgcggagcatggacttcaagagcaactccgccgtggcctggtccaacaagtccgatttcgcctgcgccaacgccttcaacaacagcattatccccgaggacacattcttcccaagccccgagagcagctgcggtacccagagttttgggttgttggaccctaaattgtgctatctgttggacggaatcctgttcatttacggagtgatcctgaccgcattgttcctgcgggttaagttttccagatccgcagacgcacccgcttaccaacaagggcagaaccaactctacaatgaacttaatttggggcggagggaagagtacgacgttctggacaaaaggaggggacgagatcccgagatgggcggaaagcctcagcgaaggaagaatccgcaagaggggctttataacgaactccagaaagataaaatggcagaagcctatagtgagattgggatgaagggagaaaggaggaggggtaaaggtcacgatgggttgtaccaaggattgagcacagccactaaagatacctatgatgcgctccacatgcaggccctgccgccaaga

SEQ ID NO: 2839 - DNA, 2340 bp, Artificial Sequence
  Synthetic Polynucloetide
atggccttaccagtgaccgccttgctcctgccgctggccttgctgctccacgccgccaggccggaagtgcagctggttgaatctggcggaggactggttcagcctggcggatctctgagactgtcttgtgccgccagcggcttcagcttcagcgacttttggatgagctgggtccgacaggcccctggcaaaggacttgaatgggtcgccacaatcagccaggccggcagcgagaaggactacgtggactctgtgaagggcagattcaccatcagccgggacaacgccaagaagtccctgtacctccagatgaacagcctgagagccgaggacaccgccgtgtactattgtgcctctggcgtgtacagcttcgactacagaggccagggcaccctggtcacagtctcttctggtaccggcggaggcggatctggcggcggaggtagcggtggcggaggatctgaattcgacatccagatgacacagactacatcctccctgtctgcctctctgggagacagagtcaccatcagttgcagggcaagtcaggacattagtaagtacctgaactggtatcagcagaaaccagatggaactgttaaactcctgatctaccatacatcaagattacactcaggagtcccatcaaggttcagtggcagtgggtctggaacagattattctctcaccattagcaacctggagcaagaagatattgccacttacttttgccaacagggtaatacgcttccgtacacgttcggaggggggaccaagctggagatcacactcgagggacagcctaaggccaatcctaccgtgacactgttccctccaagcagcgaagaactccaggccaacaaggccacacttgtgtgcctgatctccgacttctaccctggggctgtgacagtggcttggaaggccgatggatctcctgtgaaagccggcgtggaaaccaccaagccatccaagcagagcaacaacaaatacgccgccagctcctacctgagcctgacacctgagcagtggaagtcccacagatcctacagctgccaagtgacccacgaaggcagcaccgtggaaaagacagtggcccctacagagtgcagccccatcaagaccgatgtgattacaatggaccccaaggacaactgctccaaggacgccaacgataccctgctgctccagctgaccaacaccagcgcctactacatgtacttgttgctgctgctgaagtccgtggtgtacttcgccatcatcacatgctgcctgctgcggagaaccgccttctgctgcaacggcgagaagtctagggccaagcgatctggatctggagcaacaaacttctcactactcaaacaagcaggtgacgtggaggagaatcccgggcctactagtatggactggatttggcgcatccttttccttgtcggcgctgctaccggcgcgcattccttcgaagtgaaactgcaggagtcaggacctggcctggtggcgccctcacagagcctgtccgtcacatgcactgtctcaggggtctcattacccgactatggtgtaagctggattcgccagcctccacgaaagggtctggagtggctgggagtaatatggggtagtgaaaccacatactataattcagctctcaaatccagactgaccatcatcaaggacaactccaagagccaagttttcttaaaaatgaacagtctgcaaactgatgacacagccatttactactgtgccaaacattattactacggtggtagctatgctatggactactggggccaaggaacctcagtcaccgtctcctcaacgcgtgcctctacaaagggaccctccgtgtttcctctggctcccagcagcaagtctacaagcggaggaacagccgctctgggctgcctggtcaaggattactttcccgagcctgtgaccgtgtcctggaatagcggagcactgacaagcggcgtgcacacctttccagccgtgctgcaaagcagcggcctgtactctctgagcagcgtggtcacagtgcctagctctagcctgggcacccagacctacatctgcaatgtgaaccacaagcctagcaacaccaaggtggacaagagagtggaacccaagagctgtgaagtgaaaaccgactccaccgaccacgtgaagcccaaagagacagagaacaccaagcagcccagcaagagctgccacaagcccaaggccatcgtgcacaccgagaaagtgaacatgatgagcctgaccgtgctgggcctgcggatgctgttcgccaaaaccgtggccgtgaacttcctgctgaccgccaagctgttcttcctc

SEQ ID NO: 2840 - DNA, 2343 bp, Artificial Sequence
  Synthetic Polynucloetide
atggccttaccagtgaccgccttgctcctgccgctggccttgctgctccacgccgccaggccggaagtgcagctggttgaatctggcggaggactggttcagcctggcggatctctgagactgtcttgtgccgccagcggcttcagcttcagcgacttttggatgagctgggtccgacaggcccctggcaaaggacttgaatgggtcgccacaatcagccaggccggcagcgagaaggactacgtggactctgtgaagggcagattcaccatcagccgggacaacgccaagaagtccctgtacctccagatgaacagcctgagagccgaggacaccgccgtgtactattgtgcctctggcgtgtacagcttcgactacagaggccagggcaccctggtcacagtctcttctggtaccggcggaggcggatctggcggcggaggtagcggtggcggaggatctgaattcgagatcgtgatgacccagagccctgccaccctgtctctgagccctggcgaaagagccaccctgagctgtagagccagccaggacatcagcaagtacctgaactggtatcagcagaagcccggccaggcccccagactgctgatctaccacaccagcagactgcacagcggcatccccgccagattttctggctctggcagcggcaccgactacaccctgacaatcagcagcctccagcccgaggacttcgccgtgtacttctgtcagcaaggcaacaccctgccctacaccttcggccagggcaccaagctggaaatcaagctcgagggacagcctaaggccaatcctaccgtgacactgttccctccaagcagcgaagaactccaggccaacaaggccacacttgtgtgcctgatctccgacttctaccctggggctgtgacagtggcttggaaggccgatggatctcctgtgaaagccggcgtggaaaccaccaagccatccaagcagagcaacaacaaatacgccgccagctcctacctgagcctgacacctgagcagtggaagtcccacagatcctacagctgccaagtgacccacgaaggcagcaccgtggaaaagacagtggcccctacagagtgcagccccatcaagaccgatgtgattacaatggaccccaaggacaactgctccaaggacgccaacgataccctgctgctccagctgaccaacaccagcgcctactacatgtacttgttgctgctgctgaagtccgtggtgtacttcgccatcatcacatgctgcctgctgcggagaaccgccttctgctgcaacggcgagaagtctagggccaagcgatctggatctggagcaacaaacttctcactactcaaacaagcaggtgacgtggaggagaatcccgggcctactagtatggactggatttggcgcatccttttccttgtcggcgctgctaccggcgcgcattccttcgaacaggtgcaactccaggaatctggccctggcctcgtgaagcccagcgagacactgagcctgacctgtaccgtgtccggcgtgtccctgcctgactatggcgtgtcctggatcagacagccccctggcaagggcctggaatggatcggagtgatttggggcagcgaaaccacctactacaacagctccctgaagtccagagtgaccatctccaaggacaactccaagaaccaggtgtccctgaagctgagcagcgtgacagccgccgacaccgccgtgtattactgcgccaagcactactactacggcggcagctacgctatggactactggggccagggaaccctcgtgaccgtgtctagtacgcgtgcctctacaaagggaccctccgtgtttcctctggctcccagcagcaagtctacaagcggaggaacagccgctctgggctgcctggtcaaggattactttcccgagcctgtgaccgtgtcctggaatagcggagcactgacaagcggcgtgcacacctttccagccgtgctgcaaagcagcggcctgtactctctgagcagcgtggtcacagtgcctagctctagcctgggcacccagacctacatctgcaatgtgaaccacaagcctagcaacaccaaggtggacaagagagtggaacccaagagctgtgaagtgaaaaccgactccaccgaccacgtgaagcccaaagagacagagaacaccaagcagcccagcaagagctgccacaagcccaaggccatcgtgcacaccgagaaagtgaacatgatgagcctgaccgtgctgggcctgcggatgctgttcgccaaaaccgtggccgtgaacttcctgctgaccgccaagctgttcttcctc

SEQ ID NO: 2841 - DNA, 2346 bp, Artificial Sequence
  Synthetic Polynucloetide
atggccttaccagtgaccgccttgctcctgccgctggccttgctgctccacgccgccaggccggaagtgcagctggttgaatctggcggaggactggttcagcctggcggatctctgagactgtcttgtgccgccagcggcttcagcttcagcgacttttggatgagctgggtccgacaggcccctggcaaaggacttgaatgggtcgccacaatcagccaggccggcagcgagaaggactacgtggactctgtgaagggcagattcaccatcagccgggacaacgccaagaagtccctgtacctccagatgaacagcctgagagccgaggacaccgccgtgtactattgtgcctctggcgtgtacagcttcgactacagaggccagggcaccctggtcacagtctcttctggtaccggcggaggcggatctggcggcggaggtagcggtggcggaggatctgaattcgacgagatcgtgctgacacagagccccgccaccctgtcactgtctccaggcgaaagagccaccctgagctgtagcgccagcagcagcgtgtcctacatgcactggtatcagcagaagcccggccaggcccccagactgctgatctacgataccagcaagctggcctccggcatccccgccagattttctggcagcggctccggcaccgacttcaccctgacaatcagcagcctggaacccgaggacgtggccgtgtactactgttttcaaggcagcgtgtaccccttcaccttcggccagggcaccaagctggaaatcaagagactcgagggacagcctaaggccaatcctaccgtgacactgttccctccaagcagcgaagaactccaggccaacaaggccacacttgtgtgcctgatctccgacttctaccctggggctgtgacagtggcttggaaggccgatggatctcctgtgaaagccggcgtggaaaccaccaagccatccaagcagagcaacaacaaatacgccgccagctcctacctgagcctgacacctgagcagtggaagtcccacagatcctacagctgccaagtgacccacgaaggcagcaccgtggaaaagacagtggcccctacagagtgcagccccatcaagaccgatgtgattacaatggaccccaaggacaactgctccaaggacgccaacgataccctgctgctccagctgaccaacaccagcgcctactacatgtacttgttgctgctgctgaagtccgtggtgtacttcgccatcatcacatgctgcctgctgcggagaaccgccttctgctgcaacggcgagaagtctagggccaagcgatctggatctggagcaacaaacttctcactactcaaacaagcaggtgacgtggaggagaatcccgggcctactagtatggactggatttggcgcatccttttccttgtcggcgctgctaccggcgcgcattccttcgaacaggtgcagctccaggaatctggccctggcctcgtgaagcctagccagaccctgagcctgacctgtaccgtgtctggcggcagcatcagcacaagcggcatgggcgtgggctggatcagacagcaccctggcaagggcctggaatggatcggccacatttggtgggacgacgacaagcggtacaaccccgccctgaagtccagagtgaccatcagcgtggacaccagcaagaaccagttcagcctgaagctgagcagcgtgacagccgccgataccgccgtgtattattgcgcccggatggaactgtggtcctactacttcgactactggggccagggaaccctcgtgaccgtgtctagtacgcgtgcctctacaaagggaccctccgtgtttcctctggctcccagcagcaagtctacaagcggaggaacagccgctctgggctgcctggtcaaggattactttcccgagcctgtgaccgtgtcctggaatagcggagcactgacaagcggcgtgcacacctttccagccgtgctgcaaagcagcggcctgtactctctgagcagcgtggtcacagtgcctagctctagcctgggcacccagacctacatctgcaatgtgaaccacaagcctagcaacaccaaggtggacaagagagtggaacccaagagctgtgaagtgaaaaccgactccaccgaccacgtgaagcccaaagagacagagaacaccaagcagcccagcaagagctgccacaagcccaaggccatcgtgcacaccgagaaagtgaacatgatgagcctgaccgtgctgggcctgcggatgctgttcgccaaaaccgtggccgtgaacttcctgctgaccgccaagctgttcttcctc

SEQ ID NO: 2842 - DNA, 2340 bp, Artificial Sequence
  Synthetic Polynucloetide
atggccttaccagtgaccgccttgctcctgccgctggccttgctgctccacgccgccaggccggaagtgcagctggttgaatctggcggaggactggttcagcctggcggatctctgagactgtcttgtgccgccagcggcttcagcttcagcgacttttggatgagctgggtccgacaggcccctggcaaaggacttgaatgggtcgccacaatcagccaggccggcagcgagaaggactacgtggactctgtgaagggcagattcaccatcagccgggacaacgccaagaagtccctgtacctccagatgaacagcctgagagccgaggacaccgccgtgtactattgtgcctctggcgtgtacagcttcgactacagaggccagggcaccctggtcacagtctcttctggtaccggcggaggcggatctggcggcggaggtagcggtggcggaggatctgaattcgactacatccacgtgacacagagccctagcagcctgtccgtgtccatcggcgatagagtgaccatcaactgccagacctctcaaggcgtgggcagcgacctgcactggtatcagcacaaacctggcagagcccctaagctgctgatccaccatgccagctctgtggaagatggcgtgcccagcagattttccggcaccggatttcacaccagcttcaacctgacaatcaacgacctccaggccgacgacatcggcacctactactgtcaagtgctccagagcttcggcagaggcagcagactggatacaaaactcgagggacagcctaaggccaatcctaccgtgacactgttccctccaagcagcgaagaactccaggccaacaaggccacacttgtgtgcctgatctccgacttctaccctggggctgtgacagtggcttggaaggccgatggatctcctgtgaaagccggcgtggaaaccaccaagccatccaagcagagcaacaacaaatacgccgccagctcctacctgagcctgacacctgagcagtggaagtcccacagatcctacagctgccaagtgacccacgaaggcagcaccgtggaaaagacagtggcccctacagagtgcagccccatcaagaccgatgtgattacaatggaccccaaggacaactgctccaaggacgccaacgataccctgctgctccagctgaccaacaccagcgcctactacatgtacttgttgctgctgctgaagtccgtggtgtacttcgccatcatcacatgctgcctgctgcggagaaccgccttctgctgcaacggcgagaagtctagggccaagcgatctggatctggagcaacaaacttctcactactcaaacaagcaggtgacgtggaggagaatcccgggcctactagtatggactggatttggcgcatccttttccttgtcggcgctgctaccggcgcgcattccttcgaaagggcacacctggtgcagtctggcaccgccatgaagaaacctggcgcttccgtcagagtgtcctgtcagacaagcggctacaccttcacagcccacatcctgttctggttcagacaggccccaggcagaggactggaatgggtcggatggatcaagccccagtacggggccgtgaatttcggcggaggcttcagagacagagtgaccctgaccagggacgtgtaccgggaaatcgcctacatggacatccggggcctgaagcctgatgacaccgccgtgtactactgcgccagggatagaagctacggcgacagctcttgggctctcgatgcttggggacagggcacaacagtggtggtgtctgctacgcgtgcctctacaaagggaccctccgtgtttcctctggctcccagcagcaagtctacaagcggaggaacagccgctctgggctgcctggtcaaggattactttcccgagcctgtgaccgtgtcctggaatagcggagcactgacaagcggcgtgcacacctttccagccgtgctgcaaagcagcggcctgtactctctgagcagcgtggtcacagtgcctagctctagcctgggcacccagacctacatctgcaatgtgaaccacaagcctagcaacaccaaggtggacaagagagtggaacccaagagctgtgaagtgaaaaccgactccaccgaccacgtgaagcccaaagagacagagaacaccaagcagcccagcaagagctgccacaagcccaaggccatcgtgcacaccgagaaagtgaacatgatgagcctgaccgtgctgggcctgcggatgctgttcgccaaaaccgtggccgtgaacttcctgctgaccgccaagctgttcttcctc

SEQ ID NO: 2843 - DNA, 2370 bp, Artificial Sequence
  Synthetic Polynucloetide
atggccttaccagtgaccgccttgctcctgccgctggccttgctgctccacgccgccaggccggaagtgcagctggttgaatctggcggaggactggttcagcctggcggatctctgagactgtcttgtgccgccagcggcttcagcttcagcgacttttggatgagctgggtccgacaggcccctggcaaaggacttgaatgggtcgccacaatcagccaggccggcagcgagaaggactacgtggactctgtgaagggcagattcaccatcagccgggacaacgccaagaagtccctgtacctccagatgaacagcctgagagccgaggacaccgccgtgtactattgtgcctctggcgtgtacagcttcgactacagaggccagggcaccctggtcacagtctcttctggtaccggcggaggcggatctggcggcggaggtagcggtggcggaggatctgaattcgacgtgcagatgatccagacccccgatagcctggccgtgtccctgggacagagagccaccatctcttgcagagccagcgagagcgtggacaactacggcatcagcttcatgcactggtatcagcagaagcccggccagagccccaagctgctgatctacagagcctccaacctggaaagcggcatccccgccagattttccggcagcggcagcagaaccgacttcaccctgaccatcaaccccgtggaaaccgacgacgtggcaacctactactgccagcagaacaacaaggacccccccacctttggcggaggcaccaagctggaaatcaagctcgagggacagcctaaggccaatcctaccgtgacactgttccctccaagcagcgaagaactccaggccaacaaggccacacttgtgtgcctgatctccgacttctaccctggggctgtgacagtggcttggaaggccgatggatctcctgtgaaagccggcgtggaaaccaccaagccatccaagcagagcaacaacaaatacgccgccagctcctacctgagcctgacacctgagcagtggaagtcccacagatcctacagctgccaagtgacccacgaaggcagcaccgtggaaaagacagtggcccctacagagtgcagccccatcaagaccgatgtgattacaatggaccccaaggacaactgctccaaggacgccaacgataccctgctgctccagctgaccaacaccagcgcctactacatgtacttgttgctgctgctgaagtccgtggtgtacttcgccatcatcacatgctgcctgctgcggagaaccgccttctgctgcaacggcgagaagtctagggccaagcgatctggatctggagcaacaaacttctcactactcaaacaagcaggtgacgtggaggagaatcccgggcctactagtatggactggatttggcgcatccttttccttgtcggcgctgctaccggcgcgcattccttcgaagggggaggcggctctcaggtgcaactccagcagtctggcgctgagcttgtgaagcctggggccagcgtgaagattagctgcaaggccagcggctacgccttcagcagctactggatgaactgggtcaagcagcggcctggcaagggcctggaatggatcggccaaatctaccccggcgacggcgacaccacctacaacggcaagttcaagggcaaggccaccctgacagccgacaagagcagcagcaccgtgtacatgcaactgaacagcctgaccagcgaggacagcgccgtgtacttctgcgtgcggtactactacggcagctccggctacttcgactattggggccagggcaccacactgaccgtgtcctctacgcgtgcctctacaaagggaccctccgtgtttcctctggctcccagcagcaagtctacaagcggaggaacagccgctctgggctgcctggtcaaggattactttcccgagcctgtgaccgtgtcctggaatagcggagcactgacaagcggcgtgcacacctttccagccgtgctgcaaagcagcggcctgtactctctgagcagcgtggtcacagtgcctagctctagcctgggcacccagacctacatctgcaatgtgaaccacaagcctagcaacaccaaggtggacaagagagtggaacccaagagctgtgaagtgaaaaccgactccaccgaccacgtgaagcccaaagagacagagaacaccaagcagcccagcaagagctgccacaagcccaaggccatcgtgcacaccgagaaagtgaacatgatgagcctgaccgtgctgggcctgcggatgctgttcgccaaaaccgtggccgtgaacttcctgctgaccgccaagctgttcttcctc

SEQ ID NO: 2844 - DNA, 2343 bp, Artificial Sequence
  Synthetic Polynucloetide
atggccttaccagtgaccgccttgctcctgccgctggccttgctgctccacgccgccaggccggaagtgcagctggttgaatctggcggaggactggttcagcctggcggatctctgagactgtcttgtgccgccagcggcttcagcttcagcgacttttggatgagctgggtccgacaggcccctggcaaaggacttgaatgggtcgccacaatcagccaggccggcagcgagaaggactacgtggactctgtgaagggcagattcaccatcagccgggacaacgccaagaagtccctgtacctccagatgaacagcctgagagccgaggacaccgccgtgtactattgtgcctctggcgtgtacagcttcgactacagaggccagggcaccctggtcacagtctcttctggtaccggcggaggcggatctggcggcggaggtagcggtggcggaggatctgaattcgacgtgcagatgatccagacccccagcagcctgtctgccagcctgggcgatagagtgaccatcagctgtcgggccagccaggacatcggcaactacctgaactggtatcagcagaaacccgacggcaccgtgaagctgctgatctactacaccagcagactgcacagcggcgtgcccagcagattttctggcagcggctctggcaccgagtacagcctgaccatctccaacctggaacaggaagatattgctacctacttctgtcagcaaggcagcgccctgccccctacatttggcggcggaacaaagctggaaatcaacctcgagggacagcctaaggccaatcctaccgtgacactgttccctccaagcagcgaagaactccaggccaacaaggccacacttgtgtgcctgatctccgacttctaccctggggctgtgacagtggcttggaaggccgatggatctcctgtgaaagccggcgtggaaaccaccaagccatccaagcagagcaacaacaaatacgccgccagctcctacctgagcctgacacctgagcagtggaagtcccacagatcctacagctgccaagtgacccacgaaggcagcaccgtggaaaagacagtggcccctacagagtgcagccccatcaagaccgatgtgattacaatggaccccaaggacaactgctccaaggacgccaacgataccctgctgctccagctgaccaacaccagcgcctactacatgtacttgttgctgctgctgaagtccgtggtgtacttcgccatcatcacatgctgcctgctgcggagaaccgccttctgctgcaacggcgagaagtctagggccaagcgatctggatctggagcaacaaacttctcactactcaaacaagcaggtgacgtggaggagaatcccgggcctactagtatggactggatttggcgcatccttttccttgtcggcgctgctaccggcgcgcattccttcgaagctctccagctccagcagtctggcgcagaactcgtgcggcctggcgcttctgtgaccctgagctgtaaagccagcggctacaccttcaccgactacgagatgcactgggtcaagcagacccctgtgcacggcctggaatggatcggagccatcgaccctgagacaggcggcaccgcctacaaccagaagttcgagggcaaggccatcctgaccgccgacaagagcagcagcacagcctacatggaactgcggagcctgacctccgaggacagccccgtgtactactgtgccagacggcggtactacggcagcagctccttcgactattggggccagggcaccaccctgaccgtgtctagtacgcgtgcctctacaaagggaccctccgtgtttcctctggctcccagcagcaagtctacaagcggaggaacagccgctctgggctgcctggtcaaggattactttcccgagcctgtgaccgtgtcctggaatagcggagcactgacaagcggcgtgcacacctttccagccgtgctgcaaagcagcggcctgtactctctgagcagcgtggtcacagtgcctagctctagcctgggcacccagacctacatctgcaatgtgaaccacaagcctagcaacaccaaggtggacaagagagtggaacccaagagctgtgaagtgaaaaccgactccaccgaccacgtgaagcccaaagagacagagaacaccaagcagcccagcaagagctgccacaagcccaaggccatcgtgcacaccgagaaagtgaacatgatgagcctgaccgtgctgggcctgcggatgctgttcgccaaaaccgtggccgtgaacttcctgctgaccgccaagctgttcttcctc

SEQ ID NO: 2845 - DNA, 2355 bp, Artificial Sequence
  Synthetic Polynucloetide
atggccttaccagtgaccgccttgctcctgccgctggccttgctgctccacgccgccaggccggaagtgcagctggttgaatctggcggaggactggttcagcctggcggatctctgagactgtcttgtgccgccagcggcttcagcttcagcgacttttggatgagctgggtccgacaggcccctggcaaaggacttgaatgggtcgccacaatcagccaggccggcagcgagaaggactacgtggactctgtgaagggcagattcaccatcagccgggacaacgccaagaagtccctgtacctccagatgaacagcctgagagccgaggacaccgccgtgtactattgtgcctctggcgtgtacagcttcgactacagaggccagggcaccctggtcacagtctcttctggtaccggcggaggcggatctggcggcggaggtagcggtggcggaggatctgaattcgacatcgtcctgacccagtccccagccagcctggcggtgtccctgggtcaacgagctaccatttcctgcagagcctctaagtccgtatccacttccggctatagttacctgcattggtaccaacagaaaccagggcagccacccaagctgctcatctatctggcctcaaacctggagtccggcgtgcccgccagattctccggaagtgggagcggcaccgactttacattgaacatccacccagtcgaagaggaagatgctgccacttattactgtcagcactccagggagctgccatttacatttggctctggcacaaaactggagatcaaactcgagggacagcctaaggccaatcctaccgtgacactgttccctccaagcagcgaagaactccaggccaacaaggccacacttgtgtgcctgatctccgacttctaccctggggctgtgacagtggcttggaaggccgatggatctcctgtgaaagccggcgtggaaaccaccaagccatccaagcagagcaacaacaaatacgccgccagctcctacctgagcctgacacctgagcagtggaagtcccacagatcctacagctgccaagtgacccacgaaggcagcaccgtggaaaagacagtggcccctacagagtgcagccccatcaagaccgatgtgattacaatggaccccaaggacaactgctccaaggacgccaacgataccctgctgctccagctgaccaacaccagcgcctactacatgtacttgttgctgctgctgaagtccgtggtgtacttcgccatcatcacatgctgcctgctgcggagaaccgccttctgctgcaacggcgagaagtctagggccaagcgatctggatctggagcaacaaacttctcactactcaaacaagcaggtgacgtggaggagaatcccgggcctactagtatggactggatttggcgcatccttttccttgtcggcgctgctaccggcgcgcattccttcgaacaggttcagctggtcgagtccgggggaggtctggtacagccgggtggcagcctcaagctgtcatgtgccgcatctggttttgactttagcaggtattggatgagctgggtccgccaggccccgggcaagggacttgagtggattggagaaataaaccctacttccagcacaatcaacttcacaccttctttgaaagataaggtttttatctctcgggataacgctaaaaacacactgtacttgcagatgtctaaggtgcgaagcgaagacaccgccctctattattgcgcccggggtaattactaccgctatggggatgcgatggactattgggggcaaggtacctccgtcacggtctcaacgcgtgcctctacaaagggaccctccgtgtttcctctggctcccagcagcaagtctacaagcggaggaacagccgctctgggctgcctggtcaaggattactttcccgagcctgtgaccgtgtcctggaatagcggagcactgacaagcggcgtgcacacctttccagccgtgctgcaaagcagcggcctgtactctctgagcagcgtggtcacagtgcctagctctagcctgggcacccagacctacatctgcaatgtgaaccacaagcctagcaacaccaaggtggacaagagagtggaacccaagagctgtgaagtgaaaaccgactccaccgaccacgtgaagcccaaagagacagagaacaccaagcagcccagcaagagctgccacaagcccaaggccatcgtgcacaccgagaaagtgaacatgatgagcctgaccgtgctgggcctgcggatgctgttcgccaaaaccgtggccgtgaacttcctgctgaccgccaagctgttcttcctc

SEQ ID NO: 2846 - DNA, 2349 bp, Artificial Sequence
  Synthetic Polynucloetide
atggccttaccagtgaccgccttgctcctgccgctggccttgctgctccacgccgccaggccggaagtgcagctggttgaatctggcggaggactggttcagcctggcggatctctgagactgtcttgtgccgccagcggcttcagcttcagcgacttttggatgagctgggtccgacaggcccctggcaaaggacttgaatgggtcgccacaatcagccaggccggcagcgagaaggactacgtggactctgtgaagggcagattcaccatcagccgggacaacgccaagaagtccctgtacctccagatgaacagcctgagagccgaggacaccgccgtgtactattgtgcctctggcgtgtacagcttcgactacagaggccagggcaccctggtcacagtctcttctggtaccggcggaggcggatctggcggcggaggtagcggtggcggaggatctgaattcgacatccagatgacccagagccctagctcactgagcgccagcgtgggcgacagggtgaccattacctgctccgccagccaggacatcagcaactacctgaactggtaccagcagaagcccggcaaggcccccaagctgctgatctactacacctccaacctgcactccggcgtgcccagcaggttcagcggaagcggcagcggcaccgatttcaccctgaccatctccagcctgcagcccgaggacttcgccacctactactgccagcagtacaggaagctcccctggactttcggccagggcaccaaactggagatcaagcgtctcgagggacagcctaaggccaatcctaccgtgacactgttccctccaagcagcgaagaactccaggccaacaaggccacacttgtgtgcctgatctccgacttctaccctggggctgtgacagtggcttggaaggccgatggatctcctgtgaaagccggcgtggaaaccaccaagccatccaagcagagcaacaacaaatacgccgccagctcctacctgagcctgacacctgagcagtggaagtcccacagatcctacagctgccaagtgacccacgaaggcagcaccgtggaaaagacagtggcccctacagagtgcagccccatcaagaccgatgtgattacaatggaccccaaggacaactgctccaaggacgccaacgataccctgctgctccagctgaccaacaccagcgcctactacatgtacttgttgctgctgctgaagtccgtggtgtacttcgccatcatcacatgctgcctgctgcggagaaccgccttctgctgcaacggcgagaagtctagggccaagcgatctggatctggagcaacaaacttctcactactcaaacaagcaggtgacgtggaggagaatcccgggcctactagtatggactggatttggcgcatccttttccttgtcggcgctgctaccggcgcgcattccttcgaacaggtgcagctggtccagagcggcgccgaagtgaagaagcccggcagctccgtgaaagtgagctgcaaggccagcggcggcaccttcagcaactactggatgcactgggtgaggcaggcccccggacagggcctggagtggatgggcgccacctacaggggccacagcgacacctactacaaccagaagttcaagggccgggtgaccatcaccgccgacaagagcaccagcaccgcctacatggaactgagcagcctcaggagcgaggacaccgctgtgtattactgcgccaggggcgccatctacgacggctacgacgtgctggacaactggggccagggcacactggtgaccgtgtccagcacgcgtgcctctacaaagggaccctccgtgtttcctctggctcccagcagcaagtctacaagcggaggaacagccgctctgggctgcctggtcaaggattactttcccgagcctgtgaccgtgtcctggaatagcggagcactgacaagcggcgtgcacacctttccagccgtgctgcaaagcagcggcctgtactctctgagcagcgtggtcacagtgcctagctctagcctgggcacccagacctacatctgcaatgtgaaccacaagcctagcaacaccaaggtggacaagagagtggaacccaagagctgtgaagtgaaaaccgactccaccgaccacgtgaagcccaaagagacagagaacaccaagcagcccagcaagagctgccacaagcccaaggccatcgtgcacaccgagaaagtgaacatgatgagcctgaccgtgctgggcctgcggatgctgttcgccaaaaccgtggccgtgaacttcctgctgaccgccaagctgttcttcctc

SEQ ID NO: 2847 - DNA, 2349 bp, Artificial Sequence
  Synthetic Polynucloetide
atggccttaccagtgaccgccttgctcctgccgctggccttgctgctccacgccgccaggccggaagtgcagctggttgaatctggcggaggactggttcagcctggcggatctctgagactgtcttgtgccgccagcggcttcagcttcagcgacttttggatgagctgggtccgacaggcccctggcaaaggacttgaatgggtcgccacaatcagccaggccggcagcgagaaggactacgtggactctgtgaagggcagattcaccatcagccgggacaacgccaagaagtccctgtacctccagatgaacagcctgagagccgaggacaccgccgtgtactattgtgcctctggcgtgtacagcttcgactacagaggccagggcaccctggtcacagtctcttctggtaccggcggaggcggatctggcggcggaggtagcggtggcggaggatctgaattcgacatcgtgctgacacagagccctgccaccctgtctctgagccctggcgatagagccaccatcagctgtagagccagcgagagcgtgaccatcctgggcagccacctgatctactggtatcagcagaagcccggccagccccccagactgctgattcagctggcctccaatgtgcagaccggcgtgccagccagattttccggcagcggcagcagaaccgacttcaccctgaccatcagcagcgtggaacccgaggacttcgccgtgtactactgcctccagagccggaccatccccagaacattcggccagggcaccaagctggaaatcaagagactcgagggacagcctaaggccaatcctaccgtgacactgttccctccaagcagcgaagaactccaggccaacaaggccacacttgtgtgcctgatctccgacttctaccctggggctgtgacagtggcttggaaggccgatggatctcctgtgaaagccggcgtggaaaccaccaagccatccaagcagagcaacaacaaatacgccgccagctcctacctgagcctgacacctgagcagtggaagtcccacagatcctacagctgccaagtgacccacgaaggcagcaccgtggaaaagacagtggcccctacagagtgcagccccatcaagaccgatgtgattacaatggaccccaaggacaactgctccaaggacgccaacgataccctgctgctccagctgaccaacaccagcgcctactacatgtacttgttgctgctgctgaagtccgtggtgtacttcgccatcatcacatgctgcctgctgcggagaaccgccttctgctgcaacggcgagaagtctagggccaagcgatctggatctggagcaacaaacttctcactactcaaacaagcaggtgacgtggaggagaatcccgggcctactagtatggactggatttggcgcatccttttccttgtcggcgctgctaccggcgcgcattccttcgaacaggtgcagctggtgcagtctggccccgaagtgaagaaacccggcgagtccgtgaagatcagctgcaaggccagcggctacaccttccggcactacagcatgaactgggtcaagcaggccccaggccagggcctgaagtggatgggcagaatcaacaccgagagcggcgtgcccatctacgccgacgacttcaagggccggttcagcttcaccgtggacaccagcgccagcaccgcctacctggaaatctccagcctgaccagcgaggataccgccgtgtatttctgctccaacgactacctgtacagcctggatttctggggccagggaaccaccctgacagtgtcctctacgcgtgcctctacaaagggaccctccgtgtttcctctggctcccagcagcaagtctacaagcggaggaacagccgctctgggctgcctggtcaaggattactttcccgagcctgtgaccgtgtcctggaatagcggagcactgacaagcggcgtgcacacctttccagccgtgctgcaaagcagcggcctgtactctctgagcagcgtggtcacagtgcctagctctagcctgggcacccagacctacatctgcaatgtgaaccacaagcctagcaacaccaaggtggacaagagagtggaacccaagagctgtgaagtgaaaaccgactccaccgaccacgtgaagcccaaagagacagagaacaccaagcagcccagcaagagctgccacaagcccaaggccatcgtgcacaccgagaaagtgaacatgatgagcctgaccgtgctgggcctgcggatgctgttcgccaaaaccgtggccgtgaacttcctgctgaccgccaagctgttcttcctc

SEQ ID NO: 2848 - DNA, 2352 bp, Artificial Sequence
  Synthetic Polynucloetide
atggccttaccagtgaccgccttgctcctgccgctggccttgctgctccacgccgccaggccggaagtgcagctggttgaatctggcggaggactggttcagcctggcggatctctgagactgtcttgtgccgccagcggcttcagcttcagcgacttttggatgagctgggtccgacaggcccctggcaaaggacttgaatgggtcgccacaatcagccaggccggcagcgagaaggactacgtggactctgtgaagggcagattcaccatcagccgggacaacgccaagaagtccctgtacctccagatgaacagcctgagagccgaggacaccgccgtgtactattgtgcctctggcgtgtacagcttcgactacagaggccagggcaccctggtcacagtctcttctggtaccggcggaggcggatctggcggcggaggtagcggtggcggaggatctgaattccagtctgtgctgacacagcctcctagtgtgtctggcgctcctggacagagagtgaccatcagctgtacaggcagcagcagcaatatcggagccggctttgacgtgcactggtatcagcagctgcctggcacagcccctaaactgctgatctacggcaacagcaacagacccagcggcgtgcccgatagattttccggctctaagagcggcacaagcgccagcctggctattactggactccaggccgaggacgaggccgactactactgtcagagctacgacagcagcctgagcggctacgttttcggcaccggcaccaaagtgacagtgcttggtctcgagggacagcctaaggccaatcctaccgtgacactgttccctccaagcagcgaagaactccaggccaacaaggccacacttgtgtgcctgatctccgacttctaccctggggctgtgacagtggcttggaaggccgatggatctcctgtgaaagccggcgtggaaaccaccaagccatccaagcagagcaacaacaaatacgccgccagctcctacctgagcctgacacctgagcagtggaagtcccacagatcctacagctgccaagtgacccacgaaggcagcaccgtggaaaagacagtggcccctacagagtgcagccccatcaagaccgatgtgattacaatggaccccaaggacaactgctccaaggacgccaacgataccctgctgctccagctgaccaacaccagcgcctactacatgtacttgttgctgctgctgaagtccgtggtgtacttcgccatcatcacatgctgcctgctgcggagaaccgccttctgctgcaacggcgagaagtctagggccaagcgatctggatctggagcaacaaacttctcactactcaaacaagcaggtgacgtggaggagaatcccgggcctactagtatggactggatttggcgcatccttttccttgtcggcgctgctaccggcgcgcattccttcgaacaagttcagctggttcagagcggagccgaagtgaagaaacctggggcctctgtgaaggtgtcctgcaaggcttccggctacacctttaccgattactacatgcactgggtccgacaggctcccggccaaagacttgaatggatgggctggatcaaccccaacagcggcggcacaaattacgcccagaagttccaggaccggatcaccgtgaccagagacaccagctccaacaccggctacatggaactgacccggctgagatccgatgacaccgccgtgtactactgcgctagaagcccttactccggcgtgctggataagtggggacagggcacactggtcaccgtgtcatctacgcgtgcctctacaaagggaccctccgtgtttcctctggctcccagcagcaagtctacaagcggaggaacagccgctctgggctgcctggtcaaggattactttcccgagcctgtgaccgtgtcctggaatagcggagcactgacaagcggcgtgcacacctttccagccgtgctgcaaagcagcggcctgtactctctgagcagcgtggtcacagtgcctagctctagcctgggcacccagacctacatctgcaatgtgaaccacaagcctagcaacaccaaggtggacaagagagtggaacccaagagctgtgaagtgaaaaccgactccaccgaccacgtgaagcccaaagagacagagaacaccaagcagcccagcaagagctgccacaagcccaaggccatcgtgcacaccgagaaagtgaacatgatgagcctgaccgtgctgggcctgcggatgctgttcgccaaaaccgtggccgtgaacttcctgctgaccgccaagctgttcttcctc

SEQ ID NO: 2849 - DNA, 2343 bp, Artificial Sequence
  Synthetic Polynucloetide
atggccttaccagtgaccgccttgctcctgccgctggccttgctgctccacgccgccaggccggaagtgcagctggttgaatctggcggaggactggttcagcctggcggatctctgagactgtcttgtgccgccagcggcttcagcttcagcgacttttggatgagctgggtccgacaggcccctggcaaaggacttgaatgggtcgccacaatcagccaggccggcagcgagaaggactacgtggactctgtgaagggcagattcaccatcagccgggacaacgccaagaagtccctgtacctccagatgaacagcctgagagccgaggacaccgccgtgtactattgtgcctctggcgtgtacagcttcgactacagaggccagggcaccctggtcacagtctcttctggtaccggcggaggcggatctggcggcggaggtagcggtggcggaggatctgaattccaggctgttctgacacagcctccatctgcctctggcacacctggacagagagtgaccatctcctgtagcggcagcagcagcaacatcggcagctacaccgtgtcctggtatcagcagctccctggaacagcccctaagttcctgatctacagcaacaaccagcggcctagcggcgtgcccgatagattttctggcagcaagagcggcacaagcgccagcctggctatttctggactccagtctgaggacgaggccgactactattgtgccgcctgggacgatagcctgaacggctatgtgtttggcaccggcaccaaagtgacagtgcttggtctcgagggacagcctaaggccaatcctaccgtgacactgttccctccaagcagcgaagaactccaggccaacaaggccacacttgtgtgcctgatctccgacttctaccctggggctgtgacagtggcttggaaggccgatggatctcctgtgaaagccggcgtggaaaccaccaagccatccaagcagagcaacaacaaatacgccgccagctcctacctgagcctgacacctgagcagtggaagtcccacagatcctacagctgccaagtgacccacgaaggcagcaccgtggaaaagacagtggcccctacagagtgcagccccatcaagaccgatgtgattacaatggaccccaaggacaactgctccaaggacgccaacgataccctgctgctccagctgaccaacaccagcgcctactacatgtacttgttgctgctgctgaagtccgtggtgtacttcgccatcatcacatgctgcctgctgcggagaaccgccttctgctgcaacggcgagaagtctagggccaagcgatctggatctggagcaacaaacttctcactactcaaacaagcaggtgacgtggaggagaatcccgggcctactagtatggactggatttggcgcatccttttccttgtcggcgctgctaccggcgcgcattccttcgaagttcaactggttcagagcggagccgaagtgaagaagcctggcgagagcctgaagattagctgcaaaggcagcggctacgacttcaccacctactggatcggctgggtccgacagatgcctggcaaaggactggaatggatgggcatcatctaccccggcgacagcgacaccagatacagccctagcgttagaggccgcgtgaccatcagcgccgacaagtctatcaacaccgcctacctccagtggtccagcctggaagcctctgacaccgccatgtactactgcgccagaatgtggaccttcagccaggatggatggggccagggaacactggtcacagtgtcatctacgcgtgcctctacaaagggaccctccgtgtttcctctggctcccagcagcaagtctacaagcggaggaacagccgctctgggctgcctggtcaaggattactttcccgagcctgtgaccgtgtcctggaatagcggagcactgacaagcggcgtgcacacctttccagccgtgctgcaaagcagcggcctgtactctctgagcagcgtggtcacagtgcctagctctagcctgggcacccagacctacatctgcaatgtgaaccacaagcctagcaacaccaaggtggacaagagagtggaacccaagagctgtgaagtgaaaaccgactccaccgaccacgtgaagcccaaagagacagagaacaccaagcagcccagcaagagctgccacaagcccaaggccatcgtgcacaccgagaaagtgaacatgatgagcctgaccgtgctgggcctgcggatgctgttcgccaaaaccgtggccgtgaacttcctgctgaccgccaagctgttcttcctc

SEQ ID NO: 2850 - DNA, 2352 bp, Artificial Sequence
  Synthetic Polynucloetide
atggccttaccagtgaccgccttgctcctgccgctggccttgctgctccacgccgccaggccggaagtgcagctggttgaatctggcggaggactggttcagcctggcggatctctgagactgtcttgtgccgccagcggcttcagcttcagcgacttttggatgagctgggtccgacaggcccctggcaaaggacttgaatgggtcgccacaatcagccaggccggcagcgagaaggactacgtggactctgtgaagggcagattcaccatcagccgggacaacgccaagaagtccctgtacctccagatgaacagcctgagagccgaggacaccgccgtgtactattgtgcctctggcgtgtacagcttcgactacagaggccagggcaccctggtcacagtctcttctggtaccggcggaggcggatctggcggcggaggtagcggtggcggaggatctgaattcgacatcgtgatgacccagagccccgatagcctggccgtgtctctgggagagagagccaccatcaactgcaagagcagccagagcatcctgtacagcagcaaccagaagaactacctggcctggtatcagcagaagcccggccagagccctaagctgctgatctactgggccagcaccagagaaagcggcgtgcccgatagattcagcggcagcggctctggcaccgacttcaccctgaccatcagttctcttcaggccgaggacgtggccgtgtactactgccaccagtacatcagctcctacaccttcggccagggcaccaagctggaaatcaagctcgagggacagcctaaggccaatcctaccgtgacactgttccctccaagcagcgaagaactccaggccaacaaggccacacttgtgtgcctgatctccgacttctaccctggggctgtgacagtggcttggaaggccgatggatctcctgtgaaagccggcgtggaaaccaccaagccatccaagcagagcaacaacaaatacgccgccagctcctacctgagcctgacacctgagcagtggaagtcccacagatcctacagctgccaagtgacccacgaaggcagcaccgtggaaaagacagtggcccctacagagtgcagccccatcaagaccgatgtgattacaatggaccccaaggacaactgctccaaggacgccaacgataccctgctgctccagctgaccaacaccagcgcctactacatgtacttgttgctgctgctgaagtccgtggtgtacttcgccatcatcacatgctgcctgctgcggagaaccgccttctgctgcaacggcgagaagtctagggccaagcgatctggatctggagcaacaaacttctcactactcaaacaagcaggtgacgtggaggagaatcccgggcctactagtatggactggatttggcgcatccttttccttgtcggcgctgctaccggcgcgcattccttcgaacaggtgcagctggtgcagtctggcgctgaagtgaagaaacctggggccagcgtgaaggtgtcctgcaaggccagcggctacacctttgccagccagtggatgcactggatgagacaggcccctggacagggcctggaatggatcggctggatcaaccccggcaacgtgaacaccaagtacaacgagaagttcaagggcagagccaccctgacagtggacaccagcaccaacaccgcctacatggaactgagcagcctgcggagcgaggacaccgccgtgtattattgcgccagaagcacctggtacagacccctggattattggggccagggaacccttgtgaccgtgtcctctacgcgtgcctctacaaagggaccctccgtgtttcctctggctcccagcagcaagtctacaagcggaggaacagccgctctgggctgcctggtcaaggattactttcccgagcctgtgaccgtgtcctggaatagcggagcactgacaagcggcgtgcacacctttccagccgtgctgcaaagcagcggcctgtactctctgagcagcgtggtcacagtgcctagctctagcctgggcacccagacctacatctgcaatgtgaaccacaagcctagcaacaccaaggtggacaagagagtggaacccaagagctgtgaagtgaaaaccgactccaccgaccacgtgaagcccaaagagacagagaacaccaagcagcccagcaagagctgccacaagcccaaggccatcgtgcacaccgagaaagtgaacatgatgagcctgaccgtgctgggcctgcggatgctgttcgccaaaaccgtggccgtgaacttcctgctgaccgccaagctgttcttcctc

SEQ ID NO: 2851 - DNA, 2352 bp, Artificial Sequence
  Synthetic Polynucloetide
atggccttaccagtgaccgccttgctcctgccgctggccttgctgctccacgccgccaggccggaagtgcagctggttgaatctggcggaggactggttcagcctggcggatctctgagactgtcttgtgccgccagcggcttcagcttcagcgacttttggatgagctgggtccgacaggcccctggcaaaggacttgaatgggtcgccacaatcagccaggccggcagcgagaaggactacgtggactctgtgaagggcagattcaccatcagccgggacaacgccaagaagtccctgtacctccagatgaacagcctgagagccgaggacaccgccgtgtactattgtgcctctggcgtgtacagcttcgactacagaggccagggcaccctggtcacagtctcttctggtaccggcggaggcggatctggcggcggaggtagcggtggcggaggatctgaattcgaccacatcgtgctgacccagagccctagcagcctgtctgccagcctgggcgacagagtgaccatcagctgtagagccagccaggacatcagcacctacctgaactggtatcagcagaaacccgacggcaccgtgaagctgctgatcttctacaccagcagactgcacgccggggtgcccagcagattttctggcagcggctctggcacccaccacagcctgaccatctccaacctggaacaggaagatattgctacctacttctgtcagcaaggcaacagcctgcccttcaccttcggcagcggcaccaagctggaaatcaagagactcgagggacagcctaaggccaatcctaccgtgacactgttccctccaagcagcgaagaactccaggccaacaaggccacacttgtgtgcctgatctccgacttctaccctggggctgtgacagtggcttggaaggccgatggatctcctgtgaaagccggcgtggaaaccaccaagccatccaagcagagcaacaacaaatacgccgccagctcctacctgagcctgacacctgagcagtggaagtcccacagatcctacagctgccaagtgacccacgaaggcagcaccgtggaaaagacagtggcccctacagagtgcagccccatcaagaccgatgtgattacaatggaccccaaggacaactgctccaaggacgccaacgataccctgctgctccagctgaccaacaccagcgcctactacatgtacttgttgctgctgctgaagtccgtggtgtacttcgccatcatcacatgctgcctgctgcggagaaccgccttctgctgcaacggcgagaagtctagggccaagcgatctggatctggagcaacaaacttctcactactcaaacaagcaggtgacgtggaggagaatcccgggcctactagtatggactggatttggcgcatccttttccttgtcggcgctgctaccggcgcgcattccttcgaacaggtgcagctgaaagagagcggccctgagctggaaaagcctggggccagcgtgaagattagctgcaaggccagcggctacagcttcaccgcctacagcatgaactgggtcaagcagaacaacggcatgagcctggaatggatcggcagcatcgacccctactacggcgacaccaaatacgcccagaagttcaagggcaaggccaccctgaccgtggataaggccagcagcaccgcctacctccagctgaagtctctgaccagcgaggacagcgccgtgtactactgcgccagacggatgattaccaccggcgactggtacttcgacgtgtggggagccggaaccaccgtgacagtgtctagcacgcgtgcctctacaaagggaccctccgtgtttcctctggctcccagcagcaagtctacaagcggaggaacagccgctctgggctgcctggtcaaggattactttcccgagcctgtgaccgtgtcctggaatagcggagcactgacaagcggcgtgcacacctttccagccgtgctgcaaagcagcggcctgtactctctgagcagcgtggtcacagtgcctagctctagcctgggcacccagacctacatctgcaatgtgaaccacaagcctagcaacaccaaggtggacaagagagtggaacccaagagctgtgaagtgaaaaccgactccaccgaccacgtgaagcccaaagagacagagaacaccaagcagcccagcaagagctgccacaagcccaaggccatcgtgcacaccgagaaagtgaacatgatgagcctgaccgtgctgggcctgcggatgctgttcgccaaaaccgtggccgtgaacttcctgctgaccgccaagctgttcttcctc

SEQ ID NO: 2852 - DNA, 2352 bp, Artificial Sequence; identical to SEQ ID NO: 2851
  Synthetic Polynucloetide

SEQ ID NO: 2853 - DNA, 2352 bp, Artificial Sequence
  Synthetic Polynucloetide
atggccttaccagtgaccgccttgctcctgccgctggccttgctgctccacgccgccaggccggaagtgcagctggttgaatctggcggaggactggttcagcctggcggatctctgagactgtcttgtgccgccagcggcttcagcttcagcgacttttggatgagctgggtccgacaggcccctggcaaaggacttgaatgggtcgccacaatcagccaggccggcagcgagaaggactacgtggactctgtgaagggcagattcaccatcagccgggacaacgccaagaagtccctgtacctccagatgaacagcctgagagccgaggacaccgccgtgtactattgtgcctctggcgtgtacagcttcgactacagaggccagggcaccctggtcacagtctcttctggtaccggcggaggcggatctggcggcggaggtagcggtggcggaggatctgaattcgacgagatcgtgctgacacagagccctgccaccctgtctctgagccctggcgaaagagccaccctgagctgtagagccagccagagcgtgtccagctacctggcctggtatcagcagaagcccggccaggctccccggctgctgatctacgatgccagcaatagagccaccggcatccccgccagattttccggctctggcagcggcaccgacttcaccctgaccatcagctccctggaacccgaggacttcgccgtgtactactgccagcagcggagcaactggcccatcacattcggccagggcacccggctggaaatcaaactcgagggacagcctaaggccaatcctaccgtgacactgttccctccaagcagcgaagaactccaggccaacaaggccacacttgtgtgcctgatctccgacttctaccctggggctgtgacagtggcttggaaggccgatggatctcctgtgaaagccggcgtggaaaccaccaagccatccaagcagagcaacaacaaatacgccgccagctcctacctgagcctgacacctgagcagtggaagtcccacagatcctacagctgccaagtgacccacgaaggcagcaccgtggaaaagacagtggcccctacagagtgcagccccatcaagaccgatgtgattacaatggaccccaaggacaactgctccaaggacgccaacgataccctgctgctccagctgaccaacaccagcgcctactacatgtacttgttgctgctgctgaagtccgtggtgtacttcgccatcatcacatgctgcctgctgcggagaaccgccttctgctgcaacggcgagaagtctagggccaagcgatctggatctggagcaacaaacttctcactactcaaacaagcaggtgacgtggaggagaatcccgggcctactagtatggactggatttggcgcatccttttccttgtcggcgctgctaccggcgcgcattccttcgaagaagtgcagctggtggaatcaggcggcggactggtgcagcctggcagaagcctgagactgagctgtgccgccagcggcttcaccttcaacgactacgccatgcactgggtgcgccaggcccctggaaaaggactggaatgggtgtccacaatcagctggaacagcggcagcatcggctacgccgatagcgtgaagggccggttcaccatcagccgggacaacgccaagaagtccctgtacctccagatgaacagcctgcgggccgaggacacagccctgtactattgcgccaaggacatccagtacggcaactactactacggcatggacgtgtggggccagggaaccaccgtgaccgtgtcatctacgcgtgcctctacaaagggaccctccgtgtttcctctggctcccagcagcaagtctacaagcggaggaacagccgctctgggctgcctggtcaaggattactttcccgagcctgtgaccgtgtcctggaatagcggagcactgacaagcggcgtgcacacctttccagccgtgctgcaaagcagcggcctgtactctctgagcagcgtggtcacagtgcctagctctagcctgggcacccagacctacatctgcaatgtgaaccacaagcctagcaacaccaaggtggacaagagagtggaacccaagagctgtgaagtgaaaaccgactccaccgaccacgtgaagcccaaagagacagagaacaccaagcagcccagcaagagctgccacaagcccaaggccatcgtgcacaccgagaaagtgaacatgatgagcctgaccgtgctgggcctgcggatgctgttcgccaaaaccgtggccgtgaacttcctgctgaccgccaagctgttcttcctc

SEQ ID NO: 2854 - DNA, 2358 bp, Artificial Sequence
  Synthetic Polynucloetide
atggccttaccagtgaccgccttgctcctgccgctggccttgctgctccacgccgccaggccggaagtgcagctggttgaatctggcggaggactggttcagcctggcggatctctgagactgtcttgtgccgccagcggcttcagcttcagcgacttttggatgagctgggtccgacaggcccctggcaaaggacttgaatgggtcgccacaatcagccaggccggcagcgagaaggactacgtggactctgtgaagggcagattcaccatcagccgggacaacgccaagaagtccctgtacctccagatgaacagcctgagagccgaggacaccgccgtgtactattgtgcctctggcgtgtacagcttcgactacagaggccagggcaccctggtcacagtctcttctggtaccggcggaggcggatctggcggcggaggtagcggtggcggaggatctgaattcgacatcgtgatgacccagacccccctgagcctgcctgtgacacctggcgagcctgccagcatctcctgcagaagcagcaagagcctgctgcacagcaacggcatcacctacctgtactggtatctgcagaaacccggccagagcccccaactgctgatctaccagatgagcaacctggtgtccggcgtgcccgacagattttctggcagcggctccggcaccgacttcaccctgaagatcagccgggtggaagccgaggacgtgggcgtgtactactgcgcccagaacctggaactgccctacacctttggcggcggaacaaaggtggaaatcaagcggctcgagggacagcctaaggccaatcctaccgtgacactgttccctccaagcagcgaagaactccaggccaacaaggccacacttgtgtgcctgatctccgacttctaccctggggctgtgacagtggcttggaaggccgatggatctcctgtgaaagccggcgtggaaaccaccaagccatccaagcagagcaacaacaaatacgccgccagctcctacctgagcctgacacctgagcagtggaagtcccacagatcctacagctgccaagtgacccacgaaggcagcaccgtggaaaagacagtggcccctacagagtgcagccccatcaagaccgatgtgattacaatggaccccaaggacaactgctccaaggacgccaacgataccctgctgctccagctgaccaacaccagcgcctactacatgtacttgttgctgctgctgaagtccgtggtgtacttcgccatcatcacatgctgcctgctgcggagaaccgccttctgctgcaacggcgagaagtctagggccaagcgatctggatctggagcaacaaacttctcactactcaaacaagcaggtgacgtggaggagaatcccgggcctactagtatggactggatttggcgcatccttttccttgtcggcgctgctaccggcgcgcattccttcgaacaggtgcaactggtgcagagcggagccgaagtgaaaaagcccggcagcagcgtgaaggtgtcctgcaaggccagcggctacgccttcagctactcctggatcaactgggtgcgccaggcccctggacagggcctggaatggatgggcagaatcttccccggcgacggcgacaccgactacaacggcaagttcaagggcagagtgaccatcaccgccgacaagagcaccagcaccgcctacatggaactgagcagcctgcggagcgaggataccgccgtgtactattgtgccagaaacgtgttcgacggctactggctggtgtactggggccagggaacacttgtgaccgtgtccagcacgcgtgcctctacaaagggaccctccgtgtttcctctggctcccagcagcaagtctacaagcggaggaacagccgctctgggctgcctggtcaaggattactttcccgagcctgtgaccgtgtcctggaatagcggagcactgacaagcggcgtgcacacctttccagccgtgctgcaaagcagcggcctgtactctctgagcagcgtggtcacagtgcctagctctagcctgggcacccagacctacatctgcaatgtgaaccacaagcctagcaacaccaaggtggacaagagagtggaacccaagagctgtgaagtgaaaaccgactccaccgaccacgtgaagcccaaagagacagagaacaccaagcagcccagcaagagctgccacaagcccaaggccatcgtgcacaccgagaaagtgaacatgatgagcctgaccgtgctgggcctgcggatgctgttcgccaaaaccgtggccgtgaacttcctgctgaccgccaagctgttcttcctc

SEQ ID NO: 2855 - DNA, 2361 bp, Artificial Sequence
  Synthetic Polynucloetide
atggccttaccagtgaccgccttgctcctgccgctggccttgctgctccacgccgccaggccggaagtgcagctggttgaatctggcggaggactggttcagcctggcggatctctgagactgtcttgtgccgccagcggcttcagcttcagcgacttttggatgagctgggtccgacaggcccctggcaaaggacttgaatgggtcgccacaatcagccaggccggcagcgagaaggactacgtggactctgtgaagggcagattcaccatcagccgggacaacgccaagaagtccctgtacctccagatgaacagcctgagagccgaggacaccgccgtgtactattgtgcctctggcgtgtacagcttcgactacagaggccagggcaccctggtcacagtctcttctggtaccggcggaggcggatctggcggcggaggtagcggtggcggaggatctgaattcgacatccagatgacccagagccccagcagcctgtctgccagcgtgggcgacagagtgaccatcacctgtcggagcagccagagcatcgtgcactccgtgggcaacaccttcctggaatggtatcagcagaagcccggcaaggcccccaagctgctgatctacaaggtgtccaacagattcagcggcgtgcccagcaggtttagcggctctggcagcggcaccgacttcaccctgaccatctctagcctccagcccgaggacttcgccacctactactgttttcaaggcagccagttcccctacaccttcggccagggaacaaaggtggaaatcaagcggctcgagggacagcctaaggccaatcctaccgtgacactgttccctccaagcagcgaagaactccaggccaacaaggccacacttgtgtgcctgatctccgacttctaccctggggctgtgacagtggcttggaaggccgatggatctcctgtgaaagccggcgtggaaaccaccaagccatccaagcagagcaacaacaaatacgccgccagctcctacctgagcctgacacctgagcagtggaagtcccacagatcctacagctgccaagtgacccacgaaggcagcaccgtggaaaagacagtggcccctacagagtgcagccccatcaagaccgatgtgattacaatggaccccaaggacaactgctccaaggacgccaacgataccctgctgctccagctgaccaacaccagcgcctactacatgtacttgttgctgctgctgaagtccgtggtgtacttcgccatcatcacatgctgcctgctgcggagaaccgccttctgctgcaacggcgagaagtctagggccaagcgatctggatctggagcaacaaacttctcactactcaaacaagcaggtgacgtggaggagaatcccgggcctactagtatggactggatttggcgcatccttttccttgtcggcgctgctaccggcgcgcattccttcgaagaagtgcaactggtggaaagcggaggcggcctggtgcagcctggcggatctctgagactgagctgtgccgccagcggctacgagttcagccggtcctggatgaactgggtgcgccaggcccctggcaagggactggaatgggtgggaagaatctaccccggcgacggcgacaccaactacagcggcaagttcaagggccggttcaccatcagcgccgacaccagcaagaacaccgcctacctccagatgaacagcctgcgggccgaggataccgccgtgtactactgtgccagagatggcagctcctgggactggtacttcgacgtgtggggacagggaacccttgtgaccgtgtccagcacgcgtgcctctacaaagggaccctccgtgtttcctctggctcccagcagcaagtctacaagcggaggaacagccgctctgggctgcctggtcaaggattactttcccgagcctgtgaccgtgtcctggaatagcggagcactgacaagcggcgtgcacacctttccagccgtgctgcaaagcagcggcctgtactctctgagcagcgtggtcacagtgcctagctctagcctgggcacccagacctacatctgcaatgtgaaccacaagcctagcaacaccaaggtggacaagagagtggaacccaagagctgtgaagtgaaaaccgactccaccgaccacgtgaagcccaaagagacagagaacaccaagcagcccagcaagagctgccacaagcccaaggccatcgtgcacaccgagaaagtgaacatgatgagcctgaccgtgctgggcctgcggatgctgttcgccaaaaccgtggccgtgaacttcctgctgaccgccaagctgttcttcctc

SEQ ID NO: 2856 - DNA, 2355 bp, Artificial Sequence
  Synthetic Polynucloetide
atggccttaccagtgaccgccttgctcctgccgctggccttgctgctccacgccgccaggccggaagtgcagctggttgaatctggcggaggactggttcagcctggcggatctctgagactgtcttgtgccgccagcggcttcagcttcagcgacttttggatgagctgggtccgacaggcccctggcaaaggacttgaatgggtcgccacaatcagccaggccggcagcgagaaggactacgtggactctgtgaagggcagattcaccatcagccgggacaacgccaagaagtccctgtacctccagatgaacagcctgagagccgaggacaccgccgtgtactattgtgcctctggcgtgtacagcttcgactacagaggccagggcaccctggtcacagtctcttctggtaccggcggaggcggatctggcggcggaggtagcggtggcggaggatctgaattcgacatccagatgacccagagccccagcagcctgtctgccagcgtgggcgacagagtgaccatcacctgtagagccagccagaccatctggtcctacctgaactggtatcagcagaggcccggcaaggcccccaacctgctgatctatgccgccagctctctccagagcggcgtgcccagcagattttccggcagaggcagcggcaccgacttcaccctgaccatcagttccttgcaggccgaggacttcgccacctactactgccagcagagctacagcatcccccagattttcggccagggcaccaagctggaaatcaagctcgagggacagcctaaggccaatcctaccgtgacactgttccctccaagcagcgaagaactccaggccaacaaggccacacttgtgtgcctgatctccgacttctaccctggggctgtgacagtggcttggaaggccgatggatctcctgtgaaagccggcgtggaaaccaccaagccatccaagcagagcaacaacaaatacgccgccagctcctacctgagcctgacacctgagcagtggaagtcccacagatcctacagctgccaagtgacccacgaaggcagcaccgtggaaaagacagtggcccctacagagtgcagccccatcaagaccgatgtgattacaatggaccccaaggacaactgctccaaggacgccaacgataccctgctgctccagctgaccaacaccagcgcctactacatgtacttgttgctgctgctgaagtccgtggtgtacttcgccatcatcacatgctgcctgctgcggagaaccgccttctgctgcaacggcgagaagtctagggccaagcgatctggatctggagcaacaaacttctcactactcaaacaagcaggtgacgtggaggagaatcccgggcctactagtatggactggatttggcgcatccttttccttgtcggcgctgctaccggcgcgcattccttcgaacaggtgcagctccagcagtctggacccggcctcgtgaagcctagccagacactgagcctgacctgcgccatcagcggcgatagcgtgtccagcaatagcgccgcctggaactggatcagacagtccccctctcggggcctggaatggctgggccggacctactaccgcagcaagtggtacaacgactacgccgtgtccgtgaagtcccggatcaccatcaaccccgacaccagcaagaaccagttctccttgcaactgaacagcgtgacccccgaggacaccgccgtgtactactgcgccagagaagtgaccggcgacctggaagatgccttcgacatctggggccagggaacaatggtcacagtgtccagcacgcgtgcctctacaaagggaccctccgtgtttcctctggctcccagcagcaagtctacaagcggaggaacagccgctctgggctgcctggtcaaggattactttcccgagcctgtgaccgtgtcctggaatagcggagcactgacaagcggcgtgcacacctttccagccgtgctgcaaagcagcggcctgtactctctgagcagcgtggtcacagtgcctagctctagcctgggcacccagacctacatctgcaatgtgaaccacaagcctagcaacaccaaggtggacaagagagtggaacccaagagctgtgaagtgaaaaccgactccaccgaccacgtgaagcccaaagagacagagaacaccaagcagcccagcaagagctgccacaagcccaaggccatcgtgcacaccgagaaagtgaacatgatgagcctgaccgtgctgggcctgcggatgctgttcgccaaaaccgtggccgtgaacttcctgctgaccgccaagctgttcttcctc

SEQ ID NO: 2857 - DNA, 2334 bp, Artificial Sequence
  Synthetic Polynucloetide
atggccttaccagtgaccgccttgctcctgccgctggccttgctgctccacgccgccaggccggaagtgcagctggttgaatctggcggaggactggttcagcctggcggatctctgagactgtcttgtgccgccagcggcttcagcttcagcgacttttggatgagctgggtccgacaggcccctggcaaaggacttgaatgggtcgccacaatcagccaggccggcagcgagaaggactacgtggactctgtgaagggcagattcaccatcagccgggacaacgccaagaagtccctgtacctccagatgaacagcctgagagccgaggacaccgccgtgtactattgtgcctctggcgtgtacagcttcgactacagaggccagggcaccctggtcacagtctcttctggtaccggcggaggcggatctggcggcggaggtagcggtggcggaggatctgaattcgacatccagatgacccagagccccgccaccatcgagaacacaagcctgtctgccagcgtgggcgacagagtgaccatcacctgtagagccagccagggcatcagctcttggctgacctggtatcagcagaagcccgagaaggcccccaagagcctgatctacgccgccagctctctgcagtctggcgtgcccagcagattttccggcagcggctctggcaccgacttcaccctgacaatcagcagcctgcagcccgaggacttcgccacctactactgccagcagtacgacagctaccccatcaccttcggccagggcacccggctggaaatcaagctcgagggacagcctaaggccaatcctaccgtgacactgttccctccaagcagcgaagaactccaggccaacaaggccacacttgtgtgcctgatctccgacttctaccctggggctgtgacagtggcttggaaggccgatggatctcctgtgaaagccggcgtggaaaccaccaagccatccaagcagagcaacaacaaatacgccgccagctcctacctgagcctgacacctgagcagtggaagtcccacagatcctacagctgccaagtgacccacgaaggcagcaccgtggaaaagacagtggcccctacagagtgcagccccatcaagaccgatgtgattacaatggaccccaaggacaactgctccaaggacgccaacgataccctgctgctccagctgaccaacaccagcgcctactacatgtacttgttgctgctgctgaagtccgtggtgtacttcgccatcatcacatgctgcctgctgcggagaaccgccttctgctgcaacggcgagaagtctagggccaagcgatctggatctggagcaacaaacttctcactactcaaacaagcaggtgacgtggaggagaatcccgggcctactagtatggactggatttggcgcatccttttccttgtcggcgctgctaccggcgcgcattccttcgaacaggtgcaactgcagcagtggggagccggactgctgaagcctagcgagacactgagcctgacctgcgccgtgtacggcggcagcttcagcgcctactattggagctggatcagacagccccctggcaagggcctggaatggatcggcgacatcaatcacggcggaggcaccaactacaaccccagcctgaagtcccgcgtgaccatctccgtggacaccagcaagaaccagttctccctgaagctgaacagcgtgacagccgccgacacagccgtgtactactgtgccagcctgaccgcctattggggccagggatctcttgtgaccgtgtccagcacgcgtgcctctacaaagggaccctccgtgtttcctctggctcccagcagcaagtctacaagcggaggaacagccgctctgggctgcctggtcaaggattactttcccgagcctgtgaccgtgtcctggaatagcggagcactgacaagcggcgtgcacacctttccagccgtgctgcaaagcagcggcctgtactctctgagcagcgtggtcacagtgcctagctctagcctgggcacccagacctacatctgcaatgtgaaccacaagcctagcaacaccaaggtggacaagagagtggaacccaagagctgtgaagtgaaaaccgactccaccgaccacgtgaagcccaaagagacagagaacaccaagcagcccagcaagagctgccacaagcccaaggccatcgtgcacaccgagaaagtgaacatgatgagcctgaccgtgctgggcctgcggatgctgttcgccaaaaccgtggccgtgaacttcctgctgaccgccaagctgttcttcctc

SEQ ID NO: 2858 - DNA, 2349 bp, Artificial Sequence
  Synthetic Polynucloetide
atggccttaccagtgaccgccttgctcctgccgctggccttgctgctccacgccgccaggccggaagtgcagctggttgaatctggcggaggactggttcagcctggcggatctctgagactgtcttgtgccgccagcggcttcagcttcagcgacttttggatgagctgggtccgacaggcccctggcaaaggacttgaatgggtcgccacaatcagccaggccggcagcgagaaggactacgtggactctgtgaagggcagattcaccatcagccgggacaacgccaagaagtccctgtacctccagatgaacagcctgagagccgaggacaccgccgtgtactattgtgcctctggcgtgtacagcttcgactacagaggccagggcaccctggtcacagtctcttctggtaccggcggaggcggatctggcggcggaggtagcggtggcggaggatctgaattcgacgagatcgtgctgacccagagccctgatagcctggccgtgtctctgggcgagagagccaccatcaactgcaaggccagccagagcgtggacttcgacggcgacagctacctgaactggtatcagcagaagcccggccagccccccaaggtgctgatctatgccgccagcacactgcagagcggcgtgcccagcagattttctggcagcggctccggcaccgacttcaccctgaccatcaacagcctggaagccgaggacgccgccacctactactgccagcagagcaacgaggacccctggacctttggcggcggaacaaaggtggaaatcaagctcgagggacagcctaaggccaatcctaccgtgacactgttccctccaagcagcgaagaactccaggccaacaaggccacacttgtgtgcctgatctccgacttctaccctggggctgtgacagtggcttggaaggccgatggatctcctgtgaaagccggcgtggaaaccaccaagccatccaagcagagcaacaacaaatacgccgccagctcctacctgagcctgacacctgagcagtggaagtcccacagatcctacagctgccaagtgacccacgaaggcagcaccgtggaaaagacagtggcccctacagagtgcagccccatcaagaccgatgtgattacaatggaccccaaggacaactgctccaaggacgccaacgataccctgctgctccagctgaccaacaccagcgcctactacatgtacttgttgctgctgctgaagtccgtggtgtacttcgccatcatcacatgctgcctgctgcggagaaccgccttctgctgcaacggcgagaagtctagggccaagcgatctggatctggagcaacaaacttctcactactcaaacaagcaggtgacgtggaggagaatcccgggcctactagtatggactggatttggcgcatccttttccttgtcggcgctgctaccggcgcgcattccttcgaacaggtgcaactggtgcagtccggcgctgaagtgaagaaacctggggccagcgtgaaggtgtcctgcaaggtgtccggctacacctttaccgactactacattacctgggtgcgccaggcccctggacaggccctggaatggatgggctggatctaccccggcagcggcaacaccaagtacagccagaagttccagggcagattcgtgttcagcgtggacaccagcgccagcaccgcctacctgcaactgtctagcctgaaggccgaagataccgccgtgtactactgcgccaactacggcaactattggttcgcctattggggccagggaacccttgtgaccgtgtcctctacgcgtgcctctacaaagggaccctccgtgtttcctctggctcccagcagcaagtctacaagcggaggaacagccgctctgggctgcctggtcaaggattactttcccgagcctgtgaccgtgtcctggaatagcggagcactgacaagcggcgtgcacacctttccagccgtgctgcaaagcagcggcctgtactctctgagcagcgtggtcacagtgcctagctctagcctgggcacccagacctacatctgcaatgtgaaccacaagcctagcaacaccaaggtggacaagagagtggaacccaagagctgtgaagtgaaaaccgactccaccgaccacgtgaagcccaaagagacagagaacaccaagcagcccagcaagagctgccacaagcccaaggccatcgtgcacaccgagaaagtgaacatgatgagcctgaccgtgctgggcctgcggatgctgttcgccaaaaccgtggccgtgaacttcctgctgaccgccaagctgttcttcctc

SEQ ID NO: 2859 - DNA, 2340 bp, Artificial Sequence
  Synthetic Polynucloetide
atggccttaccagtgaccgccttgctcctgccgctggccttgctgctccacgccgccaggccggaagtgcagctggttgaatctggcggaggactggttcagcctggcggatctctgagactgtcttgtgccgccagcggcttcagcttcagcgacttttggatgagctgggtccgacaggcccctggcaaaggacttgaatgggtcgccacaatcagccaggccggcagcgagaaggactacgtggactctgtgaagggcagattcaccatcagccgggacaacgccaagaagtccctgtacctccagatgaacagcctgagagccgaggacaccgccgtgtactattgtgcctctggcgtgtacagcttcgactacagaggccagggcaccctggtcacagtctcttctggtaccggcggaggcggatctggcggcggaggtagcggtggcggaggatctgaattcgacatccagatgacccagagccccagcagcctgtctgccagcgtgggcgacagagtgaccatcacctgtagagccagccagggcatcagctcttggctggcctggtatcagcagaagcccgagaaggcccccaagagcctgatctacgccgcctctagtctccagagcggcgtgcccagcagattttctggcagcggctccggcaccgacttcaccctgacaatcagctccctccagcccgaggacttcgccacctactactgccagcagtacaacagctaccctcccacctttggcggaggcaccaaggtggaaatcaagctcgagggacagcctaaggccaatcctaccgtgacactgttccctccaagcagcgaagaactccaggccaacaaggccacacttgtgtgcctgatctccgacttctaccctggggctgtgacagtggcttggaaggccgatggatctcctgtgaaagccggcgtggaaaccaccaagccatccaagcagagcaacaacaaatacgccgccagctcctacctgagcctgacacctgagcagtggaagtcccacagatcctacagctgccaagtgacccacgaaggcagcaccgtggaaaagacagtggcccctacagagtgcagccccatcaagaccgatgtgattacaatggaccccaaggacaactgctccaaggacgccaacgataccctgctgctccagctgaccaacaccagcgcctactacatgtacttgttgctgctgctgaagtccgtggtgtacttcgccatcatcacatgctgcctgctgcggagaaccgccttctgctgcaacggcgagaagtctagggccaagcgatctggatctggagcaacaaacttctcactactcaaacaagcaggtgacgtggaggagaatcccgggcctactagtatggactggatttggcgcatccttttccttgtcggcgctgctaccggcgcgcattccttcgaagaagtgcaactggtgcagtctggcggagggctggtgcatcctgggggaagcctgagactgagctgtgccggctctggcttcgccttcagcagcagcaccatgcactggatcagacaggcccctggcaagggcctggaatggatcagcctgatcggaagcggagggggcatctactacggcgacagcgtgaagggccggttcaccatcagccgggacaacgccaagaacagcctgtacctccagatgaactccctgcgggccgaggacatggccgtgtactattgtgtgcggggctacttcgactgggtggactacttcgattactggggccagggcaccctcgtgaccgtgtcatctacgcgtgcctctacaaagggaccctccgtgtttcctctggctcccagcagcaagtctacaagcggaggaacagccgctctgggctgcctggtcaaggattactttcccgagcctgtgaccgtgtcctggaatagcggagcactgacaagcggcgtgcacacctttccagccgtgctgcaaagcagcggcctgtactctctgagcagcgtggtcacagtgcctagctctagcctgggcacccagacctacatctgcaatgtgaaccacaagcctagcaacaccaaggtggacaagagagtggaacccaagagctgtgaagtgaaaaccgactccaccgaccacgtgaagcccaaagagacagagaacaccaagcagcccagcaagagctgccacaagcccaaggccatcgtgcacaccgagaaagtgaacatgatgagcctgaccgtgctgggcctgcggatgctgttcgccaaaaccgtggccgtgaacttcctgctgaccgccaagctgttcttcctc

SEQ ID NO: 2860 - DNA, 2370 bp, Artificial Sequence
  Synthetic Polynucloetide
atggccttaccagtgaccgccttgctcctgccgctggccttgctgctccacgccgccaggccggaagtgcagctggttgaatctggcggaggactggttcagcctggcggatctctgagactgtcttgtgccgccagcggcttcagcttcagcgacttttggatgagctgggtccgacaggcccctggcaaaggacttgaatgggtcgccacaatcagccaggccggcagcgagaaggactacgtggactctgtgaagggcagattcaccatcagccgggacaacgccaagaagtccctgtacctccagatgaacagcctgagagccgaggacaccgccgtgtactattgtgcctctggcgtgtacagcttcgactacagaggccagggcaccctggtcacagtctcttctggtaccggcggaggcggatctggcggcggaggtagcggtggcggaggatctgaattcgacgacatcgtgatgacacagtcaccagatagcctcaccgtctccctgggggagcggaccaccattaattgtaaatccagccaaagcgtgctggactcaagcaagaacaagaatagcctcgcctggtatcagcagaagcccggtcagcctccaaagctgctgctttcttgggcctccaccagagagtccgggattcctgataggtttagtggttcaggctccggcacagattttactctgaccattgattctctccagccagaggattctgcaacttattactgccagcaaagcgcccactttcctataacttttggccagggaacccgacttgaaatcaagctcgagggacagcctaaggccaatcctaccgtgacactgttccctccaagcagcgaagaactccaggccaacaaggccacacttgtgtgcctgatctccgacttctaccctggggctgtgacagtggcttggaaggccgatggatctcctgtgaaagccggcgtggaaaccaccaagccatccaagcagagcaacaacaaatacgccgccagctcctacctgagcctgacacctgagcagtggaagtcccacagatcctacagctgccaagtgacccacgaaggcagcaccgtggaaaagacagtggcccctacagagtgcagccccatcaagaccgatgtgattacaatggaccccaaggacaactgctccaaggacgccaacgataccctgctgctccagctgaccaacaccagcgcctactacatgtacttgttgctgctgctgaagtccgtggtgtacttcgccatcatcacatgctgcctgctgcggagaaccgccttctgctgcaacggcgagaagtctagggccaagcgatctggatctggagcaacaaacttctcactactcaaacaagcaggtgacgtggaggagaatcccgggcctactagtatggactggatttggcgcatccttttccttgtcggcgctgctaccggcgcgcattccttcgaacaggtgcagctggtgcagagcggtgccgaagtgaagaaaccaggtgcatccgttaaagtttcatgtaaggctagtggatataccttcaccaattacggaatgaactgggtgaaacaggcccctggccagggactgaagtggatggggtggattaacacctacaccggggagccgacttatgcagacgactttaaggggcgggtcacgatgacctccgacacctccaccagtaccgcctacctggagctgcacaaccttaggtcagacgataccgccgtgtattactgtgcccgatggtcttggtccgacggatactatgtctacttcgactattggggccaggggaccacagttaccgtgtcctctacgcgtgcctctacaaagggaccctccgtgtttcctctggctcccagcagcaagtctacaagcggaggaacagccgctctgggctgcctggtcaaggattactttcccgagcctgtgaccgtgtcctggaatagcggagcactgacaagcggcgtgcacacctttccagccgtgctgcaaagcagcggcctgtactctctgagcagcgtggtcacagtgcctagctctagcctgggcacccagacctacatctgcaatgtgaaccacaagcctagcaacaccaaggtggacaagagagtggaacccaagagctgtgaagtgaaaaccgactccaccgaccacgtgaagcccaaagagacagagaacaccaagcagcccagcaagagctgccacaagcccaaggccatcgtgcacaccgagaaagtgaacatgatgagcctgaccgtgctgggcctgcggatgctgttcgccaaaaccgtggccgtgaacttcctgctgaccgccaagctgttcttcctc

SEQ ID NO: 2861 - DNA, 2358 bp, Artificial Sequence
  Synthetic Polynucloetide
atggccttaccagtgaccgccttgctcctgccgctggccttgctgctccacgccgccaggccggaagtgcagctggttgaatctggcggaggactggttcagcctggcggatctctgagactgtcttgtgccgccagcggcttcagcttcagcgacttttggatgagctgggtccgacaggcccctggcaaaggacttgaatgggtcgccacaatcagccaggccggcagcgagaaggactacgtggactctgtgaagggcagattcaccatcagccgggacaacgccaagaagtccctgtacctccagatgaacagcctgagagccgaggacaccgccgtgtactattgtgcctctggcgtgtacagcttcgactacagaggccagggcaccctggtcacagtctcttctggtaccggcggaggcggatctggcggcggaggtagcggtggcggaggatctgaattcgacgagatcgtgctgacacagagccctggaagcctggccgtgtctcctggcgagcgcgtgacaatgagctgcaagagcagccagagcgtgttcttcagcagctcccagaagaactacctggcctggtatcagcagatccccggccagagccccagactgctgatctactgggccagcaccagagaaagcggcgtgcccgatagattcaccggcagcggctctggcaccgacttcaccctgacaatcagcagcgtgcagcccgaggacctggctatctactactgccaccagtacctgagcagccggaccttcggccagggcaccaagctggaaatcaagagactcgagggacagcctaaggccaatcctaccgtgacactgttccctccaagcagcgaagaactccaggccaacaaggccacacttgtgtgcctgatctccgacttctaccctggggctgtgacagtggcttggaaggccgatggatctcctgtgaaagccggcgtggaaaccaccaagccatccaagcagagcaacaacaaatacgccgccagctcctacctgagcctgacacctgagcagtggaagtcccacagatcctacagctgccaagtgacccacgaaggcagcaccgtggaaaagacagtggcccctacagagtgcagccccatcaagaccgatgtgattacaatggaccccaaggacaactgctccaaggacgccaacgataccctgctgctccagctgaccaacaccagcgcctactacatgtacttgttgctgctgctgaagtccgtggtgtacttcgccatcatcacatgctgcctgctgcggagaaccgccttctgctgcaacggcgagaagtctagggccaagcgatctggatctggagcaacaaacttctcactactcaaacaagcaggtgacgtggaggagaatcccgggcctactagtatggactggatttggcgcatccttttccttgtcggcgctgctaccggcgcgcattccttcgaacaggtgcaactgcagcagcctggcgctgaggtcgtgaagccaggcgcttccgtgaagatgtcctgcaaggccagcggctacaccttcaccagctactacatccactggatcaagcagacccctggacagggcctggaatgggtgggagtgatctaccccggcaacgacgacatcagctacaaccagaagttccagggcaaggccaccctgaccgccgacaagtctagcaccaccgcctacatgcaactgtccagcctgaccagcgaggacagcgccgtgtactactgcgccagagaagtgcggctgcggtacttcgatgtgtggggccagggaaccaccgtgaccgtgtcatctacgcgtgcctctacaaagggaccctccgtgtttcctctggctcccagcagcaagtctacaagcggaggaacagccgctctgggctgcctggtcaaggattactttcccgagcctgtgaccgtgtcctggaatagcggagcactgacaagcggcgtgcacacctttccagccgtgctgcaaagcagcggcctgtactctctgagcagcgtggtcacagtgcctagctctagcctgggcacccagacctacatctgcaatgtgaaccacaagcctagcaacaccaaggtggacaagagagtggaacccaagagctgtgaagtgaaaaccgactccaccgaccacgtgaagcccaaagagacagagaacaccaagcagcccagcaagagctgccacaagcccaaggccatcgtgcacaccgagaaagtgaacatgatgagcctgaccgtgctgggcctgcggatgctgttcgccaaaaccgtggccgtgaacttcctgctgaccgccaagctgttcttcctc

SEQ ID NO: 2862 - DNA, 2370 bp, Artificial Sequence
  Synthetic Polynucloetide
atggccttaccagtgaccgccttgctcctgccgctggccttgctgctccacgccgccaggccggaagtgcagctggttgaatctggcggaggactggttcagcctggcggatctctgagactgtcttgtgccgccagcggcttcagcttcagcgacttttggatgagctgggtccgacaggcccctggcaaaggacttgaatgggtcgccacaatcagccaggccggcagcgagaaggactacgtggactctgtgaagggcagattcaccatcagccgggacaacgccaagaagtccctgtacctccagatgaacagcctgagagccgaggacaccgccgtgtactattgtgcctctggcgtgtacagcttcgactacagaggccagggcaccctggtcacagtctcttctggtaccggcggaggcggatctggcggcggaggtagcggtggcggaggatctgaattcgatgtgctgctgacccagagccctctgagcctgcctgtgacactgggacagcctgccagcatctcctgtcggagcagccagaccatcgtgcacagcaacggcaacacctacctggaatggttccagcagcggccaggccagagccccagactgctgatctaccaggtgtccaacagattcagcggcgtgcccgacagattctccggcagcggctctggcaccgacttcaccctgaagatcagccgggtggaagccgaggacgtgggcgtgtactactgttttcaaggcagccacgtgccccggacctttggcggaggaacaaaggtggaaatcaagagagccctcgagggacagcctaaggccaatcctaccgtgacactgttccctccaagcagcgaagaactccaggccaacaaggccacacttgtgtgcctgatctccgacttctaccctggggctgtgacagtggcttggaaggccgatggatctcctgtgaaagccggcgtggaaaccaccaagccatccaagcagagcaacaacaaatacgccgccagctcctacctgagcctgacacctgagcagtggaagtcccacagatcctacagctgccaagtgacccacgaaggcagcaccgtggaaaagacagtggcccctacagagtgcagccccatcaagaccgatgtgattacaatggaccccaaggacaactgctccaaggacgccaacgataccctgctgctccagctgaccaacaccagcgcctactacatgtacttgttgctgctgctgaagtccgtggtgtacttcgccatcatcacatgctgcctgctgcggagaaccgccttctgctgcaacggcgagaagtctagggccaagcgatctggatctggagcaacaaacttctcactactcaaacaagcaggtgacgtggaggagaatcccgggcctactagtatggactggatttggcgcatccttttccttgtcggcgctgctaccggcgcgcattccttcgaacagatccaactggtgcagagcggcagcgagctgaagaaacctggggccagcgtgaaggtgtcctgcaaggccagcggctacacctttaccaactacggcatgaactgggtgcgccaggcccctggacagggcctgaaatggatgggctggatcaacaccaacaccggcgagcctaagtacgccgaagagttcaagggcagattcgccctgagcctggacaccagcgtgtccacagcctacctccagatcaacagcctgaaggccgaggataccgccgtgtacttctgcgccagaggctacggcaactacgccagaggggcttggctggcctattggggccagggaacactcgtgaccgtgtcctctacgcgtgcctctacaaagggaccctccgtgtttcctctggctcccagcagcaagtctacaagcggaggaacagccgctctgggctgcctggtcaaggattactttcccgagcctgtgaccgtgtcctggaatagcggagcactgacaagcggcgtgcacacctttccagccgtgctgcaaagcagcggcctgtactctctgagcagcgtggtcacagtgcctagctctagcctgggcacccagacctacatctgcaatgtgaaccacaagcctagcaacaccaaggtggacaagagagtggaacccaagagctgtgaagtgaaaaccgactccaccgaccacgtgaagcccaaagagacagagaacaccaagcagcccagcaagagctgccacaagcccaaggccatcgtgcacaccgagaaagtgaacatgatgagcctgaccgtgctgggcctgcggatgctgttcgccaaaaccgtggccgtgaacttcctgctgaccgccaagctgttcttcctc

SEQ ID NO: 2863 - DNA, 2325 bp, Artificial Sequence
  Synthetic Polynucloetide
atggccttaccagtgaccgccttgctcctgccgctggccttgctgctccacgccgccaggccggaagtgcagctggttgaatctggcggaggactggttcagcctggcggatctctgagactgtcttgtgccgccagcggcttcagcttcagcgacttttggatgagctgggtccgacaggcccctggcaaaggacttgaatgggtcgccacaatcagccaggccggcagcgagaaggactacgtggactctgtgaagggcagattcaccatcagccgggacaacgccaagaagtccctgtacctccagatgaacagcctgagagccgaggacaccgccgtgtactattgtgcctctggcgtgtacagcttcgactacagaggccagggcaccctggtcacagtctcttctggtaccggcggaggcggatctggcggcggaggtagcggtggcggaggatctgaattcgacgagatcgtgctgacacagagccctgccacactctctctgagccctggcgaaagagccaccctgagctgtagcgccagcagcagcatcaactacatctactggctccagcagaagcccggccaggcccccagaatcctgatctacctgaccagcaacctggcctccggcgtgccagccagattttctggcagcggctccggcaccgacttcaccctgacaatcagcagcctggaacccgaggacttcgccgtgtactactgcctccagtggtccagcaaccccctgacctttggcggaggcaccaaggtggaaatcaagctcgagggacagcctaaggccaatcctaccgtgacactgttccctccaagcagcgaagaactccaggccaacaaggccacacttgtgtgcctgatctccgacttctaccctggggctgtgacagtggcttggaaggccgatggatctcctgtgaaagccggcgtggaaaccaccaagccatccaagcagagcaacaacaaatacgccgccagctcctacctgagcctgacacctgagcagtggaagtcccacagatcctacagctgccaagtgacccacgaaggcagcaccgtggaaaagacagtggcccctacagagtgcagccccatcaagaccgatgtgattacaatggaccccaaggacaactgctccaaggacgccaacgataccctgctgctccagctgaccaacaccagcgcctactacatgtacttgttgctgctgctgaagtccgtggtgtacttcgccatcatcacatgctgcctgctgcggagaaccgccttctgctgcaacggcgagaagtctagggccaagcgatctggatctggagcaacaaacttctcactactcaaacaagcaggtgacgtggaggagaatcccgggcctactagtatggactggatttggcgcatccttttccttgtcggcgctgctaccggcgcgcattccttcgaagaagtgcaactggtggaaagcgggggaggacttgtgaagcctggcggctctctgagactgagctgtgccgcctctggcttcaccttcagcagctacgacatgagctgggtgcgccaggctcctggcaagggactggaatgggtgtccaccatcagcagcggcggcagctacacctactacctggacagcatcaagggccggttcaccatctccagagacaacgccaagaacagcctgtacctccagatgaactccctgcgggccgaggacacagccgtgtattattgcgccagacagggcctggattactggggcagaggcacccttgtgaccgtgtcctctacgcgtgcctctacaaagggaccctccgtgtttcctctggctcccagcagcaagtctacaagcggaggaacagccgctctgggctgcctggtcaaggattactttcccgagcctgtgaccgtgtcctggaatagcggagcactgacaagcggcgtgcacacctttccagccgtgctgcaaagcagcggcctgtactctctgagcagcgtggtcacagtgcctagctctagcctgggcacccagacctacatctgcaatgtgaaccacaagcctagcaacaccaaggtggacaagagagtggaacccaagagctgtgaagtgaaaaccgactccaccgaccacgtgaagcccaaagagacagagaacaccaagcagcccagcaagagctgccacaagcccaaggccatcgtgcacaccgagaaagtgaacatgatgagcctgaccgtgctgggcctgcggatgctgttcgccaaaaccgtggccgtgaacttcctgctgaccgccaagctgttcttcctc

SEQ ID NO: 2864 - DNA, 2352 bp, Artificial Sequence
  Synthetic Polynucloetide
atggccttaccagtgaccgccttgctcctgccgctggccttgctgctccacgccgccaggccggaagtgcagctggttgaatctggcggaggactggttcagcctggcggatctctgagactgtcttgtgccgccagcggcttcagcttcagcgacttttggatgagctgggtccgacaggcccctggcaaaggacttgaatgggtcgccacaatcagccaggccggcagcgagaaggactacgtggactctgtgaagggcagattcaccatcagccgggacaacgccaagaagtccctgtacctccagatgaacagcctgagagccgaggacaccgccgtgtactattgtgcctctggcgtgtacagcttcgactacagaggccagggcaccctggtcacagtctcttctggtaccggcggaggcggatctggcggcggaggtagcggtggcggaggatctgaattcgacatcgtgatgacccagagccccgatagcctggccgtgtctctgggagagagagccaccatcaactgccgggccagcaagagcgtgtccaccagcggctacagcttcatgcactggtatcagcagaagcccggccagccccccaagctgctgatctacctggcctccaacctggaaagcggcgtgcccgatagattcagcggcagcggctctggcaccgacttcaccctgaccatcagttctcttcaggccgaggacgtggccgtgtactactgccagcacagcagagaggtgccctggacattcggccagggcacaaaggtggaaatcaagcggctcgagggacagcctaaggccaatcctaccgtgacactgttccctccaagcagcgaagaactccaggccaacaaggccacacttgtgtgcctgatctccgacttctaccctggggctgtgacagtggcttggaaggccgatggatctcctgtgaaagccggcgtggaaaccaccaagccatccaagcagagcaacaacaaatacgccgccagctcctacctgagcctgacacctgagcagtggaagtcccacagatcctacagctgccaagtgacccacgaaggcagcaccgtggaaaagacagtggcccctacagagtgcagccccatcaagaccgatgtgattacaatggaccccaaggacaactgctccaaggacgccaacgataccctgctgctccagctgaccaacaccagcgcctactacatgtacttgttgctgctgctgaagtccgtggtgtacttcgccatcatcacatgctgcctgctgcggagaaccgccttctgctgcaacggcgagaagtctagggccaagcgatctggatctggagcaacaaacttctcactactcaaacaagcaggtgacgtggaggagaatcccgggcctactagtatggactggatttggcgcatccttttccttgtcggcgctgctaccggcgcgcattccttcgaacaggtgcagctggtgcagtctggggccgaagtgaagaaacctggggccagcgtgaaggtgtcctgcaaggccagcggatacacctttaccaactacggcatgaactgggtgcgccaggcccctggacagggcctggaatggatgggctggatcaacacctacaccggcgagcccacatacgccgacgccttcaagggcagattcgccttcagcctggacaccagcacctccaccgcctacctccagatcaacagcctgcggagcgacgacaccgccgtgtattattgcgccagagattacggcgactacgggatggactattggggccagggaaccaccgtgaccgtgtcctctacgcgtgcctctacaaagggaccctccgtgtttcctctggctcccagcagcaagtctacaagcggaggaacagccgctctgggctgcctggtcaaggattactttcccgagcctgtgaccgtgtcctggaatagcggagcactgacaagcggcgtgcacacctttccagccgtgctgcaaagcagcggcctgtactctctgagcagcgtggtcacagtgcctagctctagcctgggcacccagacctacatctgcaatgtgaaccacaagcctagcaacaccaaggtggacaagagagtggaacccaagagctgtgaagtgaaaaccgactccaccgaccacgtgaagcccaaagagacagagaacaccaagcagcccagcaagagctgccacaagcccaaggccatcgtgcacaccgagaaagtgaacatgatgagcctgaccgtgctgggcctgcggatgctgttcgccaaaaccgtggccgtgaacttcctgctgaccgccaagctgttcttcctc

SEQ ID NO: 2865 - DNA, 2340 bp, Artificial Sequence
  Synthetic Polynucloetide
atggccttaccagtgaccgccttgctcctgccgctggccttgctgctccacgccgccaggccggaagtgcagctggttgaatctggcggaggactggttcagcctggcggatctctgagactgtcttgtgccgccagcggcttcagcttcagcgacttttggatgagctgggtccgacaggcccctggcaaaggacttgaatgggtcgccacaatcagccaggccggcagcgagaaggactacgtggactctgtgaagggcagattcaccatcagccgggacaacgccaagaagtccctgtacctccagatgaacagcctgagagccgaggacaccgccgtgtactattgtgcctctggcgtgtacagcttcgactacagaggccagggcaccctggtcacagtctcttctggtaccggcggaggcggatctggcggcggaggtagcggtggcggaggatctgaattcgacatcgtgatgacccagacccccctgaccctgagcgtgacaatcggacagcctgccagcatctcctgcaagagcagccagagcctgctggacagcgacggcaagacctacctgaactggctgctgcagaggccaggccagagccccgagagactgatctacctggtgtccaagctggactccggcgtgcccgatagattcacaggcagcggctccggcaccgacttcaccctgaagatcagccgggtggaagccgaggacctgggcgtgtactgttgttggcagggcacccacttcccttacaccttcggcggagggaccaaggtggaaatcaagggcctcgagggacagcctaaggccaatcctaccgtgacactgttccctccaagcagcgaagaactccaggccaacaaggccacacttgtgtgcctgatctccgacttctaccctggggctgtgacagtggcttggaaggccgatggatctcctgtgaaagccggcgtggaaaccaccaagccatccaagcagagcaacaacaaatacgccgccagctcctacctgagcctgacacctgagcagtggaagtcccacagatcctacagctgccaagtgacccacgaaggcagcaccgtggaaaagacagtggcccctacagagtgcagccccatcaagaccgatgtgattacaatggaccccaaggacaactgctccaaggacgccaacgataccctgctgctccagctgaccaacaccagcgcctactacatgtacttgttgctgctgctgaagtccgtggtgtacttcgccatcatcacatgctgcctgctgcggagaaccgccttctgctgcaacggcgagaagtctagggccaagcgatctggatctggagcaacaaacttctcactactcaaacaagcaggtgacgtggaggagaatcccgggcctactagtatggactggatttggcgcatccttttccttgtcggcgctgctaccggcgcgcattccttcgaacaggtgcaactgcagcagcctggcgctgaacttgtgcggccaggcgcctctgtgaagctgagctgtaaagccagcggctacaccttcaccagctactggatgaactgggtcaagcagcgcccaggccagggcctggaatggatcggaatgatcgaccccagcgacagcgagacacactacaaccacatcttcaaggacaaggccaccctgaccgtggacaagtccagcagcacagcctacctgcaactgtccagcctgaccagcgaggacagcgccgtgtactactgcgcccggaacctgtatctgtggggccagggaacaagcgtgaccgtgtctagcacgcgtgcctctacaaagggaccctccgtgtttcctctggctcccagcagcaagtctacaagcggaggaacagccgctctgggctgcctggtcaaggattactttcccgagcctgtgaccgtgtcctggaatagcggagcactgacaagcggcgtgcacacctttccagccgtgctgcaaagcagcggcctgtactctctgagcagcgtggtcacagtgcctagctctagcctgggcacccagacctacatctgcaatgtgaaccacaagcctagcaacaccaaggtggacaagagagtggaacccaagagctgtgaagtgaaaaccgactccaccgaccacgtgaagcccaaagagacagagaacaccaagcagcccagcaagagctgccacaagcccaaggccatcgtgcacaccgagaaagtgaacatgatgagcctgaccgtgctgggcctgcggatgctgttcgccaaaaccgtggccgtgaacttcctgctgaccgccaagctgttcttcctc

SEQ ID NO: 2866 - DNA, 2364 bp, Artificial Sequence
  Synthetic Polynucloetide
atggccttaccagtgaccgccttgctcctgccgctggccttgctgctccacgccgccaggccggaagtgcagctggttgaatctggcggaggactggttcagcctggcggatctctgagactgtcttgtgccgccagcggcttcagcttcagcgacttttggatgagctgggtccgacaggcccctggcaaaggacttgaatgggtcgccacaatcagccaggccggcagcgagaaggactacgtggactctgtgaagggcagattcaccatcagccgggacaacgccaagaagtccctgtacctccagatgaacagcctgagagccgaggacaccgccgtgtactattgtgcctctggcgtgtacagcttcgactacagaggccagggcaccctggtcacagtctcttctggtaccggcggaggcggatctggcggcggaggtagcggtggcggaggatctgaattcgacatcgtgatgacccagagccccgatagcctggccgtgtctctgggagagagagccaccatcaactgcgagagcagccagagcctgctgaacagcggcaaccagaagaactacctgacctggtatcagcagaagcccggccagccccccaagcccctgatctattgggccagcaccagagaaagcggcgtgcccgatagattcagcggcagcggaagcggcaccgacttcaccctgaccatcagttctcttcaggccgaggacgtggccgtgtactactgccagaacgactacagctacccctacaccttcggccagggcaccaagctggaaatcaagagactcgagggacagcctaaggccaatcctaccgtgacactgttccctccaagcagcgaagaactccaggccaacaaggccacacttgtgtgcctgatctccgacttctaccctggggctgtgacagtggcttggaaggccgatggatctcctgtgaaagccggcgtggaaaccaccaagccatccaagcagagcaacaacaaatacgccgccagctcctacctgagcctgacacctgagcagtggaagtcccacagatcctacagctgccaagtgacccacgaaggcagcaccgtggaaaagacagtggcccctacagagtgcagccccatcaagaccgatgtgattacaatggaccccaaggacaactgctccaaggacgccaacgataccctgctgctccagctgaccaacaccagcgcctactacatgtacttgttgctgctgctgaagtccgtggtgtacttcgccatcatcacatgctgcctgctgcggagaaccgccttctgctgcaacggcgagaagtctagggccaagcgatctggatctggagcaacaaacttctcactactcaaacaagcaggtgacgtggaggagaatcccgggcctactagtatggactggatttggcgcatccttttccttgtcggcgctgctaccggcgcgcattccttcgaagaagtgcagctggtgcagtctggggccgaagtgaagaagcctggcgagagcctgaagatcagctgcaagggcagcggctacagcttcaccgactactacatgaagtgggccagacagatgcccggcaagggcctggaatggatgggcgacatcatccccagcaacggggccaccttctacaaccagaaattcaagggccaagtgaccatctccgccgacaagagcatcagcaccacctacctccagtggtccagcctgaaggccagcgacaccgccatgtactattgcgccagaagccatctgctgcgggccagttggttcgcctattggggccagggaacaatggtcacagtgtccagcacgcgtgcctctacaaagggaccctccgtgtttcctctggctcccagcagcaagtctacaagcggaggaacagccgctctgggctgcctggtcaaggattactttcccgagcctgtgaccgtgtcctggaatagcggagcactgacaagcggcgtgcacacctttccagccgtgctgcaaagcagcggcctgtactctctgagcagcgtggtcacagtgcctagctctagcctgggcacccagacctacatctgcaatgtgaaccacaagcctagcaacaccaaggtggacaagagagtggaacccaagagctgtgaagtgaaaaccgactccaccgaccacgtgaagcccaaagagacagagaacaccaagcagcccagcaagagctgccacaagcccaaggccatcgtgcacaccgagaaagtgaacatgatgagcctgaccgtgctgggcctgcggatgctgttcgccaaaaccgtggccgtgaacttcctgctgaccgccaagctgttcttcctc

SEQ ID NO: 2867 - DNA, 2349 bp, Artificial Sequence
  Synthetic Polynucloetide
atggccttaccagtgaccgccttgctcctgccgctggccttgctgctccacgccgccaggccggaagtgcagctggttgaatctggcggaggactggttcagcctggcggatctctgagactgtcttgtgccgccagcggcttcagcttcagcgacttttggatgagctgggtccgacaggcccctggcaaaggacttgaatgggtcgccacaatcagccaggccggcagcgagaaggactacgtggactctgtgaagggcagattcaccatcagccgggacaacgccaagaagtccctgtacctccagatgaacagcctgagagccgaggacaccgccgtgtactattgtgcctctggcgtgtacagcttcgactacagaggccagggcaccctggtcacagtctcttctggtaccggcggaggcggatctggcggcggaggtagcggtggcggaggatctgaattcgacatccagatgacccagtctaccagttccctgagtgcatccctcggagacagggtgacgatcagttgcagcgcaagccaagggatcaataactatctgaactggtatcagcagaaaccggacggaacagtcgaactcctgatttattacaccagcacccttcagagtggcgtcccttcccggttcagtggctccggaagcgggaccgattactccctgaccatttctaatctggagccagaggacataggaacgtattattgccagcagtatagtaaactgccacgaacttttggaggggggacgaaactggagatcaaactcgagggacagcctaaggccaatcctaccgtgacactgttccctccaagcagcgaagaactccaggccaacaaggccacacttgtgtgcctgatctccgacttctaccctggggctgtgacagtggcttggaaggccgatggatctcctgtgaaagccggcgtggaaaccaccaagccatccaagcagagcaacaacaaatacgccgccagctcctacctgagcctgacacctgagcagtggaagtcccacagatcctacagctgccaagtgacccacgaaggcagcaccgtggaaaagacagtggcccctacagagtgcagccccatcaagaccgatgtgattacaatggaccccaaggacaactgctccaaggacgccaacgataccctgctgctccagctgaccaacaccagcgcctactacatgtacttgttgctgctgctgaagtccgtggtgtacttcgccatcatcacatgctgcctgctgcggagaaccgccttctgctgcaacggcgagaagtctagggccaagcgatctggatctggagcaacaaacttctcactactcaaacaagcaggtgacgtggaggagaatcccgggcctactagtatggactggatttggcgcatccttttccttgtcggcgctgctaccggcgcgcattccttcgaacaggtgcaactccagcagtccggaagcgagcttatgatgccaggggcatcagtgaagatcagctgcaaggctactggctacaccttctctaattactggatagagtgggttaaacaaaggccagggcacggcctggaatggatcggcgagatcctgcctgggacaggccgaaccatttataacgagaagttcaaaggcaaggctactttcaccgcagatataagctctaatacagtgcaaatgcagctctcttccctgacaagtgaggatagtgccgtgtattattgcgcacgaagagattactatggaaatttttattacgctatggattattggggtcaaggaacaagtgtgaccgttagcagcacgcgtgcctctacaaagggaccctccgtgtttcctctggctcccagcagcaagtctacaagcggaggaacagccgctctgggctgcctggtcaaggattactttcccgagcctgtgaccgtgtcctggaatagcggagcactgacaagcggcgtgcacacctttccagccgtgctgcaaagcagcggcctgtactctctgagcagcgtggtcacagtgcctagctctagcctgggcacccagacctacatctgcaatgtgaaccacaagcctagcaacaccaaggtggacaagagagtggaacccaagagctgtgaagtgaaaaccgactccaccgaccacgtgaagcccaaagagacagagaacaccaagcagcccagcaagagctgccacaagcccaaggccatcgtgcacaccgagaaagtgaacatgatgagcctgaccgtgctgggcctgcggatgctgttcgccaaaaccgtggccgtgaacttcctgctgaccgccaagctgttcttcctc

SEQ ID NO: 2868 - DNA, 2334 bp, Artificial Sequence
  Synthetic Polynucloetide
atggccttaccagtgaccgccttgctcctgccgctggccttgctgctccacgccgccaggccggaagtgcagctggttgaatctggcggaggactggttcagcctggcggatctctgagactgtcttgtgccgccagcggcttcagcttcagcgacttttggatgagctgggtccgacaggcccctggcaaaggacttgaatgggtcgccacaatcagccaggccggcagcgagaaggactacgtggactctgtgaagggcagattcaccatcagccgggacaacgccaagaagtccctgtacctccagatgaacagcctgagagccgaggacaccgccgtgtactattgtgcctctggcgtgtacagcttcgactacagaggccagggcaccctggtcacagtctcttctggtaccggcggaggcggatctggcggcggaggtagcggtggcggaggatctgaattcgacatccagatgacccagagccctgccagcctgtccgtgtctgtgggcgagacagtgaccatcacctgtcgggccagcgagaacatctacagcaacctggcctggtatcagcagaagcagggcaagagcccccaactgctggtgtacgccgccaccaatctggccgatggcgtgcccagcagattttccggctctggcagcggcacccagtacagcctgaagatcaacagcctccagagcgaggacttcggcagctactactgccagcacttctggggcacctggacctttggaggaggcaccaccctggaaatcaagctcgagggacagcctaaggccaatcctaccgtgacactgttccctccaagcagcgaagaactccaggccaacaaggccacacttgtgtgcctgatctccgacttctaccctggggctgtgacagtggcttggaaggccgatggatctcctgtgaaagccggcgtggaaaccaccaagccatccaagcagagcaacaacaaatacgccgccagctcctacctgagcctgacacctgagcagtggaagtcccacagatcctacagctgccaagtgacccacgaaggcagcaccgtggaaaagacagtggcccctacagagtgcagccccatcaagaccgatgtgattacaatggaccccaaggacaactgctccaaggacgccaacgataccctgctgctccagctgaccaacaccagcgcctactacatgtacttgttgctgctgctgaagtccgtggtgtacttcgccatcatcacatgctgcctgctgcggagaaccgccttctgctgcaacggcgagaagtctagggccaagcgatctggatctggagcaacaaacttctcactactcaaacaagcaggtgacgtggaggagaatcccgggcctactagtatggactggatttggcgcatccttttccttgtcggcgctgctaccggcgcgcattccttcgaagaagtgcaactccagcagagcggccctgagcttgtgaagcctggcgcttccgtgaagatgagctgcaaggccagcggctacaccttcaccgactactacatgaagtggatgaagcagagccacggcaagtccctggaatggatcggcgacatcaaccccaacaacggcggcaccacctacaaccagaagttcaagggcaaggccaccctgaccgtggacaagagcagcagcaccgcctacatgcaactgaacagcctgaccagcgaggacagcgccgtgtactactgcgccagagactacggctacggctatttcgactactggggccagggcacaaccctgacagtgtcctctacgcgtgcctctacaaagggaccctccgtgtttcctctggctcccagcagcaagtctacaagcggaggaacagccgctctgggctgcctggtcaaggattactttcccgagcctgtgaccgtgtcctggaatagcggagcactgacaagcggcgtgcacacctttccagccgtgctgcaaagcagcggcctgtactctctgagcagcgtggtcacagtgcctagctctagcctgggcacccagacctacatctgcaatgtgaaccacaagcctagcaacaccaaggtggacaagagagtggaacccaagagctgtgaagtgaaaaccgactccaccgaccacgtgaagcccaaagagacagagaacaccaagcagcccagcaagagctgccacaagcccaaggccatcgtgcacaccgagaaagtgaacatgatgagcctgaccgtgctgggcctgcggatgctgttcgccaaaaccgtggccgtgaacttcctgctgaccgccaagctgttcttcctc

SEQ ID NO: 2869 - DNA, 2343 bp, Artificial Sequence
  Synthetic Polynucloetide
atggccttaccagtgaccgccttgctcctgccgctggccttgctgctccacgccgccaggccggaagtgcagctggttgaatctggcggaggactggttcagcctggcggatctctgagactgtcttgtgccgccagcggcttcagcttcagcgacttttggatgagctgggtccgacaggcccctggcaaaggacttgaatgggtcgccacaatcagccaggccggcagcgagaaggactacgtggactctgtgaagggcagattcaccatcagccgggacaacgccaagaagtccctgtacctccagatgaacagcctgagagccgaggacaccgccgtgtactattgtgcctctggcgtgtacagcttcgactacagaggccagggcaccctggtcacagtctcttctggtaccggcggaggcggatctggcggcggaggtagcggtggcggaggatctgaattcgagatcgtgctgacacagagccctggcaccctgagcctgtctccaggcgaaagagccacactgagctgtcgggcctctcagagcgtgggaggctacctggcttggtatcagcagaagccaggccaggcccccagactgctgatctacgacgccagcaatcgggccacaggcatccccgccagattttctggcagcggctccggcaccgacttcaccctgacaatcagcagcctggaacccgaggacttcgccgtgtactactgccagcagcggaacaactggccccccatgtacacattcggccagggcaccaagctggaaatcaagagactcgagggacagcctaaggccaatcctaccgtgacactgttccctccaagcagcgaagaactccaggccaacaaggccacacttgtgtgcctgatctccgacttctaccctggggctgtgacagtggcttggaaggccgatggatctcctgtgaaagccggcgtggaaaccaccaagccatccaagcagagcaacaacaaatacgccgccagctcctacctgagcctgacacctgagcagtggaagtcccacagatcctacagctgccaagtgacccacgaaggcagcaccgtggaaaagacagtggcccctacagagtgcagccccatcaagaccgatgtgattacaatggaccccaaggacaactgctccaaggacgccaacgataccctgctgctccagctgaccaacaccagcgcctactacatgtacttgttgctgctgctgaagtccgtggtgtacttcgccatcatcacatgctgcctgctgcggagaaccgccttctgctgcaacggcgagaagtctagggccaagcgatctggatctggagcaacaaacttctcactactcaaacaagcaggtgacgtggaggagaatcccgggcctactagtatggactggatttggcgcatccttttccttgtcggcgctgctaccggcgcgcattccttcgaacaggtgcaactggtgcagagcggagccgaagtgaagaaacccggcagcagcgtgaaggtgtcctgcaaggcttccggcggcaccttcagcagctacgccatttcttgggtgcgccaggctcctggacagggcctggaatggatgggcggcatcatccctatcctgggcaccgccaactacgcccagaaattccagggcagagtgaccatcaccgccgacgagagcaccagcaccgcctacatggaactgagcagcctgcggagcgaggacacagccgtgtattattgcgccagatggggcggaggggccttcgacatttggggccagggaacaatggtcaccgtgtccagcacgcgtgcctctacaaagggaccctccgtgtttcctctggctcccagcagcaagtctacaagcggaggaacagccgctctgggctgcctggtcaaggattactttcccgagcctgtgaccgtgtcctggaatagcggagcactgacaagcggcgtgcacacctttccagccgtgctgcaaagcagcggcctgtactctctgagcagcgtggtcacagtgcctagctctagcctgggcacccagacctacatctgcaatgtgaaccacaagcctagcaacaccaaggtggacaagagagtggaacccaagagctgtgaagtgaaaaccgactccaccgaccacgtgaagcccaaagagacagagaacaccaagcagcccagcaagagctgccacaagcccaaggccatcgtgcacaccgagaaagtgaacatgatgagcctgaccgtgctgggcctgcggatgctgttcgccaaaaccgtggccgtgaacttcctgctgaccgccaagctgttcttcctc

SEQ ID NO: 2870 - DNA, 2328 bp, Artificial Sequence
  Synthetic Polynucloetide
atggccttaccagtgaccgccttgctcctgccgctggccttgctgctccacgccgccaggccggaagtgcagctggttgaatctggcggaggactggttcagcctggcggatctctgagactgtcttgtgccgccagcggcttcagcttcagcgacttttggatgagctgggtccgacaggcccctggcaaaggacttgaatgggtcgccacaatcagccaggccggcagcgagaaggactacgtggactctgtgaagggcagattcaccatcagccgggacaacgccaagaagtccctgtacctccagatgaacagcctgagagccgaggacaccgccgtgtactattgtgcctctggcgtgtacagcttcgactacagaggccagggcaccctggtcacagtctcttctggtaccggcggaggcggatctggcggcggaggtagcggtggcggaggatctgaattccagatcgtgctgacacagagccctgccctgatgagcgccagccctggcgagaaagtgaccatgacctgtagcgccagcagcagcgtgcgctacatgtactggtatcagcagaagcccagaagcagccccaagccctggattcacctgaccagcaatctggcctctggcgtgcccgctagattttccggctctggcagcggcaccagctacagcctgaccatcagcagcatggaagccgaggacgccgccacctactactgccagcagtggtccagccaccccttcacatttggctccggcaccaagctggaaatcaagctcgagggacagcctaaggccaatcctaccgtgacactgttccctccaagcagcgaagaactccaggccaacaaggccacacttgtgtgcctgatctccgacttctaccctggggctgtgacagtggcttggaaggccgatggatctcctgtgaaagccggcgtggaaaccaccaagccatccaagcagagcaacaacaaatacgccgccagctcctacctgagcctgacacctgagcagtggaagtcccacagatcctacagctgccaagtgacccacgaaggcagcaccgtggaaaagacagtggcccctacagagtgcagccccatcaagaccgatgtgattacaatggaccccaaggacaactgctccaaggacgccaacgataccctgctgctccagctgaccaacaccagcgcctactacatgtacttgttgctgctgctgaagtccgtggtgtacttcgccatcatcacatgctgcctgctgcggagaaccgccttctgctgcaacggcgagaagtctagggccaagcgatctggatctggagcaacaaacttctcactactcaaacaagcaggtgacgtggaggagaatcccgggcctactagtatggactggatttggcgcatccttttccttgtcggcgctgctaccggcgcgcattccttcgaagatgtgcaactccaggaaagcggccctggccttgtgaagcctagccagagcctgtccctgacctgtaccgtgaccggcttcagcatcaccagcgactactcttggaactggatcagacagttccctggcaacaaactggaatggatgggctacatcagctactccggccacacctcctacaaccccagcctggaaagccggatctccatcaccagagacaccagcaagaaccagttcttcttgcaactgaacagcgtgaccaccgaggataccgccacatattactgtaccagaggcaactgggacgtggtgtactggggccagggcacacttgtgaccgtgtctgctacgcgtgcctctacaaagggaccctccgtgtttcctctggctcccagcagcaagtctacaagcggaggaacagccgctctgggctgcctggtcaaggattactttcccgagcctgtgaccgtgtcctggaatagcggagcactgacaagcggcgtgcacacctttccagccgtgctgcaaagcagcggcctgtactctctgagcagcgtggtcacagtgcctagctctagcctgggcacccagacctacatctgcaatgtgaaccacaagcctagcaacaccaaggtggacaagagagtggaacccaagagctgtgaagtgaaaaccgactccaccgaccacgtgaagcccaaagagacagagaacaccaagcagcccagcaagagctgccacaagcccaaggccatcgtgcacaccgagaaagtgaacatgatgagcctgaccgtgctgggcctgcggatgctgttcgccaaaaccgtggccgtgaacttcctgctgaccgccaagctgttcttcctc

SEQ ID NO: 2871 - DNA, 2358 bp, Artificial Sequence
  Synthetic Polynucloetide
atggccttaccagtgaccgccttgctcctgccgctggccttgctgctccacgccgccaggccggaagtgcagctggttgaatctggcggaggactggttcagcctggcggatctctgagactgtcttgtgccgccagcggcttcagcttcagcgacttttggatgagctgggtccgacaggcccctggcaaaggacttgaatgggtcgccacaatcagccaggccggcagcgagaaggactacgtggactctgtgaagggcagattcaccatcagccgggacaacgccaagaagtccctgtacctccagatgaacagcctgagagccgaggacaccgccgtgtactattgtgcctctggcgtgtacagcttcgactacagaggccagggcaccctggtcacagtctcttctggtaccggcggaggcggatctggcggcggaggtagcggtggcggaggatctgaattcgacgtcgtgatgacccagagccctctgagcctgcctgtgacactgggacagcctgccagcatctcctgtcggagcagccagagcatcgtgcacagcgacggcaacacctacctggaatggtatcagcagcggccaggccagagccccagacggctgatctacaaggtgtccaacagattcagcggcgtgcccgacagattctccggcagcggctctggcaccgacttcaccctgaagatcagcagagtggaagccgaggacgtgggcgtgtactactgttttcaaggcagccacgccccctggacctttggcggaggaacaaaggtggaaatcaagctcgagggacagcctaaggccaatcctaccgtgacactgttccctccaagcagcgaagaactccaggccaacaaggccacacttgtgtgcctgatctccgacttctaccctggggctgtgacagtggcttggaaggccgatggatctcctgtgaaagccggcgtggaaaccaccaagccatccaagcagagcaacaacaaatacgccgccagctcctacctgagcctgacacctgagcagtggaagtcccacagatcctacagctgccaagtgacccacgaaggcagcaccgtggaaaagacagtggcccctacagagtgcagccccatcaagaccgatgtgattacaatggaccccaaggacaactgctccaaggacgccaacgataccctgctgctccagctgaccaacaccagcgcctactacatgtacttgttgctgctgctgaagtccgtggtgtacttcgccatcatcacatgctgcctgctgcggagaaccgccttctgctgcaacggcgagaagtctagggccaagcgatctggatctggagcaacaaacttctcactactcaaacaagcaggtgacgtggaggagaatcccgggcctactagtatggactggatttggcgcatccttttccttgtcggcgctgctaccggcgcgcattccttcgaagaagtgcaactggtggaatcaggcggcggactggtgcagcctggcggatctctgagactgagctgtgccgccagcggcttcaccttcagcagctacggaatgcactgggtgcgccaggcccctggcaaaggactggaatgggtggcctacatcaccaccagaagcagcaccatctactacgccgacagcgtgaagggccggttcaccatctccagagacaacgccaagaacagcctgtacctccagatgaactccctgcgggccgaggacaccgccgtgtactattgcaccagagagcccctgaccggctactacgctatggactattggggccagggcaccagcgtgaccgtgtctagtacgcgtgcctctacaaagggaccctccgtgtttcctctggctcccagcagcaagtctacaagcggaggaacagccgctctgggctgcctggtcaaggattactttcccgagcctgtgaccgtgtcctggaatagcggagcactgacaagcggcgtgcacacctttccagccgtgctgcaaagcagcggcctgtactctctgagcagcgtggtcacagtgcctagctctagcctgggcacccagacctacatctgcaatgtgaaccacaagcctagcaacaccaaggtggacaagagagtggaacccaagagctgtgaagtgaaaaccgactccaccgaccacgtgaagcccaaagagacagagaacaccaagcagcccagcaagagctgccacaagcccaaggccatcgtgcacaccgagaaagtgaacatgatgagcctgaccgtgctgggcctgcggatgctgttcgccaaaaccgtggccgtgaacttcctgctgaccgccaagctgttcttcctc

SEQ ID NO: 2872 - DNA, 2334 bp, Artificial Sequence
  Synthetic Polynucloetide
atggccttaccagtgaccgccttgctcctgccgctggccttgctgctccacgccgccaggccggaagtgcagctggttgaatctggcggaggactggttcagcctggcggatctctgagactgtcttgtgccgccagcggcttcagcttcagcgacttttggatgagctgggtccgacaggcccctggcaaaggacttgaatgggtcgccacaatcagccaggccggcagcgagaaggactacgtggactctgtgaagggcagattcaccatcagccgggacaacgccaagaagtccctgtacctccagatgaacagcctgagagccgaggacaccgccgtgtactattgtgcctctggcgtgtacagcttcgactacagaggccagggcaccctggtcacagtctcttctggtaccggcggaggcggatctggcggcggaggtagcggtggcggaggatctgaattcgacatccagatgacccagagccccagcagcctgtctgccagcgtgggcgacagagtgaccatcacctgtagagccagccagagcatcagcctgtggctgaactggtatcagcagaagcccggcaaggcccccaagctgctgatctacgccgccagcacactccagagcggcgtgccaagcagattttccggcagcggctccggcaccgacttcaccctgacaatcagctccctccagcccgaggacttcgccacctactactgccagcagtactacaccagcccctacaccttcggccagggcaccaaggtggaaatcaagagactcgagggacagcctaaggccaatcctaccgtgacactgttccctccaagcagcgaagaactccaggccaacaaggccacacttgtgtgcctgatctccgacttctaccctggggctgtgacagtggcttggaaggccgatggatctcctgtgaaagccggcgtggaaaccaccaagccatccaagcagagcaacaacaaatacgccgccagctcctacctgagcctgacacctgagcagtggaagtcccacagatcctacagctgccaagtgacccacgaaggcagcaccgtggaaaagacagtggcccctacagagtgcagccccatcaagaccgatgtgattacaatggaccccaaggacaactgctccaaggacgccaacgataccctgctgctccagctgaccaacaccagcgcctactacatgtacttgttgctgctgctgaagtccgtggtgtacttcgccatcatcacatgctgcctgctgcggagaaccgccttctgctgcaacggcgagaagtctagggccaagcgatctggatctggagcaacaaacttctcactactcaaacaagcaggtgacgtggaggagaatcccgggcctactagtatggactggatttggcgcatccttttccttgtcggcgctgctaccggcgcgcattccttcgaacaggtgcaactgctggaatctggcggcggactggtgcagcctggcggatctctgagactgagctgtgccgccagcggcttcaccttcagcagctacgccatgagctgggtgcgccaggcccctggaaaaggactggaatgggtgtccgtgatccggtccagcggcagcagcacctattacgccgatagcgtgaagggccggttcaccatcagccgggacaacagcaagaacaccctgtacctccagatgaacagcctgcgggccgaggacaccgccgtgtactattgtgctaggggaggcggctacttcgactactggggccagggaacactcgtgaccgtgtcctctacgcgtgcctctacaaagggaccctccgtgtttcctctggctcccagcagcaagtctacaagcggaggaacagccgctctgggctgcctggtcaaggattactttcccgagcctgtgaccgtgtcctggaatagcggagcactgacaagcggcgtgcacacctttccagccgtgctgcaaagcagcggcctgtactctctgagcagcgtggtcacagtgcctagctctagcctgggcacccagacctacatctgcaatgtgaaccacaagcctagcaacaccaaggtggacaagagagtggaacccaagagctgtgaagtgaaaaccgactccaccgaccacgtgaagcccaaagagacagagaacaccaagcagcccagcaagagctgccacaagcccaaggccatcgtgcacaccgagaaagtgaacatgatgagcctgaccgtgctgggcctgcggatgctgttcgccaaaaccgtggccgtgaacttcctgctgaccgccaagctgttcttcctc

SEQ ID NO: 2873 - DNA, 2343 bp, Artificial Sequence
  Synthetic Polynucloetide
atggccttaccagtgaccgccttgctcctgccgctggccttgctgctccacgccgccaggccggaagtgcagctggttgaatctggcggaggactggttcagcctggcggatctctgagactgtcttgtgccgccagcggcttcagcttcagcgacttttggatgagctgggtccgacaggcccctggcaaaggacttgaatgggtcgccacaatcagccaggccggcagcgagaaggactacgtggactctgtgaagggcagattcaccatcagccgggacaacgccaagaagtccctgtacctccagatgaacagcctgagagccgaggacaccgccgtgtactattgtgcctctggcgtgtacagcttcgactacagaggccagggcaccctggtcacagtctcttctggtaccggcggaggcggatctggcggcggaggtagcggtggcggaggatctgaattcgacatccagatgacccagagccccagcagcctgtctgccagcgtgggcgacagagtgaccatcacctgtagagccagccagagcatcagcagctacctgaactggtatcagcagaagcccggcaaggcccccaaactgctgatctacgccgtgtccacactccagagcggcgtgcccagcagattttctggcagcggctccggcaccgacttcaccctgacaatcagctccctccagcccgaggacttcgccacctactactgtcagcagagcggcaccttccctcccaccacatttggacagggcaccaaggtggaaatcaagagactcgagggacagcctaaggccaatcctaccgtgacactgttccctccaagcagcgaagaactccaggccaacaaggccacacttgtgtgcctgatctccgacttctaccctggggctgtgacagtggcttggaaggccgatggatctcctgtgaaagccggcgtggaaaccaccaagccatccaagcagagcaacaacaaatacgccgccagctcctacctgagcctgacacctgagcagtggaagtcccacagatcctacagctgccaagtgacccacgaaggcagcaccgtggaaaagacagtggcccctacagagtgcagccccatcaagaccgatgtgattacaatggaccccaaggacaactgctccaaggacgccaacgataccctgctgctccagctgaccaacaccagcgcctactacatgtacttgttgctgctgctgaagtccgtggtgtacttcgccatcatcacatgctgcctgctgcggagaaccgccttctgctgcaacggcgagaagtctagggccaagcgatctggatctggagcaacaaacttctcactactcaaacaagcaggtgacgtggaggagaatcccgggcctactagtatggactggatttggcgcatccttttccttgtcggcgctgctaccggcgcgcattccttcgaacaggtgcaactgctggaatctggcggcggactggtgcagcctggcggatctctgagactgagctgtgccgccagcggcttcaccttcagcagccacggaatgcactgggtgcgccaggcccctggaaagggactggaatgggtgtccgtgatctccggcagcggcagcaataccggctacgccgatagcgtgaagggccggttcaccatcagccgggacaacagcaagaacaccctgtacctccagatgaacagcctgcgggccgaggacaccgccgtgtactattgtgccagacagtggggcagctacgccttcgattcttggggccagggcaccctcgtgaccgtgtcatctacgcgtgcctctacaaagggaccctccgtgtttcctctggctcccagcagcaagtctacaagcggaggaacagccgctctgggctgcctggtcaaggattactttcccgagcctgtgaccgtgtcctggaatagcggagcactgacaagcggcgtgcacacctttccagccgtgctgcaaagcagcggcctgtactctctgagcagcgtggtcacagtgcctagctctagcctgggcacccagacctacatctgcaatgtgaaccacaagcctagcaacaccaaggtggacaagagagtggaacccaagagctgtgaagtgaaaaccgactccaccgaccacgtgaagcccaaagagacagagaacaccaagcagcccagcaagagctgccacaagcccaaggccatcgtgcacaccgagaaagtgaacatgatgagcctgaccgtgctgggcctgcggatgctgttcgccaaaaccgtggccgtgaacttcctgctgaccgccaagctgttcttcctc

SEQ ID NO: 2874 - DNA, 2373 bp, Artificial Sequence
  Synthetic Polynucloetide
atggccttaccagtgaccgccttgctcctgccgctggccttgctgctccacgccgccaggccggaagtgcagctggttgaatctggcggaggactggttcagcctggcggatctctgagactgtcttgtgccgccagcggcttcagcttcagcgacttttggatgagctgggtccgacaggcccctggcaaaggacttgaatgggtcgccacaatcagccaggccggcagcgagaaggactacgtggactctgtgaagggcagattcaccatcagccgggacaacgccaagaagtccctgtacctccagatgaacagcctgagagccgaggacaccgccgtgtactattgtgcctctggcgtgtacagcttcgactacagaggccagggcaccctggtcacagtctcttctggtaccggcggaggcggatctggcggcggaggtagcggtggcggaggatctgaattcgacatcgtgatgagccagagccctagcagcctggccgtgtccgtgggcgagaaagtgaccatgagctgcaagagcagccagtccctgctgcacagcagcaaccagaagaactacctggcctggtatcagcagaagcccggccagtcccccaaggtgctgatctactgggccagcaccagagaaagcggcgtgcccgatagattcaccggcagcggctctggcaccgacttcaccctgaccatcaccagcgtgaagtccgaggacctggctgtgtactactgccagcagtattacagctacccctggaccttcggcggaggcacccggctggaaatcaaaagactcgagggacagcctaaggccaatcctaccgtgacactgttccctccaagcagcgaagaactccaggccaacaaggccacacttgtgtgcctgatctccgacttctaccctggggctgtgacagtggcttggaaggccgatggatctcctgtgaaagccggcgtggaaaccaccaagccatccaagcagagcaacaacaaatacgccgccagctcctacctgagcctgacacctgagcagtggaagtcccacagatcctacagctgccaagtgacccacgaaggcagcaccgtggaaaagacagtggcccctacagagtgcagccccatcaagaccgatgtgattacaatggaccccaaggacaactgctccaaggacgccaacgataccctgctgctccagctgaccaacaccagcgcctactacatgtacttgttgctgctgctgaagtccgtggtgtacttcgccatcatcacatgctgcctgctgcggagaaccgccttctgctgcaacggcgagaagtctagggccaagcgatctggatctggagcaacaaacttctcactactcaaacaagcaggtgacgtggaggagaatcccgggcctactagtatggactggatttggcgcatccttttccttgtcggcgctgctaccggcgcgcattccttcgaagaagtgcaactccagcagagcgtggccgagcttgtgaagcctggcgcttccgtgaagatgtcctgcaaggtgtccggctacaccctgacagaccacaccatccactggatgaagcagcggcctgagcagggcctggaatggatcggctacatctaccccagggacggcatcaccggctacaacgagaagttcaagggcaaggccacactgaccgccgacaccagcagcagcacagcctacatgcaactgaacagcctgaccagcgaggacagcgccgtgtacttctgtgccagatggggctacagctacagaaactacgcctactactacgactactggggccagggcacaaccctgaccgtgtctagtacgcgtgcctctacaaagggaccctccgtgtttcctctggctcccagcagcaagtctacaagcggaggaacagccgctctgggctgcctggtcaaggattactttcccgagcctgtgaccgtgtcctggaatagcggagcactgacaagcggcgtgcacacctttccagccgtgctgcaaagcagcggcctgtactctctgagcagcgtggtcacagtgcctagctctagcctgggcacccagacctacatctgcaatgtgaaccacaagcctagcaacaccaaggtggacaagagagtggaacccaagagctgtgaagtgaaaaccgactccaccgaccacgtgaagcccaaagagacagagaacaccaagcagcccagcaagagctgccacaagcccaaggccatcgtgcacaccgagaaagtgaacatgatgagcctgaccgtgctgggcctgcggatgctgttcgccaaaaccgtggccgtgaacttcctgctgaccgccaagctgttcttcctc

SEQ ID NO: 2875 - DNA, 2364 bp, Artificial Sequence
  Synthetic Polynucloetide
atggccttaccagtgaccgccttgctcctgccgctggccttgctgctccacgccgccaggccggaagtgcagctggttgaatctggcggaggactggttcagcctggcggatctctgagactgtcttgtgccgccagcggcttcagcttcagcgacttttggatgagctgggtccgacaggcccctggcaaaggacttgaatgggtcgccacaatcagccaggccggcagcgagaaggactacgtggactctgtgaagggcagattcaccatcagccgggacaacgccaagaagtccctgtacctccagatgaacagcctgagagccgaggacaccgccgtgtactattgtgcctctggcgtgtacagcttcgactacagaggccagggcaccctggtcacagtctcttctggtaccggcggaggcggatctggcggcggaggtagcggtggcggaggatctgaattcgagatcgtgctgacacagagccctggcaccctgagcctgtctccaggcgaaagagccacactgagctgtcgggccagccagagcgtgtccagctcttacctggcctggtatcagcagaagcccggccaggctccccggctgctgatctacggaacaagcagcagagccaccggcatccccgacagattttctggcagcggctccggcaccgacttcaccctgacaatcagcagactggaacccgaggacttcgccgtgtactactgccagcagtacggcagcagccccttcacctttggcggaggcaccaaggtggaaatcaagagactcgagggacagcctaaggccaatcctaccgtgacactgttccctccaagcagcgaagaactccaggccaacaaggccacacttgtgtgcctgatctccgacttctaccctggggctgtgacagtggcttggaaggccgatggatctcctgtgaaagccggcgtggaaaccaccaagccatccaagcagagcaacaacaaatacgccgccagctcctacctgagcctgacacctgagcagtggaagtcccacagatcctacagctgccaagtgacccacgaaggcagcaccgtggaaaagacagtggcccctacagagtgcagccccatcaagaccgatgtgattacaatggaccccaaggacaactgctccaaggacgccaacgataccctgctgctccagctgaccaacaccagcgcctactacatgtacttgttgctgctgctgaagtccgtggtgtacttcgccatcatcacatgctgcctgctgcggagaaccgccttctgctgcaacggcgagaagtctagggccaagcgatctggatctggagcaacaaacttctcactactcaaacaagcaggtgacgtggaggagaatcccgggcctactagtatggactggatttggcgcatccttttccttgtcggcgctgctaccggcgcgcattccttcgaacaggtgcaactccaggaatctggccccggactggctaagcccagcgagacactgagcctgacctgtaccgtgtccggcgacagcatcaccagctactactggtcctggatcagacagccccctggcaagggcctggaatggatcggctacatctactacagcggcagcaccaactacaaccccagcctgaagtccagagtgaccatcagcgtggacaccagcaagaaccagttctccctgaagctgagcagcgtgacagccgccgacaccgccgtgtattattgcgccagagatcagcggagaatcgccgctgccggcacccacttttacggcatggatgtgtggggccagggcaccaccgtgaccgtgtcatctacgcgtgcctctacaaagggaccctccgtgtttcctctggctcccagcagcaagtctacaagcggaggaacagccgctctgggctgcctggtcaaggattactttcccgagcctgtgaccgtgtcctggaatagcggagcactgacaagcggcgtgcacacctttccagccgtgctgcaaagcagcggcctgtactctctgagcagcgtggtcacagtgcctagctctagcctgggcacccagacctacatctgcaatgtgaaccacaagcctagcaacaccaaggtggacaagagagtggaacccaagagctgtgaagtgaaaaccgactccaccgaccacgtgaagcccaaagagacagagaacaccaagcagcccagcaagagctgccacaagcccaaggccatcgtgcacaccgagaaagtgaacatgatgagcctgaccgtgctgggcctgcggatgctgttcgccaaaaccgtggccgtgaacttcctgctgaccgccaagctgttcttcctc

SEQ ID NO: 2876 - DNA, 2340 bp, Artificial Sequence
  Synthetic Polynucloetide
atggccttaccagtgaccgccttgctcctgccgctggccttgctgctccacgccgccaggccggaagtgcagctggttgaatctggcggaggactggttcagcctggcggatctctgagactgtcttgtgccgccagcggcttcagcttcagcgacttttggatgagctgggtccgacaggcccctggcaaaggacttgaatgggtcgccacaatcagccaggccggcagcgagaaggactacgtggactctgtgaagggcagattcaccatcagccgggacaacgccaagaagtccctgtacctccagatgaacagcctgagagccgaggacaccgccgtgtactattgtgcctctggcgtgtacagcttcgactacagaggccagggcaccctggtcacagtctcttctggtaccggcggaggcggatctggcggcggaggtagcggtggcggaggatctgaattcgacatcctgctgacccagagccccgtgatcctgtccgtgtctcctggcgagagagtgtccttcagctgtcgggccagccagagcatcggcaccaacatccactggtatcagcagcggaccaacggcagccccagactgctgattaagtacgccagcgagtccatcagcggcatccccagcagattttccggcagcggctccggcaccgacttcaccctgagcatcaacagcgtggaaagcgaggacattgccgactactactgccagcagaacaacaactggcccaccaccttcggagccggcaccaagctggaactgaagctcgagggacagcctaaggccaatcctaccgtgacactgttccctccaagcagcgaagaactccaggccaacaaggccacacttgtgtgcctgatctccgacttctaccctggggctgtgacagtggcttggaaggccgatggatctcctgtgaaagccggcgtggaaaccaccaagccatccaagcagagcaacaacaaatacgccgccagctcctacctgagcctgacacctgagcagtggaagtcccacagatcctacagctgccaagtgacccacgaaggcagcaccgtggaaaagacagtggcccctacagagtgcagccccatcaagaccgatgtgattacaatggaccccaaggacaactgctccaaggacgccaacgataccctgctgctccagctgaccaacaccagcgcctactacatgtacttgttgctgctgctgaagtccgtggtgtacttcgccatcatcacatgctgcctgctgcggagaaccgccttctgctgcaacggcgagaagtctagggccaagcgatctggatctggagcaacaaacttctcactactcaaacaagcaggtgacgtggaggagaatcccgggcctactagtatggactggatttggcgcatccttttccttgtcggcgctgctaccggcgcgcattccttcgaacaggtgcagctgaagcagagcggacctggcctggtgcagcctagccagagcctgtccatcacctgtaccgtgtccggcttcagcctgaccaactacggcgtgcactgggtgcgccagagccctggaaaaggactggaatggctgggagtgatttggagcggcggcaacaccgactacaacacccccttcaccagcagactgtctatcaacaaggacaacagcaagagccaggtgttcttcaagatgaacagcctccagagcaacgacaccgccatctactactgtgctagagccctgacctactatgactacgagttcgcctactggggccagggcacactcgtgacagtgtctgctacgcgtgcctctacaaagggaccctccgtgtttcctctggctcccagcagcaagtctacaagcggaggaacagccgctctgggctgcctggtcaaggattactttcccgagcctgtgaccgtgtcctggaatagcggagcactgacaagcggcgtgcacacctttccagccgtgctgcaaagcagcggcctgtactctctgagcagcgtggtcacagtgcctagctctagcctgggcacccagacctacatctgcaatgtgaaccacaagcctagcaacaccaaggtggacaagagagtggaacccaagagctgtgaagtgaaaaccgactccaccgaccacgtgaagcccaaagagacagagaacaccaagcagcccagcaagagctgccacaagcccaaggccatcgtgcacaccgagaaagtgaacatgatgagcctgaccgtgctgggcctgcggatgctgttcgccaaaaccgtggccgtgaacttcctgctgaccgccaagctgttcttcctc

SEQ ID NO: 2877 - DNA, 2319 bp, Artificial Sequence
  Synthetic Polynucloetide
atggccttaccagtgaccgccttgctcctgccgctggccttgctgctccacgccgccaggccggaagtgcagctggttgaatctggcggaggactggttcagcctggcggatctctgagactgtcttgtgccgccagcggcttcagcttcagcgacttttggatgagctgggtccgacaggcccctggcaaaggacttgaatgggtcgccacaatcagccaggccggcagcgagaaggactacgtggactctgtgaagggcagattcaccatcagccgggacaacgccaagaagtccctgtacctccagatgaacagcctgagagccgaggacaccgccgtgtactattgtgcctctggcgtgtacagcttcgactacagaggccagggcaccctggtcacagtctcttctggtaccggcggaggcggatctggcggcggaggtagcggtggcggaggatctgaattcatgacccagagccccaagttcctgctggtgtctgccggcgacagagtgaccctgacatgcaaggccagccagagcgtgaacaacgacgtgtactggtatcagcaggaacccggccagtcccccaagctgctgatctactgggccagcaccagagaaagcggcgtgcccgatagattcaccggcagcggctctggcaccgacttcaccctgacaatcagcagcgtgcaggccgaggacctggccgtgtactactgcaagcagagctacaacctgtacaccttcggcggaggcaccaagctggaaatcaagagactcgagggacagcctaaggccaatcctaccgtgacactgttccctccaagcagcgaagaactccaggccaacaaggccacacttgtgtgcctgatctccgacttctaccctggggctgtgacagtggcttggaaggccgatggatctcctgtgaaagccggcgtggaaaccaccaagccatccaagcagagcaacaacaaatacgccgccagctcctacctgagcctgacacctgagcagtggaagtcccacagatcctacagctgccaagtgacccacgaaggcagcaccgtggaaaagacagtggcccctacagagtgcagccccatcaagaccgatgtgattacaatggaccccaaggacaactgctccaaggacgccaacgataccctgctgctccagctgaccaacaccagcgcctactacatgtacttgttgctgctgctgaagtccgtggtgtacttcgccatcatcacatgctgcctgctgcggagaaccgccttctgctgcaacggcgagaagtctagggccaagcgatctggatctggagcaacaaacttctcactactcaaacaagcaggtgacgtggaggagaatcccgggcctactagtatggactggatttggcgcatccttttccttgtcggcgctgctaccggcgcgcattccttcgaagaatctggaagaggactggtgcagcctggcggcagcagaaagctgtcttgtgccgccagcggcttcaccttcagcaccagcggaatgcactgggtgcgccaggcccctgagaagggactggaatgggtggcctacatcagctccggcagcaccaccatctaccacgccgataccgtgaagggccggttcaccatcagccgggacaaccccaagaataccctgttcctccagatgaccagcctgcggagcgaggacaccgccatgtactattgctgcgccagaagcggccagttcggcaactacttcgactactggggccagggcaccaccctgaccgtgtcatctacgcgtgcctctacaaagggaccctccgtgtttcctctggctcccagcagcaagtctacaagcggaggaacagccgctctgggctgcctggtcaaggattactttcccgagcctgtgaccgtgtcctggaatagcggagcactgacaagcggcgtgcacacctttccagccgtgctgcaaagcagcggcctgtactctctgagcagcgtggtcacagtgcctagctctagcctgggcacccagacctacatctgcaatgtgaaccacaagcctagcaacaccaaggtggacaagagagtggaacccaagagctgtgaagtgaaaaccgactccaccgaccacgtgaagcccaaagagacagagaacaccaagcagcccagcaagagctgccacaagcccaaggccatcgtgcacaccgagaaagtgaacatgatgagcctgaccgtgctgggcctgcggatgctgttcgccaaaaccgtggccgtgaacttcctgctgaccgccaagctgttcttcctc

SEQ ID NO: 2878 - DNA, 2334 bp, Artificial Sequence
  Synthetic Polynucloetide
atggccttaccagtgaccgccttgctcctgccgctggccttgctgctccacgccgccaggccggaagtgcagctggttgaatctggcggaggactggttcagcctggcggatctctgagactgtcttgtgccgccagcggcttcagcttcagcgacttttggatgagctgggtccgacaggcccctggcaaaggacttgaatgggtcgccacaatcagccaggccggcagcgagaaggactacgtggactctgtgaagggcagattcaccatcagccgggacaacgccaagaagtccctgtacctccagatgaacagcctgagagccgaggacaccgccgtgtactattgtgcctctggcgtgtacagcttcgactacagaggccagggcaccctggtcacagtctcttctggtaccggcggaggcggatctggcggcggaggtagcggtggcggaggatctgaattccagagcccatctagcctggctgtgtctgccggcgagaaagtgaccatgagctgcaagagcagccagagcctgctgaacagccggacccggaagaactacctggcctggtatcagcagaagcccggccagagccccaagctgctgatctactgggccagcaccagagaaagcggcgtgcccgatagattcaccggctctggcagcggcaccgacttcaccctgacaatcagcagcgtgcaggccgaggacctggccgtgtactactgcaagcagagcaacctgtacaccttcggcggaggcaccaagctggaaatcaagctcgagggacagcctaaggccaatcctaccgtgacactgttccctccaagcagcgaagaactccaggccaacaaggccacacttgtgtgcctgatctccgacttctaccctggggctgtgacagtggcttggaaggccgatggatctcctgtgaaagccggcgtggaaaccaccaagccatccaagcagagcaacaacaaatacgccgccagctcctacctgagcctgacacctgagcagtggaagtcccacagatcctacagctgccaagtgacccacgaaggcagcaccgtggaaaagacagtggcccctacagagtgcagccccatcaagaccgatgtgattacaatggaccccaaggacaactgctccaaggacgccaacgataccctgctgctccagctgaccaacaccagcgcctactacatgtacttgttgctgctgctgaagtccgtggtgtacttcgccatcatcacatgctgcctgctgcggagaaccgccttctgctgcaacggcgagaagtctagggccaagcgatctggatctggagcaacaaacttctcactactcaaacaagcaggtgacgtggaggagaatcccgggcctactagtatggactggatttggcgcatccttttccttgtcggcgctgctaccggcgcgcattccttcgaacaggtgcagctggaagagtctggacccgagcttgtgaagcctggggccagcgtgaagctgtcctgtaaagccagcggctacaccttcaccgagtacatcatccactgggtcaagcagcggagcggccagggcctggaatggatcggctggttttaccctggctccggcagcatcaagtacaacgagaagttcaaggacaaggccaccctgaccgccgacaagtccagcagcaccgtgtacatggaactgagcggcctgaccagcgaggacagcgccgtgtatttctgcgccagacacgacggctacagctacttcgactattggggccagggcaccacactgaccgtgtcctctacgcgtgcctctacaaagggaccctccgtgtttcctctggctcccagcagcaagtctacaagcggaggaacagccgctctgggctgcctggtcaaggattactttcccgagcctgtgaccgtgtcctggaatagcggagcactgacaagcggcgtgcacacctttccagccgtgctgcaaagcagcggcctgtactctctgagcagcgtggtcacagtgcctagctctagcctgggcacccagacctacatctgcaatgtgaaccacaagcctagcaacaccaaggtggacaagagagtggaacccaagagctgtgaagtgaaaaccgactccaccgaccacgtgaagcccaaagagacagagaacaccaagcagcccagcaagagctgccacaagcccaaggccatcgtgcacaccgagaaagtgaacatgatgagcctgaccgtgctgggcctgcggatgctgttcgccaaaaccgtggccgtgaacttcctgctgaccgccaagctgttcttcctc

SEQ ID NO: 2879 - DNA, 2343 bp, Artificial Sequence
  Synthetic Polynucloetide
atggccttaccagtgaccgccttgctcctgccgctggccttgctgctccacgccgccaggccggaagtgcagctggttgaatctggcggaggactggttcagcctggcggatctctgagactgtcttgtgccgccagcggcttcagcttcagcgacttttggatgagctgggtccgacaggcccctggcaaaggacttgaatgggtcgccacaatcagccaggccggcagcgagaaggactacgtggactctgtgaagggcagattcaccatcagccgggacaacgccaagaagtccctgtacctccagatgaacagcctgagagccgaggacaccgccgtgtactattgtgcctctggcgtgtacagcttcgactacagaggccagggcaccctggtcacagtctcttctggtaccggcggaggcggatctggcggcggaggtagcggtggcggaggatctgaattcgacatccagatgacccagagccccagcagcctgtctgcctctctgggcgagagagtgtccctgacctgtcgggccacacaggaactgagcggctacctgtcttggctgcagcagaagcccgacggcaccatcaagcggctgatctacgccgccagcaccctggatagcggcgtgcccaagagattcagcggcaacagaagcggcagcgactacagcctgaccatcagctccctggaaagcgaggacttcgccgactactactgcctgcagtacgccatctacccctacaccttcggcggaggcaccaagctggaaatcaagctcgagggacagcctaaggccaatcctaccgtgacactgttccctccaagcagcgaagaactccaggccaacaaggccacacttgtgtgcctgatctccgacttctaccctggggctgtgacagtggcttggaaggccgatggatctcctgtgaaagccggcgtggaaaccaccaagccatccaagcagagcaacaacaaatacgccgccagctcctacctgagcctgacacctgagcagtggaagtcccacagatcctacagctgccaagtgacccacgaaggcagcaccgtggaaaagacagtggcccctacagagtgcagccccatcaagaccgatgtgattacaatggaccccaaggacaactgctccaaggacgccaacgataccctgctgctccagctgaccaacaccagcgcctactacatgtacttgttgctgctgctgaagtccgtggtgtacttcgccatcatcacatgctgcctgctgcggagaaccgccttctgctgcaacggcgagaagtctagggccaagcgatctggatctggagcaacaaacttctcactactcaaacaagcaggtgacgtggaggagaatcccgggcctactagtatggactggatttggcgcatccttttccttgtcggcgctgctaccggcgcgcattccttcgaagaggtgcaactgcagcagtctggccccgagcttgtgaagcctggcgcctccgtgaagatgagctgcaaggccagcggctacacctttaccagctacttcatccactgggtcaagcagaaacccggccagggcctggaatggatcggcttcatcaacccttacaacgacggcagcaagtacaacgagaagttcaagggcaaggccaccctgaccagcgacaagagcagcagcaccgcctacatggaactgtccagcctgacatccgaggacagcgccgtgtactactgcaccagggacgacggctactacggctacgccatggactactggggccagggaacaagcgtcaccgtgtcctctacgcgtgcctctacaaagggaccctccgtgtttcctctggctcccagcagcaagtctacaagcggaggaacagccgctctgggctgcctggtcaaggattactttcccgagcctgtgaccgtgtcctggaatagcggagcactgacaagcggcgtgcacacctttccagccgtgctgcaaagcagcggcctgtactctctgagcagcgtggtcacagtgcctagctctagcctgggcacccagacctacatctgcaatgtgaaccacaagcctagcaacaccaaggtggacaagagagtggaacccaagagctgtgaagtgaaaaccgactccaccgaccacgtgaagcccaaagagacagagaacaccaagcagcccagcaagagctgccacaagcccaaggccatcgtgcacaccgagaaagtgaacatgatgagcctgaccgtgctgggcctgcggatgctgttcgccaaaaccgtggccgtgaacttcctgctgaccgccaagctgttcttcctc

SEQ ID NO: 2880 - DNA, 2358 bp, Artificial Sequence
  Synthetic Polynucloetide
atggccttaccagtgaccgccttgctcctgccgctggccttgctgctccacgccgccaggccggaagtgcagctggttgaatctggcggaggactggttcagcctggcggatctctgagactgtcttgtgccgccagcggcttcagcttcagcgacttttggatgagctgggtccgacaggcccctggcaaaggacttgaatgggtcgccacaatcagccaggccggcagcgagaaggactacgtggactctgtgaagggcagattcaccatcagccgggacaacgccaagaagtccctgtacctccagatgaacagcctgagagccgaggacaccgccgtgtactattgtgcctctggcgtgtacagcttcgactacagaggccagggcaccctggtcacagtctcttctggtaccggcggaggcggatctggcggcggaggtagcggtggcggaggatctgaattcgacaccatcgtgctgacacagagccctgcttccctggccgtgtccctgggacagagagccaccatctcttgcagagccagcgagagcgtggacagctacggcaacagcttcatgcactggtatcagcagaagcccggccagccccccaagctgctgatctacctggcctccaacctggaaagcggcgtgcccgccagattttctggcagcggcagcagaaccgacttcaccctgaccatcgaccccgtggaagccgatgatgccgccacctactactgccagcagaacaactacgacccctggaccttcggcggaggcaccaagctggaaatcaagctcgagggacagcctaaggccaatcctaccgtgacactgttccctccaagcagcgaagaactccaggccaacaaggccacacttgtgtgcctgatctccgacttctaccctggggctgtgacagtggcttggaaggccgatggatctcctgtgaaagccggcgtggaaaccaccaagccatccaagcagagcaacaacaaatacgccgccagctcctacctgagcctgacacctgagcagtggaagtcccacagatcctacagctgccaagtgacccacgaaggcagcaccgtggaaaagacagtggcccctacagagtgcagccccatcaagaccgatgtgattacaatggaccccaaggacaactgctccaaggacgccaacgataccctgctgctccagctgaccaacaccagcgcctactacatgtacttgttgctgctgctgaagtccgtggtgtacttcgccatcatcacatgctgcctgctgcggagaaccgccttctgctgcaacggcgagaagtctagggccaagcgatctggatctggagcaacaaacttctcactactcaaacaagcaggtgacgtggaggagaatcccgggcctactagtatggactggatttggcgcatccttttccttgtcggcgctgctaccggcgcgcattccttcgaagaagtgcaactccagcagagcggccctgagcttgtgaagcctggcgcttccgtgaagatgagctgcaaggccagcggctacaccttcaccagctacgtgatgcactgggtcaagcagaaacctggacagggcctggaatggatcggctacatcaacccctacaacgacggcaccaagtacaacgagaagttcaagggcaaggccaccctgacaagcgacaccagcagcagcaccgcctacatggaactgaacagcctgaccagcgaggacagcgccgtgtacttctgcgccagacccatctacttcgacaacgactacttcgattactggggccagggcaccaccctgaaggtgtcctctacgcgtgcctctacaaagggaccctccgtgtttcctctggctcccagcagcaagtctacaagcggaggaacagccgctctgggctgcctggtcaaggattactttcccgagcctgtgaccgtgtcctggaatagcggagcactgacaagcggcgtgcacacctttccagccgtgctgcaaagcagcggcctgtactctctgagcagcgtggtcacagtgcctagctctagcctgggcacccagacctacatctgcaatgtgaaccacaagcctagcaacaccaaggtggacaagagagtggaacccaagagctgtgaagtgaaaaccgactccaccgaccacgtgaagcccaaagagacagagaacaccaagcagcccagcaagagctgccacaagcccaaggccatcgtgcacaccgagaaagtgaacatgatgagcctgaccgtgctgggcctgcggatgctgttcgccaaaaccgtggccgtgaacttcctgctgaccgccaagctgttcttcctc

SEQ ID NO: 2881 - DNA, 2343 bp, Artificial Sequence
  Synthetic Polynucloetide
atggccttaccagtgaccgccttgctcctgccgctggccttgctgctccacgccgccaggccggaagtgcagctggttgaatctggcggaggactggttcagcctggcggatctctgagactgtcttgtgccgccagcggcttcagcttcagcgacttttggatgagctgggtccgacaggcccctggcaaaggacttgaatgggtcgccacaatcagccaggccggcagcgagaaggactacgtggactctgtgaagggcagattcaccatcagccgggacaacgccaagaagtccctgtacctccagatgaacagcctgagagccgaggacaccgccgtgtactattgtgcctctggcgtgtacagcttcgactacagaggccagggcaccctggtcacagtctcttctggtaccggcggaggcggatctggcggcggaggtagcggtggcggaggatctgaattcgacatccagatgacccagagccccagcagcctgtctgccagcgtgggcgacagagtgaccatcacatgcaaggccagccaggacgtgggaatcgccgtggcctggtatcagcagaaacccggcaaggtgcccaagctgctgatctactgggccagcaccagacacaccggcgtgcccgatagattttccggcagcggctccggcaccgacttcaccctgacaatcagctccctccagcccgaggacgtggcaacctactactgccagcagtacagcagctacccctacaccttcggccagggcaccaaggtggaaatcaagagactcgagggacagcctaaggccaatcctaccgtgacactgttccctccaagcagcgaagaactccaggccaacaaggccacacttgtgtgcctgatctccgacttctaccctggggctgtgacagtggcttggaaggccgatggatctcctgtgaaagccggcgtggaaaccaccaagccatccaagcagagcaacaacaaatacgccgccagctcctacctgagcctgacacctgagcagtggaagtcccacagatcctacagctgccaagtgacccacgaaggcagcaccgtggaaaagacagtggcccctacagagtgcagccccatcaagaccgatgtgattacaatggaccccaaggacaactgctccaaggacgccaacgataccctgctgctccagctgaccaacaccagcgcctactacatgtacttgttgctgctgctgaagtccgtggtgtacttcgccatcatcacatgctgcctgctgcggagaaccgccttctgctgcaacggcgagaagtctagggccaagcgatctggatctggagcaacaaacttctcactactcaaacaagcaggtgacgtggaggagaatcccgggcctactagtatggactggatttggcgcatccttttccttgtcggcgctgctaccggcgcgcattccttcgaagaagtgcaactggtggaatcaggcggcggactggtgcagcctggcggatctctgagactgagctgtgccgccagcggcttcgacttcagccggtactggatgagctgggtgcgccaggcccctggcaaaggactggaatggatcggcgagatcaaccccgacagcagcaccatcaactacgcccccagcctgaaggacaagttcatcatcagccgggacaacgccaagaacagcctgtacctccagatgaactccctgcgggccgaggacaccgccgtgtactattgcgccagacccgacggcaactactggtacttcgacgtgtggggccagggaaccctcgtgaccgtgtcatctacgcgtgcctctacaaagggaccctccgtgtttcctctggctcccagcagcaagtctacaagcggaggaacagccgctctgggctgcctggtcaaggattactttcccgagcctgtgaccgtgtcctggaatagcggagcactgacaagcggcgtgcacacctttccagccgtgctgcaaagcagcggcctgtactctctgagcagcgtggtcacagtgcctagctctagcctgggcacccagacctacatctgcaatgtgaaccacaagcctagcaacaccaaggtggacaagagagtggaacccaagagctgtgaagtgaaaaccgactccaccgaccacgtgaagcccaaagagacagagaacaccaagcagcccagcaagagctgccacaagcccaaggccatcgtgcacaccgagaaagtgaacatgatgagcctgaccgtgctgggcctgcggatgctgttcgccaaaaccgtggccgtgaacttcctgctgaccgccaagctgttcttcctc

SEQ ID NO: 2882 - DNA, 2343 bp, Artificial Sequence
  Synthetic Polynucloetide
atggccttaccagtgaccgccttgctcctgccgctggccttgctgctccacgccgccaggccggaagtgcagctggttgaatctggcggaggactggttcagcctggcggatctctgagactgtcttgtgccgccagcggcttcagcttcagcgacttttggatgagctgggtccgacaggcccctggcaaaggacttgaatgggtcgccacaatcagccaggccggcagcgagaaggactacgtggactctgtgaagggcagattcaccatcagccgggacaacgccaagaagtccctgtacctccagatgaacagcctgagagccgaggacaccgccgtgtactattgtgcctctggcgtgtacagcttcgactacagaggccagggcaccctggtcacagtctcttctggtaccggcggaggcggatctggcggcggaggtagcggtggcggaggatctgaattcgacatcgtgatgacccagagccagaagagcatgagcaccagcgtgggcgacagagtgagcatcacctgcaaggccagccaggacgtgatcaccggcgtggcctggtaccagcagaagcccggccagagccccaagctgctgatctacagcgccagctacagatacaccggcgtgcccgacagattcaccggcagcggcagcggcaccgacttcaccttcaccatcagcaacgtgcaggccgaggacctggccgtgtactactgccagcagcactacagcacccccctgaccttcggcgccggcaccaagctggagctgaagctcgagggacagcctaaggccaatcctaccgtgacactgttccctccaagcagcgaagaactccaggccaacaaggccacacttgtgtgcctgatctccgacttctaccctggggctgtgacagtggcttggaaggccgatggatctcctgtgaaagccggcgtggaaaccaccaagccatccaagcagagcaacaacaaatacgccgccagctcctacctgagcctgacacctgagcagtggaagtcccacagatcctacagctgccaagtgacccacgaaggcagcaccgtggaaaagacagtggcccctacagagtgcagccccatcaagaccgatgtgattacaatggaccccaaggacaactgctccaaggacgccaacgataccctgctgctccagctgaccaacaccagcgcctactacatgtacttgttgctgctgctgaagtccgtggtgtacttcgccatcatcacatgctgcctgctgcggagaaccgccttctgctgcaacggcgagaagtctagggccaagcgatctggatctggagcaacaaacttctcactactcaaacaagcaggtgacgtggaggagaatcccgggcctactagtatggactggatttggcgcatccttttccttgtcggcgctgctaccggcgcgcattccttcgaacaggtgcagctgcagcagcccggcgccgagctggtgagacccggcgccagcgtgaagctgagctgcaaggccagcggctacagcttcaccacctactggatgaactgggtgaagcagagacccggccagggcctggagtggatcggcatgatccaccccagcgacagcgagaccagactgaaccagaagttcaaggacaaggccaccctgaccgtggacaagagcagcagcaccgcctacatgcagctgagcagccccaccagcgaggacagcgccgtgtactactgcgccagaagcaccatgatcgccaccagagccatggactactggggccagggcaccagcgtgaccgtgagcagcacgcgtgcctctacaaagggaccctccgtgtttcctctggctcccagcagcaagtctacaagcggaggaacagccgctctgggctgcctggtcaaggattactttcccgagcctgtgaccgtgtcctggaatagcggagcactgacaagcggcgtgcacacctttccagccgtgctgcaaagcagcggcctgtactctctgagcagcgtggtcacagtgcctagctctagcctgggcacccagacctacatctgcaatgtgaaccacaagcctagcaacaccaaggtggacaagagagtggaacccaagagctgtgaagtgaaaaccgactccaccgaccacgtgaagcccaaagagacagagaacaccaagcagcccagcaagagctgccacaagcccaaggccatcgtgcacaccgagaaagtgaacatgatgagcctgaccgtgctgggcctgcggatgctgttcgccaaaaccgtggccgtgaacttcctgctgaccgccaagctgttcttcctc

SEQ ID NO: 2883 - DNA, 2361 bp, Artificial Sequence
  Synthetic Polynucloetide
atggccttaccagtgaccgccttgctcctgccgctggccttgctgctccacgccgccaggccggaagtgcagctggttgaatctggcggaggactggttcagcctggcggatctctgagactgtcttgtgccgccagcggcttcagcttcagcgacttttggatgagctgggtccgacaggcccctggcaaaggacttgaatgggtcgccacaatcagccaggccggcagcgagaaggactacgtggactctgtgaagggcagattcaccatcagccgggacaacgccaagaagtccctgtacctccagatgaacagcctgagagccgaggacaccgccgtgtactattgtgcctctggcgtgtacagcttcgactacagaggccagggcaccctggtcacagtctcttctggtaccggcggaggcggatctggcggcggaggtagcggtggcggaggatctgaattccagagcgtgctgacacagcctccatccgtgtctggcgctccaggccagagagtgaccatctcctgtaccggcagcggcagcaacatcggagccccctacgacgtgtcctggtatcagcaactgcctggcaccgcccccaagctgctgatctaccacaacaacaagcggcccagcggcgtgcccgatagattcagcggctctaagagcggcaccagcgccagcctggctatcactggactccaggccgaggacgaggccgactactactgtgccacagtggaagccggcctgagcggctctgtgtttggcggcggaacaaagctgaccgtgctgggagctctcgagggacagcctaaggccaatcctaccgtgacactgttccctccaagcagcgaagaactccaggccaacaaggccacacttgtgtgcctgatctccgacttctaccctggggctgtgacagtggcttggaaggccgatggatctcctgtgaaagccggcgtggaaaccaccaagccatccaagcagagcaacaacaaatacgccgccagctcctacctgagcctgacacctgagcagtggaagtcccacagatcctacagctgccaagtgacccacgaaggcagcaccgtggaaaagacagtggcccctacagagtgcagccccatcaagaccgatgtgattacaatggaccccaaggacaactgctccaaggacgccaacgataccctgctgctccagctgaccaacaccagcgcctactacatgtacttgttgctgctgctgaagtccgtggtgtacttcgccatcatcacatgctgcctgctgcggagaaccgccttctgctgcaacggcgagaagtctagggccaagcgatctggatctggagcaacaaacttctcactactcaaacaagcaggtgacgtggaggagaatcccgggcctactagtatggactggatttggcgcatccttttccttgtcggcgctgctaccggcgcgcattccttcgaacaggtgcaactggtgcagagcggagccgaagtgaagaaacctggggccagcgtgaaggtgtcctgcaaggtgtccggctacaccctgaccgagctgagcattcactgggtgcgccaggcccctggcaagggactggaatggatgggcggcttcgaccccgaagagaacgagatcgtgtacgcccagcggttccagggcagagtgacaatgaccgaggacaccagcaccgacaccgcctacatggaactgagcagcctgcggagcgaggataccgccgtgtactactgcgccatcgtgggcagcttcagccctctgacactgggcctgtggggccagggaactatggtcaccgtgtccagcacgcgtgcctctacaaagggaccctccgtgtttcctctggctcccagcagcaagtctacaagcggaggaacagccgctctgggctgcctggtcaaggattactttcccgagcctgtgaccgtgtcctggaatagcggagcactgacaagcggcgtgcacacctttccagccgtgctgcaaagcagcggcctgtactctctgagcagcgtggtcacagtgcctagctctagcctgggcacccagacctacatctgcaatgtgaaccacaagcctagcaacaccaaggtggacaagagagtggaacccaagagctgtgaagtgaaaaccgactccaccgaccacgtgaagcccaaagagacagagaacaccaagcagcccagcaagagctgccacaagcccaaggccatcgtgcacaccgagaaagtgaacatgatgagcctgaccgtgctgggcctgcggatgctgttcgccaaaaccgtggccgtgaacttcctgctgaccgccaagctgttcttcctc

SEQ ID NO: 2884 - DNA, 2361 bp, Artificial Sequence
  Synthetic Polynucloetide
atggccttaccagtgaccgccttgctcctgccgctggccttgctgctccacgccgccaggccggaagtgcagctggttgaatctggcggaggactggttcagcctggcggatctctgagactgtcttgtgccgccagcggcttcagcttcagcgacttttggatgagctgggtccgacaggcccctggcaaaggacttgaatgggtcgccacaatcagccaggccggcagcgagaaggactacgtggactctgtgaagggcagattcaccatcagccgggacaacgccaagaagtccctgtacctccagatgaacagcctgagagccgaggacaccgccgtgtactattgtgcctctggcgtgtacagcttcgactacagaggccagggcaccctggtcacagtctcttctggtaccggcggaggcggatctggcggcggaggtagcggtggcggaggatctgaattccagagcgtgctgacacagcctccatccgtgtctggcgctccaggccagagagtgaccatctcctgtaccggcagcggcagcaacatcggagccccctacgacgtgtcctggtatcagcaactgcctggcaccgcccccaagctgctgatctaccacaacaacaagcggcccagcggcgtgcccgatagattcagcggctctaagagcggcaccagcgccagcctggctatcactggactccaggccgaggacgaggccgactactactgccagagctacgacagcagcagcatcagcaccatcttcggcggaggcaccaagctgacagtgctgggagctctcgagggacagcctaaggccaatcctaccgtgacactgttccctccaagcagcgaagaactccaggccaacaaggccacacttgtgtgcctgatctccgacttctaccctggggctgtgacagtggcttggaaggccgatggatctcctgtgaaagccggcgtggaaaccaccaagccatccaagcagagcaacaacaaatacgccgccagctcctacctgagcctgacacctgagcagtggaagtcccacagatcctacagctgccaagtgacccacgaaggcagcaccgtggaaaagacagtggcccctacagagtgcagccccatcaagaccgatgtgattacaatggaccccaaggacaactgctccaaggacgccaacgataccctgctgctccagctgaccaacaccagcgcctactacatgtacttgttgctgctgctgaagtccgtggtgtacttcgccatcatcacatgctgcctgctgcggagaaccgccttctgctgcaacggcgagaagtctagggccaagcgatctggatctggagcaacaaacttctcactactcaaacaagcaggtgacgtggaggagaatcccgggcctactagtatggactggatttggcgcatccttttccttgtcggcgctgctaccggcgcgcattccttcgaacaggtgcaactggtgcagagcggagccgaagtgaagaaacctggggccagcgtgaaggtgtcctgcaaggtgtccggctacaccctgaccgagctgagcattcactgggtgcgccaggcccctggcaagggactggaatggatgggcggcttcgaccccgaagagaacgagatcgtgtacgcccagcggttccagggcagagtgacaatgaccgaggacaccagcaccgacaccgcctacatggaactgagcagcctgcggagcgaggataccgccgtgtactactgtgccatcgtgggcagcttcagcggaatcgcctacagaccttggggccagggcacaatggtcaccgtgtctagcacgcgtgcctctacaaagggaccctccgtgtttcctctggctcccagcagcaagtctacaagcggaggaacagccgctctgggctgcctggtcaaggattactttcccgagcctgtgaccgtgtcctggaatagcggagcactgacaagcggcgtgcacacctttccagccgtgctgcaaagcagcggcctgtactctctgagcagcgtggtcacagtgcctagctctagcctgggcacccagacctacatctgcaatgtgaaccacaagcctagcaacaccaaggtggacaagagagtggaacccaagagctgtgaagtgaaaaccgactccaccgaccacgtgaagcccaaagagacagagaacaccaagcagcccagcaagagctgccacaagcccaaggccatcgtgcacaccgagaaagtgaacatgatgagcctgaccgtgctgggcctgcggatgctgttcgccaaaaccgtggccgtgaacttcctgctgaccgccaagctgttcttcctc

SEQ ID NO: 2885 - DNA, 2325 bp, Artificial Sequence
  Synthetic Polynucloetide
atggccttaccagtgaccgccttgctcctgccgctggccttgctgctccacgccgccaggccggaagtgcagctggttgaatctggcggaggactggttcagcctggcggatctctgagactgtcttgtgccgccagcggcttcagcttcagcgacttttggatgagctgggtccgacaggcccctggcaaaggacttgaatgggtcgccacaatcagccaggccggcagcgagaaggactacgtggactctgtgaagggcagattcaccatcagccgggacaacgccaagaagtccctgtacctccagatgaacagcctgagagccgaggacaccgccgtgtactattgtgcctctggcgtgtacagcttcgactacagaggccagggcaccctggtcacagtctcttctggtaccggcggaggcggatctggcggcggaggtagcggtggcggaggatctgaattcgacatccagatgacccagagccccagcagcctgtctgccagcgtgggcgacagagtgaccatcacctgtagagccagccagggcatcagaaacaacctggcctggtatcagcagaagcccggcaaggcccccaagcggctgatctacgccgccagcaatctccagagcggcgtgcccagcagattcacaggctctggcagcggcaccgagttcaccctgatcgtgtctagcctccagcccgaggacttcgccacctactactgcctccagcaccacagctaccccctgacatctggcggaggcaccaaggtggaactcgagggacagcctaaggccaatcctaccgtgacactgttccctccaagcagcgaagaactccaggccaacaaggccacacttgtgtgcctgatctccgacttctaccctggggctgtgacagtggcttggaaggccgatggatctcctgtgaaagccggcgtggaaaccaccaagccatccaagcagagcaacaacaaatacgccgccagctcctacctgagcctgacacctgagcagtggaagtcccacagatcctacagctgccaagtgacccacgaaggcagcaccgtggaaaagacagtggcccctacagagtgcagccccatcaagaccgatgtgattacaatggaccccaaggacaactgctccaaggacgccaacgataccctgctgctccagctgaccaacaccagcgcctactacatgtacttgttgctgctgctgaagtccgtggtgtacttcgccatcatcacatgctgcctgctgcggagaaccgccttctgctgcaacggcgagaagtctagggccaagcgatctggatctggagcaacaaacttctcactactcaaacaagcaggtgacgtggaggagaatcccgggcctactagtatggactggatttggcgcatccttttccttgtcggcgctgctaccggcgcgcattccttcgaagaggtgcaggtgctggaaagtggcggaggactggtgcagcctggcggctctctgagactgtcttgtgccgccagcggcttcaccttcagcagctacgccatgagctgggtgcgccaggcccctggaaaaggactggaatgggtgtccgccatcagcggctctggcgggtctaccaactacgccgatagcgtgaagggccggttcaccatcagccgggacaacagcaagaacaccctgtacctccagatgaacagcctgcgggccgaggacaccgccgtgtattattgtgccggcagcagcgggtggagcgagtattggggacagggcaccctcgtgaccgtgtcctctacgcgtgcctctacaaagggaccctccgtgtttcctctggctcccagcagcaagtctacaagcggaggaacagccgctctgggctgcctggtcaaggattactttcccgagcctgtgaccgtgtcctggaatagcggagcactgacaagcggcgtgcacacctttccagccgtgctgcaaagcagcggcctgtactctctgagcagcgtggtcacagtgcctagctctagcctgggcacccagacctacatctgcaatgtgaaccacaagcctagcaacaccaaggtggacaagagagtggaacccaagagctgtgaagtgaaaaccgactccaccgaccacgtgaagcccaaagagacagagaacaccaagcagcccagcaagagctgccacaagcccaaggccatcgtgcacaccgagaaagtgaacatgatgagcctgaccgtgctgggcctgcggatgctgttcgccaaaaccgtggccgtgaacttcctgctgaccgccaagctgttcttcctc

SEQ ID NO: 2886 - DNA, 2343 bp, Artificial Sequence
  Synthetic Polynucloetide
atggccttaccagtgaccgccttgctcctgccgctggccttgctgctccacgccgccaggccggaagtgcagctggttgaatctggcggaggactggttcagcctggcggatctctgagactgtcttgtgccgccagcggcttcagcttcagcgacttttggatgagctgggtccgacaggcccctggcaaaggacttgaatgggtcgccacaatcagccaggccggcagcgagaaggactacgtggactctgtgaagggcagattcaccatcagccgggacaacgccaagaagtccctgtacctccagatgaacagcctgagagccgaggacaccgccgtgtactattgtgcctctggcgtgtacagcttcgactacagaggccagggcaccctggtcacagtctcttctggtaccggcggaggcggatctggcggcggaggtagcggtggcggaggatctgaattcgacgagatccagctggtgcagagcggagccgaagtgaagaagcctggcgagagcctgcggatcagctgcaagggcagcggcttcaacatcgaggactactacatccactgggtgcgccagatgcccggcaagggcctggaatggatgggcagaatcgaccccgagaacgacgagactaagtacggccccatcttccagggccacgtgaccatcagcgccgacaccagcatcaacaccgtgtacctccagtggtccagcctgaaggccagcgacaccgccatgtactactgcgcctttagaggcggcgtgtactggggccagggcaccacagtgacagtgtctagcctcgagggacagcctaaggccaatcctaccgtgacactgttccctccaagcagcgaagaactccaggccaacaaggccacacttgtgtgcctgatctccgacttctaccctggggctgtgacagtggcttggaaggccgatggatctcctgtgaaagccggcgtggaaaccaccaagccatccaagcagagcaacaacaaatacgccgccagctcctacctgagcctgacacctgagcagtggaagtcccacagatcctacagctgccaagtgacccacgaaggcagcaccgtggaaaagacagtggcccctacagagtgcagccccatcaagaccgatgtgattacaatggaccccaaggacaactgctccaaggacgccaacgataccctgctgctccagctgaccaacaccagcgcctactacatgtacttgttgctgctgctgaagtccgtggtgtacttcgccatcatcacatgctgcctgctgcggagaaccgccttctgctgcaacggcgagaagtctagggccaagcgatctggatctggagcaacaaacttctcactactcaaacaagcaggtgacgtggaggagaatcccgggcctactagtatggactggatttggcgcatccttttccttgtcggcgctgctaccggcgcgcattccttcgaagatgtcgtgatgacccagagccccgacagcctggctgtgtctctgggagagagagccaccatcaactgcaagtccagccagtccctgctggacagcgacggcaagacctacctgaactggctccagcagaagcccggccagccccccaagagactgatctccctggtgtccaagctggactccggcgtgcccgatagattttccggctctggcagcggcaccgacttcaccctgacaatcagctcccttcaggccgaggacgtggccgtgtactattgctggcagggcacacacttccccggcacctttggcggaggcaccaaggtggaaatcaagacgcgtgcctctacaaagggaccctccgtgtttcctctggctcccagcagcaagtctacaagcggaggaacagccgctctgggctgcctggtcaaggattactttcccgagcctgtgaccgtgtcctggaatagcggagcactgacaagcggcgtgcacacctttccagccgtgctgcaaagcagcggcctgtactctctgagcagcgtggtcacagtgcctagctctagcctgggcacccagacctacatctgcaatgtgaaccacaagcctagcaacaccaaggtggacaagagagtggaacccaagagctgtgaagtgaaaaccgactccaccgaccacgtgaagcccaaagagacagagaacaccaagcagcccagcaagagctgccacaagcccaaggccatcgtgcacaccgagaaagtgaacatgatgagcctgaccgtgctgggcctgcggatgctgttcgccaaaaccgtggccgtgaacttcctgctgaccgccaagctgttcttcctc

SEQ ID NO: 2887 - DNA, 2364 bp, Artificial Sequence
  Synthetic Polynucloetide
atggccttaccagtgaccgccttgctcctgccgctggccttgctgctccacgccgccaggccggaagtgcagctggttgaatctggcggaggactggttcagcctggcggatctctgagactgtcttgtgccgccagcggcttcagcttcagcgacttttggatgagctgggtccgacaggcccctggcaaaggacttgaatgggtcgccacaatcagccaggccggcagcgagaaggactacgtggactctgtgaagggcagattcaccatcagccgggacaacgccaagaagtccctgtacctccagatgaacagcctgagagccgaggacaccgccgtgtactattgtgcctctggcgtgtacagcttcgactacagaggccagggcaccctggtcacagtctcttctggtaccggcggaggcggatctggcggcggaggtagcggtggcggaggatctgaattcgacgagcttgtgatgacccagagccccagcagcctgacagtgacagccggcgagaaagtgaccatgagctgcaagagcagccagagcctgctgaacagcggcaaccagaagaactacctgacctggtatcagcagaagcccggccagccccccaagctgctgatctactgggccagcaccagagaaagcggcgtgcccgatagattcaccggctctggcagcggcaccgacttcaccctgacaatcagcagcgtgcaggccgaggacctggccgtgtactactgccagaacgactacagctaccccctgaccttcggagccggcaccaagctggaaatcaagctcgagggacagcctaaggccaatcctaccgtgacactgttccctccaagcagcgaagaactccaggccaacaaggccacacttgtgtgcctgatctccgacttctaccctggggctgtgacagtggcttggaaggccgatggatctcctgtgaaagccggcgtggaaaccaccaagccatccaagcagagcaacaacaaatacgccgccagctcctacctgagcctgacacctgagcagtggaagtcccacagatcctacagctgccaagtgacccacgaaggcagcaccgtggaaaagacagtggcccctacagagtgcagccccatcaagaccgatgtgattacaatggaccccaaggacaactgctccaaggacgccaacgataccctgctgctccagctgaccaacaccagcgcctactacatgtacttgttgctgctgctgaagtccgtggtgtacttcgccatcatcacatgctgcctgctgcggagaaccgccttctgctgcaacggcgagaagtctagggccaagcgatctggatctggagcaacaaacttctcactactcaaacaagcaggtgacgtggaggagaatcccgggcctactagtatggactggatttggcgcatccttttccttgtcggcgctgctaccggcgcgcattccttcgaagaagtgcagctgctggaacagtctggcgccgaacttgtgcggcctggcaccagcgtgaagatcagctgtaaagccagcggctacgccttcaccaactactggctgggctgggtcaagcagaggcctggacacggcctggaatggatcggcgacatctttcccggctccggcaacatccactacaacgagaagttcaagggcaaggccaccctgaccgccgacaagtctagcagcaccgcctacatgcagctgtccagcctgacctttgaggacagcgccgtgtatttctgtgcccggctgcggaactgggacgagcccatggattattggggccagggcaccaccgtgaccgtgtctagtacgcgtgcctctacaaagggaccctccgtgtttcctctggctcccagcagcaagtctacaagcggaggaacagccgctctgggctgcctggtcaaggattactttcccgagcctgtgaccgtgtcctggaatagcggagcactgacaagcggcgtgcacacctttccagccgtgctgcaaagcagcggcctgtactctctgagcagcgtggtcacagtgcctagctctagcctgggcacccagacctacatctgcaatgtgaaccacaagcctagcaacaccaaggtggacaagagagtggaacccaagagctgtgaagtgaaaaccgactccaccgaccacgtgaagcccaaagagacagagaacaccaagcagcccagcaagagctgccacaagcccaaggccatcgtgcacaccgagaaagtgaacatgatgagcctgaccgtgctgggcctgcggatgctgttcgccaaaaccgtggccgtgaacttcctgctgaccgccaagctgttcttcctc

SEQ ID NO: 2888 - DNA, 2367 bp, Artificial Sequence
  Synthetic Polynucloetide
atggccttaccagtgaccgccttgctcctgccgctggccttgctgctccacgccgccaggccggaagtgcagctggttgaatctggcggaggactggttcagcctggcggatctctgagactgtcttgtgccgccagcggcttcagcttcagcgacttttggatgagctgggtccgacaggcccctggcaaaggacttgaatgggtcgccacaatcagccaggccggcagcgagaaggactacgtggactctgtgaagggcagattcaccatcagccgggacaacgccaagaagtccctgtacctccagatgaacagcctgagagccgaggacaccgccgtgtactattgtgcctctggcgtgtacagcttcgactacagaggccagggcaccctggtcacagtctcttctggtaccggcggaggcggatctggcggcggaggtagcggtggcggaggatctgaattcgacgagctgcagatgacccagagccctagcagcctgtctgccagcgtgggcgacagagtgaccatcacctgtagagccagccagagcatcagcagctacctgaactggtatcagcagaagcccggccagccccccaaactgctgatctactgggccagcaccagagaaagcggcgtgcccgatagattcagcggcagcgagagcggcaccaactacaccctgaccatcagctccctgcagcccgaggacttcgccacctacttttgccagcagagcgacagcctgcccatcacctttggacagggcacccggctggacattcagctcgagggacagcctaaggccaatcctaccgtgacactgttccctccaagcagcgaagaactccaggccaacaaggccacacttgtgtgcctgatctccgacttctaccctggggctgtgacagtggcttggaaggccgatggatctcctgtgaaagccggcgtggaaaccaccaagccatccaagcagagcaacaacaaatacgccgccagctcctacctgagcctgacacctgagcagtggaagtcccacagatcctacagctgccaagtgacccacgaaggcagcaccgtggaaaagacagtggcccctacagagtgcagccccatcaagaccgatgtgattacaatggaccccaaggacaactgctccaaggacgccaacgataccctgctgctccagctgaccaacaccagcgcctactacatgtacttgttgctgctgctgaagtccgtggtgtacttcgccatcatcacatgctgcctgctgcggagaaccgccttctgctgcaacggcgagaagtctagggccaagcgatctggatctggagcaacaaacttctcactactcaaacaagcaggtgacgtggaggagaatcccgggcctactagtatggactggatttggcgcatccttttccttgtcggcgctgctaccggcgcgcattccttcgaagaggtgcaactgctggaatctgggggcggagtggtgcagcctggcagaagcctgagactgagctgtgccgccagcggcttcaccttcagctcctacggaatgcactgggtgcgccaggcccctggcaaaggactggaatgggtggccgtgatctcctacgacggcagcaacaagtactacgccgacagcgtgaagggccggttcaccatcagccgggacaacagcaagaacaccctgtacctgcagatgaacagcctgcgggccgaggacaccgccgtgtactactgcgccaaggatatgggctggggcagcggctggcggccttactactactacggcatggacgtgtggggccagggcaccaccgtgacagtgtcatctacgcgtgcctctacaaagggaccctccgtgtttcctctggctcccagcagcaagtctacaagcggaggaacagccgctctgggctgcctggtcaaggattactttcccgagcctgtgaccgtgtcctggaatagcggagcactgacaagcggcgtgcacacctttccagccgtgctgcaaagcagcggcctgtactctctgagcagcgtggtcacagtgcctagctctagcctgggcacccagacctacatctgcaatgtgaaccacaagcctagcaacaccaaggtggacaagagagtggaacccaagagctgtgaagtgaaaaccgactccaccgaccacgtgaagcccaaagagacagagaacaccaagcagcccagcaagagctgccacaagcccaaggccatcgtgcacaccgagaaagtgaacatgatgagcctgaccgtgctgggcctgcggatgctgttcgccaaaaccgtggccgtgaacttcctgctgaccgccaagctgttcttcctc

SEQ ID NO: 2889 - DNA, 2358 bp, Artificial Sequence
  Synthetic Polynucloetide
atggccttaccagtgaccgccttgctcctgccgctggccttgctgctccacgccgccaggccggaagtgcagctggttgaatctggcggaggactggttcagcctggcggatctctgagactgtcttgtgccgccagcggcttcagcttcagcgacttttggatgagctgggtccgacaggcccctggcaaaggacttgaatgggtcgccacaatcagccaggccggcagcgagaaggactacgtggactctgtgaagggcagattcaccatcagccgggacaacgccaagaagtccctgtacctccagatgaacagcctgagagccgaggacaccgccgtgtactattgtgcctctggcgtgtacagcttcgactacagaggccagggcaccctggtcacagtctcttctggtaccggcggaggcggatctggcggcggaggtagcggtggcggaggatctgaattcgacgacatccaaatgacacagagtccttctagtttgagtgcgagcgtgggggacagggtgaccattacctgcagggccagccagagcataagctcataccttaattggtaccagcaaaaaccaggtaaggcccctaagctcctgatctacgcggcctcttcacttcaatctggggtcccttcccgcttcagtggctccggcagcggcaccgacttcacgctcactatatcaagtctgcagcctgaggatctcgccacctattactgtcaacaaagttattccacccctttcacctttggaccgggcacgaaagtggatattaagctcgagggacagcctaaggccaatcctaccgtgacactgttccctccaagcagcgaagaactccaggccaacaaggccacacttgtgtgcctgatctccgacttctaccctggggctgtgacagtggcttggaaggccgatggatctcctgtgaaagccggcgtggaaaccaccaagccatccaagcagagcaacaacaaatacgccgccagctcctacctgagcctgacacctgagcagtggaagtcccacagatcctacagctgccaagtgacccacgaaggcagcaccgtggaaaagacagtggcccctacagagtgcagccccatcaagaccgatgtgattacaatggaccccaaggacaactgctccaaggacgccaacgataccctgctgctccagctgaccaacaccagcgcctactacatgtacttgttgctgctgctgaagtccgtggtgtacttcgccatcatcacatgctgcctgctgcggagaaccgccttctgctgcaacggcgagaagtctagggccaagcgatctggatctggagcaacaaacttctcactactcaaacaagcaggtgacgtggaggagaatcccgggcctactagtatggactggatttggcgcatccttttccttgtcggcgctgctaccggcgcgcattccttcgaagtgcacgaggtccagcttgtgcagtccggggcagaggtcaagaagcctggttctagcgtaaaagtgagttgcaaagcctcaggtgggacattttcatcctacgcgatcagttgggttagacaggctcctggtcaagggctggaatggatgggcggaattattccaatcttcggaacagcgaattacgcgcagaagttccagggtagagtaaccatcactgctgacaagtccacctccaccgcatacatggaattgtctagtctccggagcgaggatacggcggtgtattattgtgctacgttcgccctgtttggcttccgcgaacaggctttcgacatctgggggcagggcacgacagtcacggttagtagtacgcgtgcctctacaaagggaccctccgtgtttcctctggctcccagcagcaagtctacaagcggaggaacagccgctctgggctgcctggtcaaggattactttcccgagcctgtgaccgtgtcctggaatagcggagcactgacaagcggcgtgcacacctttccagccgtgctgcaaagcagcggcctgtactctctgagcagcgtggtcacagtgcctagctctagcctgggcacccagacctacatctgcaatgtgaaccacaagcctagcaacaccaaggtggacaagagagtggaacccaagagctgtgaagtgaaaaccgactccaccgaccacgtgaagcccaaagagacagagaacaccaagcagcccagcaagagctgccacaagcccaaggccatcgtgcacaccgagaaagtgaacatgatgagcctgaccgtgctgggcctgcggatgctgttcgccaaaaccgtggccgtgaacttcctgctgaccgccaagctgttcttcctc

SEQ ID NO: 2890 - DNA, 2352 bp, Artificial Sequence
  Synthetic Polynucloetide
atggccttaccagtgaccgccttgctcctgccgctggccttgctgctccacgccgccaggccggaagtgcagctggttgaatctggcggaggactggttcagcctggcggatctctgagactgtcttgtgccgccagcggcttcagcttcagcgacttttggatgagctgggtccgacaggcccctggcaaaggacttgaatgggtcgccacaatcagccaggccggcagcgagaaggactacgtggactctgtgaagggcagattcaccatcagccgggacaacgccaagaagtccctgtacctccagatgaacagcctgagagccgaggacaccgccgtgtactattgtgcctctggcgtgtacagcttcgactacagaggccagggcaccctggtcacagtctcttctggtaccggcggaggcggatctggcggcggaggtagcggtggcggaggatctgaattcgacatcgtgctgacccagagccctctgagcctggccgtgtctctgggacagcctgccatcatcagctgcaaggccagccagagcgtgtcctttgccggcacctctctgatgcactggtatcaccagaagcccggccagcagcccagactgctgatctacagagccagcaacctggaagccggcgtgcccgatagattttccggcagcggcagcaagaccgacttcaccctgaccatcagccccgtggaagccgaagatgccgccacctactactgccagcagagcagagagtacccctacaccttcggcggaggcaccaagctggaaatcaagaggctcgagggacagcctaaggccaatcctaccgtgacactgttccctccaagcagcgaagaactccaggccaacaaggccacacttgtgtgcctgatctccgacttctaccctggggctgtgacagtggcttggaaggccgatggatctcctgtgaaagccggcgtggaaaccaccaagccatccaagcagagcaacaacaaatacgccgccagctcctacctgagcctgacacctgagcagtggaagtcccacagatcctacagctgccaagtgacccacgaaggcagcaccgtggaaaagacagtggcccctacagagtgcagccccatcaagaccgatgtgattacaatggaccccaaggacaactgctccaaggacgccaacgataccctgctgctccagctgaccaacaccagcgcctactacatgtacttgttgctgctgctgaagtccgtggtgtacttcgccatcatcacatgctgcctgctgcggagaaccgccttctgctgcaacggcgagaagtctagggccaagcgatctggatctggagcaacaaacttctcactactcaaacaagcaggtgacgtggaggagaatcccgggcctactagtatggactggatttggcgcatccttttccttgtcggcgctgctaccggcgcgcattccttcgaacaggtccaactggtgcagagcggagccgaggtcgtgaagcctggcgcttccgtgaagattagctgcaaagccagcggctacacctttaccggctactttatgaactgggtcaagcagagccctggccagagcctggaatggatcggcagaatccacccctacgacggcgacaccttctacaaccagaagttccagggcaaggccaccctgacagtggacaagagcagcaacaccgcccacatggaactgctgagcctgaccagcgaggacttcgccgtgtactactgcaccagatacgacggcagccgggctatggactattggggccagggcaccaccgtgaccgtgtctagtacgcgtgcctctacaaagggaccctccgtgtttcctctggctcccagcagcaagtctacaagcggaggaacagccgctctgggctgcctggtcaaggattactttcccgagcctgtgaccgtgtcctggaatagcggagcactgacaagcggcgtgcacacctttccagccgtgctgcaaagcagcggcctgtactctctgagcagcgtggtcacagtgcctagctctagcctgggcacccagacctacatctgcaatgtgaaccacaagcctagcaacaccaaggtggacaagagagtggaacccaagagctgtgaagtgaaaaccgactccaccgaccacgtgaagcccaaagagacagagaacaccaagcagcccagcaagagctgccacaagcccaaggccatcgtgcacaccgagaaagtgaacatgatgagcctgaccgtgctgggcctgcggatgctgttcgccaaaaccgtggccgtgaacttcctgctgaccgccaagctgttcttcctc

SEQ ID NO: 2891 - DNA, 2343 bp, Artificial Sequence
  Synthetic Polynucloetide
atggccttaccagtgaccgccttgctcctgccgctggccttgctgctccacgccgccaggccggaagtgcagctggttgaatctggcggaggactggttcagcctggcggatctctgagactgtcttgtgccgccagcggcttcagcttcagcgacttttggatgagctgggtccgacaggcccctggcaaaggacttgaatgggtcgccacaatcagccaggccggcagcgagaaggactacgtggactctgtgaagggcagattcaccatcagccgggacaacgccaagaagtccctgtacctccagatgaacagcctgagagccgaggacaccgccgtgtactattgtgcctctggcgtgtacagcttcgactacagaggccagggcaccctggtcacagtctcttctggtaccggcggaggcggatctggcggcggaggtagcggtggcggaggatctgaattcgacgacgttgtgatgacccagacccccctgagcctgcctgtgacacctggcgaacctgccagcatcagctgtcggagcagccagagcctggtgcacagaaacggcaacacctacctgcactggtatctccagaagcccggccagagccccaagctgctgatccacaaggtgtccaacagattcagcggcgtgcccgacagattctccggcagcggctctggcaccgacttcaccctgaagatcagccgggtggaagccgaggacctgggcgtgtacttctgtagccagagcacccatgtgccccccctgacatttggagccggcaccaagctggaactgaagctcgagggacagcctaaggccaatcctaccgtgacactgttccctccaagcagcgaagaactccaggccaacaaggccacacttgtgtgcctgatctccgacttctaccctggggctgtgacagtggcttggaaggccgatggatctcctgtgaaagccggcgtggaaaccaccaagccatccaagcagagcaacaacaaatacgccgccagctcctacctgagcctgacacctgagcagtggaagtcccacagatcctacagctgccaagtgacccacgaaggcagcaccgtggaaaagacagtggcccctacagagtgcagccccatcaagaccgatgtgattacaatggaccccaaggacaactgctccaaggacgccaacgataccctgctgctccagctgaccaacaccagcgcctactacatgtacttgttgctgctgctgaagtccgtggtgtacttcgccatcatcacatgctgcctgctgcggagaaccgccttctgctgcaacggcgagaagtctagggccaagcgatctggatctggagcaacaaacttctcactactcaaacaagcaggtgacgtggaggagaatcccgggcctactagtatggactggatttggcgcatccttttccttgtcggcgctgctaccggcgcgcattccttcgaagaagtgcagctggtgcagtctggcgctgaggtggaaaagcctggggccagcgtgaagattagctgcaaggccagcggcagcagcttcaccggctacaacatgaactgggtgcgccagaacatcggcaagagcctggaatggatcggagccatcgacccctactacggcggcaccagctacaaccagaagttcaagggcagagccaccctgaccgtggacaagagcaccagcaccgcctacatgcacctgaagtccctgcggagcgaggacaccgccgtgtactactgtgtgtccggcatggaatattggggccagggcaccagcgtgaccgtgtctagtacgcgtgcctctacaaagggaccctccgtgtttcctctggctcccagcagcaagtctacaagcggaggaacagccgctctgggctgcctggtcaaggattactttcccgagcctgtgaccgtgtcctggaatagcggagcactgacaagcggcgtgcacacctttccagccgtgctgcaaagcagcggcctgtactctctgagcagcgtggtcacagtgcctagctctagcctgggcacccagacctacatctgcaatgtgaaccacaagcctagcaacaccaaggtggacaagagagtggaacccaagagctgtgaagtgaaaaccgactccaccgaccacgtgaagcccaaagagacagagaacaccaagcagcccagcaagagctgccacaagcccaaggccatcgtgcacaccgagaaagtgaacatgatgagcctgaccgtgctgggcctgcggatgctgttcgccaaaaccgtggccgtgaacttcctgctgaccgccaagctgttcttcctc

SEQ ID NO: 2892 - DNA, 2337 bp, Artificial Sequence
  Synthetic Polynucloetide
atggccttaccagtgaccgccttgctcctgccgctggccttgctgctccacgccgccaggccggaagtgcagctggttgaatctggcggaggactggttcagcctggcggatctctgagactgtcttgtgccgccagcggcttcagcttcagcgacttttggatgagctgggtccgacaggcccctggcaaaggacttgaatgggtcgccacaatcagccaggccggcagcgagaaggactacgtggactctgtgaagggcagattcaccatcagccgggacaacgccaagaagtccctgtacctccagatgaacagcctgagagccgaggacaccgccgtgtactattgtgcctctggcgtgtacagcttcgactacagaggccagggcaccctggtcacagtctcttctggtaccggcggaggcggatctggcggcggaggtagcggtggcggaggatctgaattcgacgagatcgtgatgacccagacccctgccaccctgtctgtgtctgccggcgagagagtgaccattacctgcaaggccagccagagcgtgtccaacgacgtgacctggtatcagcagaagcccggccaggcccccagactgctgatctacagcgccagcaacagatacagcggcgtgcccgccagattttccggcagcggctacggcaccgagttcaccttcaccatcagcagcgtgcagagcgaggacttcgccgtgtacttctgtcagcaagactacagcagcttcggccagggcaccaagctggaaatcaagaggctcgagggacagcctaaggccaatcctaccgtgacactgttccctccaagcagcgaagaactccaggccaacaaggccacacttgtgtgcctgatctccgacttctaccctggggctgtgacagtggcttggaaggccgatggatctcctgtgaaagccggcgtggaaaccaccaagccatccaagcagagcaacaacaaatacgccgccagctcctacctgagcctgacacctgagcagtggaagtcccacagatcctacagctgccaagtgacccacgaaggcagcaccgtggaaaagacagtggcccctacagagtgcagccccatcaagaccgatgtgattacaatggaccccaaggacaactgctccaaggacgccaacgataccctgctgctccagctgaccaacaccagcgcctactacatgtacttgttgctgctgctgaagtccgtggtgtacttcgccatcatcacatgctgcctgctgcggagaaccgccttctgctgcaacggcgagaagtctagggccaagcgatctggatctggagcaacaaacttctcactactcaaacaagcaggtgacgtggaggagaatcccgggcctactagtatggactggatttggcgcatccttttccttgtcggcgctgctaccggcgcgcattccttcgaacaggtgcagctggtggaatctggacctggcgtggtgcagcctggcagaagcctgagaatcagctgtgccgtgtccggcttcagcgtgaccaactacggcgtgcactgggtgcgccagccacctggaaaaggactggaatggctgggcgtgatctgggctggcggcatcaccaactacaacagcgccttcatgtcccggctgaccatctccaaggacaacagcaagaacaccgtgtacctccagatgaacagcctgcgggccgaggacaccgccatgtactactgtgcttccagaggcggccactacggctacgccctggattattggggccagggaaccctcgtgaccgtgtcctctacgcgtgcctctacaaagggaccctccgtgtttcctctggctcccagcagcaagtctacaagcggaggaacagccgctctgggctgcctggtcaaggattactttcccgagcctgtgaccgtgtcctggaatagcggagcactgacaagcggcgtgcacacctttccagccgtgctgcaaagcagcggcctgtactctctgagcagcgtggtcacagtgcctagctctagcctgggcacccagacctacatctgcaatgtgaaccacaagcctagcaacaccaaggtggacaagagagtggaacccaagagctgtgaagtgaaaaccgactccaccgaccacgtgaagcccaaagagacagagaacaccaagcagcccagcaagagctgccacaagcccaaggccatcgtgcacaccgagaaagtgaacatgatgagcctgaccgtgctgggcctgcggatgctgttcgccaaaaccgtggccgtgaacttcctgctgaccgccaagctgttcttcctc

SEQ ID NO: 2893 - DNA, 2343 bp, Artificial Sequence
  Synthetic Polynucloetide
atggccttaccagtgaccgccttgctcctgccgctggccttgctgctccacgccgccaggccggaagtgcagctggttgaatctggcggaggactggttcagcctggcggatctctgagactgtcttgtgccgccagcggcttcagcttcagcgacttttggatgagctgggtccgacaggcccctggcaaaggacttgaatgggtcgccacaatcagccaggccggcagcgagaaggactacgtggactctgtgaagggcagattcaccatcagccgggacaacgccaagaagtccctgtacctccagatgaacagcctgagagccgaggacaccgccgtgtactattgtgcctctggcgtgtacagcttcgactacagaggccagggcaccctggtcacagtctcttctggtaccggcggaggcggatctggcggcggaggtagcggtggcggaggatctgaattcgacatccagatgacccagaccgccagcagcctgcctgcctctctgggcgacagagtgaccatctcctgtagcgccagccaggacatcagcaactacctgaactggtatcagcagaaacccgacggcaccgtgaagctgctgatcttctacagcagcaacctgcacagcggcgtgcccagcagattttctggcggcggaagcggcaccgactacagcctgaccatcagcaatctggaacccgaggacattgccacctacttttgccaccagtacagcaagctgccctggacctttggcggaggcaccaagctggaaatcaagagactcgagggacagcctaaggccaatcctaccgtgacactgttccctccaagcagcgaagaactccaggccaacaaggccacacttgtgtgcctgatctccgacttctaccctggggctgtgacagtggcttggaaggccgatggatctcctgtgaaagccggcgtggaaaccaccaagccatccaagcagagcaacaacaaatacgccgccagctcctacctgagcctgacacctgagcagtggaagtcccacagatcctacagctgccaagtgacccacgaaggcagcaccgtggaaaagacagtggcccctacagagtgcagccccatcaagaccgatgtgattacaatggaccccaaggacaactgctccaaggacgccaacgataccctgctgctccagctgaccaacaccagcgcctactacatgtacttgttgctgctgctgaagtccgtggtgtacttcgccatcatcacatgctgcctgctgcggagaaccgccttctgctgcaacggcgagaagtctagggccaagcgatctggatctggagcaacaaacttctcactactcaaacaagcaggtgacgtggaggagaatcccgggcctactagtatggactggatttggcgcatccttttccttgtcggcgctgctaccggcgcgcattccttcgaagaagtgaccctggtggaaagcggcggagacttcgtgaagcctggcggctctctgaaggtgtcctgtgccgccagcggcttcgcctttagccactacgccatgagctgggtgcgccagacccctgccaagagactggaatgggtggcctacatcagcagcggcggctccggcacctactactccgatagcgtgaagggccggttcaccatcagccgggacaacgccaagaacaccctgtacctccagatgcggagcctgcggagcgaggacagcgccatgtatttctgcaccagagtgaagctgggcacctattacttcgactcttggggccagggcaccaccctgaccgtgtcatctacgcgtgcctctacaaagggaccctccgtgtttcctctggctcccagcagcaagtctacaagcggaggaacagccgctctgggctgcctggtcaaggattactttcccgagcctgtgaccgtgtcctggaatagcggagcactgacaagcggcgtgcacacctttccagccgtgctgcaaagcagcggcctgtactctctgagcagcgtggtcacagtgcctagctctagcctgggcacccagacctacatctgcaatgtgaaccacaagcctagcaacaccaaggtggacaagagagtggaacccaagagctgtgaagtgaaaaccgactccaccgaccacgtgaagcccaaagagacagagaacaccaagcagcccagcaagagctgccacaagcccaaggccatcgtgcacaccgagaaagtgaacatgatgagcctgaccgtgctgggcctgcggatgctgttcgccaaaaccgtggccgtgaacttcctgctgaccgccaagctgttcttcctc

SEQ ID NO: 2894 - DNA, 2349 bp, Artificial Sequence
  Synthetic Polynucloetide
atggccttaccagtgaccgccttgctcctgccgctggccttgctgctccacgccgccaggccggaagtgcagctggttgaatctggcggaggactggttcagcctggcggatctctgagactgtcttgtgccgccagcggcttcagcttcagcgacttttggatgagctgggtccgacaggcccctggcaaaggacttgaatgggtcgccacaatcagccaggccggcagcgagaaggactacgtggactctgtgaagggcagattcaccatcagccgggacaacgccaagaagtccctgtacctccagatgaacagcctgagagccgaggacaccgccgtgtactattgtgcctctggcgtgtacagcttcgactacagaggccagggcaccctggtcacagtctcttctggtaccggcggaggcggatctggcggcggaggtagcggtggcggaggatctgaattccagttcgtgctgacccagagcccttctgcctctgctgccctgggagcctctgccaagctgacctgtacactgagcagcgcccacaagacctacaccatcgactggtatcagcagcagaagggaaaggcccccagatacctgatccaagtgaagtccgacggcacctacacaaaggccaccggcgtgcccgatagattcagcggcagtagcagcggagccgatagatacctgattatccccagcgtgcaggccgacgacgaggccgattactactgcggcaccgattacaccggcggctacgtgttcggcggaggcacacaactgaccgtgacactcgagggacagcctaaggccaatcctaccgtgacactgttccctccaagcagcgaagaactccaggccaacaaggccacacttgtgtgcctgatctccgacttctaccctggggctgtgacagtggcttggaaggccgatggatctcctgtgaaagccggcgtggaaaccaccaagccatccaagcagagcaacaacaaatacgccgccagctcctacctgagcctgacacctgagcagtggaagtcccacagatcctacagctgccaagtgacccacgaaggcagcaccgtggaaaagacagtggcccctacagagtgcagccccatcaagaccgatgtgattacaatggaccccaaggacaactgctccaaggacgccaacgataccctgctgctccagctgaccaacaccagcgcctactacatgtacttgttgctgctgctgaagtccgtggtgtacttcgccatcatcacatgctgcctgctgcggagaaccgccttctgctgcaacggcgagaagtctagggccaagcgatctggatctggagcaacaaacttctcactactcaaacaagcaggtgacgtggaggagaatcccgggcctactagtatggactggatttggcgcatccttttccttgtcggcgctgctaccggcgcgcattccttcgaagagcaactgaaagagtctggcggcggactgttcaagcccaccgataccctgaccctgacctgcaccgtgtccggcttcagcctgagctactacggcgtgaactgggtgcgccaggcccctggcaatggcctggaatggatcggcacaatcggcggcagcggcgacacctactatgcctcttgggccaagtccagaagcaccatcatcagaaacaccaacgagaacaccgtgaccctgaagatgaccagcctgacagccgccgacaccgccacctacttttgcgtcagatacgccaacatcggctacgagtatttcaacgtgtggggacccggcaccctcgtgaccgtgtcatctacgcgtgcctctacaaagggaccctccgtgtttcctctggctcccagcagcaagtctacaagcggaggaacagccgctctgggctgcctggtcaaggattactttcccgagcctgtgaccgtgtcctggaatagcggagcactgacaagcggcgtgcacacctttccagccgtgctgcaaagcagcggcctgtactctctgagcagcgtggtcacagtgcctagctctagcctgggcacccagacctacatctgcaatgtgaaccacaagcctagcaacaccaaggtggacaagagagtggaacccaagagctgtgaagtgaaaaccgactccaccgaccacgtgaagcccaaagagacagagaacaccaagcagcccagcaagagctgccacaagcccaaggccatcgtgcacaccgagaaagtgaacatgatgagcctgaccgtgctgggcctgcggatgctgttcgccaaaaccgtggccgtgaacttcctgctgaccgccaagctgttcttcctc

SEQ ID NO: 2895 - DNA, 2364 bp, Artificial Sequence
  Synthetic Polynucloetide
atggccttaccagtgaccgccttgctcctgccgctggccttgctgctccacgccgccaggccggaagtgcagctggttgaatctggcggaggactggttcagcctggcggatctctgagactgtcttgtgccgccagcggcttcagcttcagcgacttttggatgagctgggtccgacaggcccctggcaaaggacttgaatgggtcgccacaatcagccaggccggcagcgagaaggactacgtggactctgtgaagggcagattcaccatcagccgggacaacgccaagaagtccctgtacctccagatgaacagcctgagagccgaggacaccgccgtgtactattgtgcctctggcgtgtacagcttcgactacagaggccagggcaccctggtcacagtctcttctggtaccggcggaggcggatctggcggcggaggtagcggtggcggaggatctgaattccagttcgtgctgacccagagcccttctgtgtctgccgccctgggagcctctgccaagctgacctgtacactgagcagcgcccacaagacctacaccatcgactggtatcagcagcagcagggcgaggcccccagatacctgatgcaagtgaagtccgacggcagctacaccaagggcaccggcgtgcccgatagattcagcggcagtagcagcggagccgatagatacctgattatccccagcgtgcaggccgacgacgaggccggatatgtgtgcggcgctgacgacaatggcggctacgtgttcggcggaggcacccaactgacagtgacactcgagggacagcctaaggccaatcctaccgtgacactgttccctccaagcagcgaagaactccaggccaacaaggccacacttgtgtgcctgatctccgacttctaccctggggctgtgacagtggcttggaaggccgatggatctcctgtgaaagccggcgtggaaaccaccaagccatccaagcagagcaacaacaaatacgccgccagctcctacctgagcctgacacctgagcagtggaagtcccacagatcctacagctgccaagtgacccacgaaggcagcaccgtggaaaagacagtggcccctacagagtgcagccccatcaagaccgatgtgattacaatggaccccaaggacaactgctccaaggacgccaacgataccctgctgctccagctgaccaacaccagcgcctactacatgtacttgttgctgctgctgaagtccgtggtgtacttcgccatcatcacatgctgcctgctgcggagaaccgccttctgctgcaacggcgagaagtctagggccaagcgatctggatctggagcaacaaacttctcactactcaaacaagcaggtgacgtggaggagaatcccgggcctactagtatggactggatttggcgcatccttttccttgtcggcgctgctaccggcgcgcattccttcgaacagagcgtgaaagagtctgagggcggcctgttcaagcccaccgataccctgaccctgacctgcaccgtgtccggcttcagcctgagcagacacgccctgacatgggtgcgccaggcccctggaaatggcctggaatggatcggagccatcgacaacgccggcaccacctactatgcctcttgggccaagtccagaagcaccatcacccggaacaccgacctgcacaccgtgaccctgaagatgaccagcctgaccgccagcgacaccgccacctacttttgcgccagagtgttctacgacatcaacagcggctactacctggacggcatggacctgtggggacctggcacacttgtgaccgtgtccagcacgcgtgcctctacaaagggaccctccgtgtttcctctggctcccagcagcaagtctacaagcggaggaacagccgctctgggctgcctggtcaaggattactttcccgagcctgtgaccgtgtcctggaatagcggagcactgacaagcggcgtgcacacctttccagccgtgctgcaaagcagcggcctgtactctctgagcagcgtggtcacagtgcctagctctagcctgggcacccagacctacatctgcaatgtgaaccacaagcctagcaacaccaaggtggacaagagagtggaacccaagagctgtgaagtgaaaaccgactccaccgaccacgtgaagcccaaagagacagagaacaccaagcagcccagcaagagctgccacaagcccaaggccatcgtgcacaccgagaaagtgaacatgatgagcctgaccgtgctgggcctgcggatgctgttcgccaaaaccgtggccgtgaacttcctgctgaccgccaagctgttcttcctc

SEQ ID NO: 2896 - DNA, 2346 bp, Artificial Sequence
  Synthetic Polynucloetide
atggccttaccagtgaccgccttgctcctgccgctggccttgctgctccacgccgccaggccggaagtgcagctggttgaatctggcggaggactggttcagcctggcggatctctgagactgtcttgtgccgccagcggcttcagcttcagcgacttttggatgagctgggtccgacaggcccctggcaaaggacttgaatgggtcgccacaatcagccaggccggcagcgagaaggactacgtggactctgtgaagggcagattcaccatcagccgggacaacgccaagaagtccctgtacctccagatgaacagcctgagagccgaggacaccgccgtgtactattgtgcctctggcgtgtacagcttcgactacagaggccagggcaccctggtcacagtctcttctggtaccggcggaggcggatctggcggcggaggtagcggtggcggaggatctgaattcgacatccagatgacccagagccccagcagcctgtctgccagcgtgggcgacagagtgaccatcacctgtagagccagccagggcatcagctcttggctggcctggtatcagcagaagcccgagaaggcccccaagagcctgatctacgccgcctctagtctccagagcggcgtgcccagcagattttctggcagcggctccggcaccgacttcaccctgacaatcagctccctccagcccgaggacttcgccacctactactgccagcagtacaacagctacccccccacctttggcggaggcaccaaggtggaaatcaagctcgagggacagcctaaggccaatcctaccgtgacactgttccctccaagcagcgaagaactccaggccaacaaggccacacttgtgtgcctgatctccgacttctaccctggggctgtgacagtggcttggaaggccgatggatctcctgtgaaagccggcgtggaaaccaccaagccatccaagcagagcaacaacaaatacgccgccagctcctacctgagcctgacacctgagcagtggaagtcccacagatcctacagctgccaagtgacccacgaaggcagcaccgtggaaaagacagtggcccctacagagtgcagccccatcaagaccgatgtgattacaatggaccccaaggacaactgctccaaggacgccaacgataccctgctgctccagctgaccaacaccagcgcctactacatgtacttgttgctgctgctgaagtccgtggtgtacttcgccatcatcacatgctgcctgctgcggagaaccgccttctgctgcaacggcgagaagtctagggccaagcgatctggatctggagcaacaaacttctcactactcaaacaagcaggtgacgtggaggagaatcccgggcctactagtatggactggatttggcgcatccttttccttgtcggcgctgctaccggcgcgcattccttcgaagaagtgcaactggtggaatcaggcggcggactggtgcagcctggcgagtctctgagactgagctgtgtggcctccggcttcaccttcagccggtacaagatgaactgggtgcgccaggcccctggcaagggactggaatgggtgtcctacatcagccgcagcggcagagacatctactacgccgacagcgtgaagggccggttcaccatcagcagagacaacgccaagaacagcctgtacctccagatgaactccctgcgggacgaggacaccgccgtgtactactgtgccggaaccgtgaccacctattactacttcggcatggacgtgtggggccacggcaccaccgtgacagtgtcatctacgcgtgcctctacaaagggaccctccgtgtttcctctggctcccagcagcaagtctacaagcggaggaacagccgctctgggctgcctggtcaaggattactttcccgagcctgtgaccgtgtcctggaatagcggagcactgacaagcggcgtgcacacctttccagccgtgctgcaaagcagcggcctgtactctctgagcagcgtggtcacagtgcctagctctagcctgggcacccagacctacatctgcaatgtgaaccacaagcctagcaacaccaaggtggacaagagagtggaacccaagagctgtgaagtgaaaaccgactccaccgaccacgtgaagcccaaagagacagagaacaccaagcagcccagcaagagctgccacaagcccaaggccatcgtgcacaccgagaaagtgaacatgatgagcctgaccgtgctgggcctgcggatgctgttcgccaaaaccgtggccgtgaacttcctgctgaccgccaagctgttcttcctc

SEQ ID NO: 2897 - DNA, 2349 bp, Artificial Sequence
  Synthetic Polynucloetide
atggccttaccagtgaccgccttgctcctgccgctggccttgctgctccacgccgccaggccggaagtgcagctggttgaatctggcggaggactggttcagcctggcggatctctgagactgtcttgtgccgccagcggcttcagcttcagcgacttttggatgagctgggtccgacaggcccctggcaaaggacttgaatgggtcgccacaatcagccaggccggcagcgagaaggactacgtggactctgtgaagggcagattcaccatcagccgggacaacgccaagaagtccctgtacctccagatgaacagcctgagagccgaggacaccgccgtgtactattgtgcctctggcgtgtacagcttcgactacagaggccagggcaccctggtcacagtctcttctggtaccggcggaggcggatctggcggcggaggtagcggtggcggaggatctgaattcgacatccagatgacccagagccccagcagcctgtctgccagcgtgggcgacagagtgaccatcacctgtagagccagccagggcatcagctcttggctggcctggtatcagcagaagcccgagaaggcccccaagagcctgatctacgccgcctctagtctccagagcggcgtgcccagcagattttctggcagcggctccggcaccgacttcaccctgacaatcagctccctccagcccgaggacttcgccacctactactgccagcagtacaacagctaccctcccacctttggcggaggcaccaaggtggaaatcaagctcgagggacagcctaaggccaatcctaccgtgacactgttccctccaagcagcgaagaactccaggccaacaaggccacacttgtgtgcctgatctccgacttctaccctggggctgtgacagtggcttggaaggccgatggatctcctgtgaaagccggcgtggaaaccaccaagccatccaagcagagcaacaacaaatacgccgccagctcctacctgagcctgacacctgagcagtggaagtcccacagatcctacagctgccaagtgacccacgaaggcagcaccgtggaaaagacagtggcccctacagagtgcagccccatcaagaccgatgtgattacaatggaccccaaggacaactgctccaaggacgccaacgataccctgctgctccagctgaccaacaccagcgcctactacatgtacttgttgctgctgctgaagtccgtggtgtacttcgccatcatcacatgctgcctgctgcggagaaccgccttctgctgcaacggcgagaagtctagggccaagcgatctggatctggagcaacaaacttctcactactcaaacaagcaggtgacgtggaggagaatcccgggcctactagtatggactggatttggcgcatccttttccttgtcggcgctgctaccggcgcgcattccttcgaagaagtgcaactggtggaatccgggggaggctctgtgcagcctggcgagtctctgagactgagctgtgtggcctccggcttcaccttcagccggtacaagatgaactgggtgcgccaggcccctggcaagggactggaatgggtgtcctacatcagccgcagcggcagagacatctactacgccgacagcgtgaagggccggttcaccatcagcagagacaacgccaagaacagcctgtacctccagatgaactccctgcgggacgaggacaccgccgtgtactactgtgccggaaccgtgaccacctattactacgacttcggcatggacgtgtggggccagggcacaaccgtgacagtgtctagcacgcgtgcctctacaaagggaccctccgtgtttcctctggctcccagcagcaagtctacaagcggaggaacagccgctctgggctgcctggtcaaggattactttcccgagcctgtgaccgtgtcctggaatagcggagcactgacaagcggcgtgcacacctttccagccgtgctgcaaagcagcggcctgtactctctgagcagcgtggtcacagtgcctagctctagcctgggcacccagacctacatctgcaatgtgaaccacaagcctagcaacaccaaggtggacaagagagtggaacccaagagctgtgaagtgaaaaccgactccaccgaccacgtgaagcccaaagagacagagaacaccaagcagcccagcaagagctgccacaagcccaaggccatcgtgcacaccgagaaagtgaacatgatgagcctgaccgtgctgggcctgcggatgctgttcgccaaaaccgtggccgtgaacttcctgctgaccgccaagctgttcttcctc

SEQ ID NO: 2898 - DNA, 2343 bp, Artificial Sequence
  Synthetic Polynucloetide
atggccttaccagtgaccgccttgctcctgccgctggccttgctgctccacgccgccaggccggaagtgcagctggttgaatctggcggaggactggttcagcctggcggatctctgagactgtcttgtgccgccagcggcttcagcttcagcgacttttggatgagctgggtccgacaggcccctggcaaaggacttgaatgggtcgccacaatcagccaggccggcagcgagaaggactacgtggactctgtgaagggcagattcaccatcagccgggacaacgccaagaagtccctgtacctccagatgaacagcctgagagccgaggacaccgccgtgtactattgtgcctctggcgtgtacagcttcgactacagaggccagggcaccctggtcacagtctcttctggtaccggcggaggcggatctggcggcggaggtagcggtggcggaggatctgaattccagtctgtgctgacacagcctccatctgcctctggcacacctggacagagagtgaccatcagctgtagcggcagcagaagcaacgtcggcggcaactacgtgttctggtatcagcaggtcccaggcgctacccctaagctgctgatctacagaagcaatcagcggcctagcggcgtgcccgatagatttgccggaagcaagagcggcagctctgccagccttgccatctctggactgagaagcgaggacgaggccgactactactgtgccacctgggatgatagcctgagcggcttcgtgtttggcaccggcaccaaagtgacagtgcttggtctcgagggacagcctaaggccaatcctaccgtgacactgttccctccaagcagcgaagaactccaggccaacaaggccacacttgtgtgcctgatctccgacttctaccctggggctgtgacagtggcttggaaggccgatggatctcctgtgaaagccggcgtggaaaccaccaagccatccaagcagagcaacaacaaatacgccgccagctcctacctgagcctgacacctgagcagtggaagtcccacagatcctacagctgccaagtgacccacgaaggcagcaccgtggaaaagacagtggcccctacagagtgcagccccatcaagaccgatgtgattacaatggaccccaaggacaactgctccaaggacgccaacgataccctgctgctccagctgaccaacaccagcgcctactacatgtacttgttgctgctgctgaagtccgtggtgtacttcgccatcatcacatgctgcctgctgcggagaaccgccttctgctgcaacggcgagaagtctagggccaagcgatctggatctggagcaacaaacttctcactactcaaacaagcaggtgacgtggaggagaatcccgggcctactagtatggactggatttggcgcatccttttccttgtcggcgctgctaccggcgcgcattccttcgaagttcagctggttgaatctggcggcggactggttaagcctggcggatctctgagactgtcttgtgccgccagcggcttcaccttcagcgattactacatgagctggatcagacaggcccctggcaaaggactggaatgggtgtcctacatcagcagcagcggctccaccatctactacgccgatagcgtgaagggcagattcaccatcagccgggacaacgccaagaacagcctgtacctccagatgaactccctgagagccgaggacaccgccgtgtactattgcgccagaggctacggcaaagcctacgatcaatggggccagggcacactggtcaccgtttcttctacgcgtgcctctacaaagggaccctccgtgtttcctctggctcccagcagcaagtctacaagcggaggaacagccgctctgggctgcctggtcaaggattactttcccgagcctgtgaccgtgtcctggaatagcggagcactgacaagcggcgtgcacacctttccagccgtgctgcaaagcagcggcctgtactctctgagcagcgtggtcacagtgcctagctctagcctgggcacccagacctacatctgcaatgtgaaccacaagcctagcaacaccaaggtggacaagagagtggaacccaagagctgtgaagtgaaaaccgactccaccgaccacgtgaagcccaaagagacagagaacaccaagcagcccagcaagagctgccacaagcccaaggccatcgtgcacaccgagaaagtgaacatgatgagcctgaccgtgctgggcctgcggatgctgttcgccaaaaccgtggccgtgaacttcctgctgaccgccaagctgttcttcctc

SEQ ID NO: 2899 - DNA, 2340 bp, Artificial Sequence
  Synthetic Polynucloetide
atggccttaccagtgaccgccttgctcctgccgctggccttgctgctccacgccgccaggccggaagtgcagctggttgaatctggcggaggactggttcagcctggcggatctctgagactgtcttgtgccgccagcggcttcagcttcagcgacttttggatgagctgggtccgacaggcccctggcaaaggacttgaatgggtcgccacaatcagccaggccggcagcgagaaggactacgtggactctgtgaagggcagattcaccatcagccgggacaacgccaagaagtccctgtacctccagatgaacagcctgagagccgaggacaccgccgtgtactattgtgcctctggcgtgtacagcttcgactacagaggccagggcaccctggtcacagtctcttctggtaccggcggaggcggatctggcggcggaggtagcggtggcggaggatctgaattccagtctgtggtcacacagccacctagcatgtctgccgctccaggccagcaagtgaccatctcttgtagcggcggcaacagcaacatcgagcggaactacgtgtcctggtatctgcaactgcctggcacagcccctaagctggtcatcttcgacaacgacagacggcccagcggcatccccgatagattttctggcagcaagagcggcaccagcgccacactgggaattaccggacttcagacaggcgacgaggccgactactactgtggcacatgggactctagcctgagaggctgggttttcggcggaggcacaaagctgacagtgcttggtctcgagggacagcctaaggccaatcctaccgtgacactgttccctccaagcagcgaagaactccaggccaacaaggccacacttgtgtgcctgatctccgacttctaccctggggctgtgacagtggcttggaaggccgatggatctcctgtgaaagccggcgtggaaaccaccaagccatccaagcagagcaacaacaaatacgccgccagctcctacctgagcctgacacctgagcagtggaagtcccacagatcctacagctgccaagtgacccacgaaggcagcaccgtggaaaagacagtggcccctacagagtgcagccccatcaagaccgatgtgattacaatggaccccaaggacaactgctccaaggacgccaacgataccctgctgctccagctgaccaacaccagcgcctactacatgtacttgttgctgctgctgaagtccgtggtgtacttcgccatcatcacatgctgcctgctgcggagaaccgccttctgctgcaacggcgagaagtctagggccaagcgatctggatctggagcaacaaacttctcactactcaaacaagcaggtgacgtggaggagaatcccgggcctactagtatggactggatttggcgcatccttttccttgtcggcgctgctaccggcgcgcattccttcgaagtgcagctcgttgagtctggcggcggactgattcaacctggcggaagcctgagactgagctgtgccgcttccggcttcaccttcagcaactacgccatgaactgggttcgacaggcccctggcaaaggactggaatgggtgtccaccatcaacggcagaggcagcagcaccatctacgccgattctgtgaagggcagattcaccatcagccgggacaacagcaagaacaccctgtacctccagatgaactccctgagagccgaggacaccgccacctattactgtgcccggtacatcagcagaggactgggcgattcttggggccagggcacactggttacagtgacgcgtgcctctacaaagggaccctccgtgtttcctctggctcccagcagcaagtctacaagcggaggaacagccgctctgggctgcctggtcaaggattactttcccgagcctgtgaccgtgtcctggaatagcggagcactgacaagcggcgtgcacacctttccagccgtgctgcaaagcagcggcctgtactctctgagcagcgtggtcacagtgcctagctctagcctgggcacccagacctacatctgcaatgtgaaccacaagcctagcaacaccaaggtggacaagagagtggaacccaagagctgtgaagtgaaaaccgactccaccgaccacgtgaagcccaaagagacagagaacaccaagcagcccagcaagagctgccacaagcccaaggccatcgtgcacaccgagaaagtgaacatgatgagcctgaccgtgctgggcctgcggatgctgttcgccaaaaccgtggccgtgaacttcctgctgaccgccaagctgttcttcctc

SEQ ID NO: 2900 - DNA, 2343 bp, Artificial Sequence
  Synthetic Polynucloetide
atggccttaccagtgaccgccttgctcctgccgctggccttgctgctccacgccgccaggccggaagtgcagctggttgaatctggcggaggactggttcagcctggcggatctctgagactgtcttgtgccgccagcggcttcagcttcagcgacttttggatgagctgggtccgacaggcccctggcaaaggacttgaatgggtcgccacaatcagccaggccggcagcgagaaggactacgtggactctgtgaagggcagattcaccatcagccgggacaacgccaagaagtccctgtacctccagatgaacagcctgagagccgaggacaccgccgtgtactattgtgcctctggcgtgtacagcttcgactacagaggccagggcaccctggtcacagtctcttctggtaccggcggaggcggatctggcggcggaggtagcggtggcggaggatctgaattcgacgtcgtgatgacccagacccctctgagcctgcctgtgtccctgggcgatcaggccagcatcagctgtagaagcagccagagcctggtgcacagcaacggcaacacctacctgcactggtatctccagaagcccggccagagccccaagctgctgatctacaaggtgtccaacagattcagcggcgtgcccgacagattctccggcagcggctctggcaccgacttcaccctgaagatcagccgggtggaagccgaggacctgggcgtgtacttctgtagccagaacacccccgtgccccccaagtttggcagcggcaccaagctggaaatcaagctcgagggacagcctaaggccaatcctaccgtgacactgttccctccaagcagcgaagaactccaggccaacaaggccacacttgtgtgcctgatctccgacttctaccctggggctgtgacagtggcttggaaggccgatggatctcctgtgaaagccggcgtggaaaccaccaagccatccaagcagagcaacaacaaatacgccgccagctcctacctgagcctgacacctgagcagtggaagtcccacagatcctacagctgccaagtgacccacgaaggcagcaccgtggaaaagacagtggcccctacagagtgcagccccatcaagaccgatgtgattacaatggaccccaaggacaactgctccaaggacgccaacgataccctgctgctccagctgaccaacaccagcgcctactacatgtacttgttgctgctgctgaagtccgtggtgtacttcgccatcatcacatgctgcctgctgcggagaaccgccttctgctgcaacggcgagaagtctagggccaagcgatctggatctggagcaacaaacttctcactactcaaacaagcaggtgacgtggaggagaatcccgggcctactagtatggactggatttggcgcatccttttccttgtcggcgctgctaccggcgcgcattccttcgaacaggtgcagctccagcagtctggcgctgaactcgtgcggcctggcgcttctgtgaagctgtcttgcaaggccagcggctacaccttcaacgactacgagatgcactgggtcaagcagacccctgtgcacggcctgaagtggatcggagccctggaacccaagaccggcgataccgcctacagccagaagttcaagggcaaggccaccctgaccgccgacaagagcagcagcacagcctacatggaactgcggagcctgaccagcgaggacagcgccgtgtactactgcaccagctgctactactacacctacagcggccagggcaccctcgtgacagtgtctgctacgcgtgcctctacaaagggaccctccgtgtttcctctggctcccagcagcaagtctacaagcggaggaacagccgctctgggctgcctggtcaaggattactttcccgagcctgtgaccgtgtcctggaatagcggagcactgacaagcggcgtgcacacctttccagccgtgctgcaaagcagcggcctgtactctctgagcagcgtggtcacagtgcctagctctagcctgggcacccagacctacatctgcaatgtgaaccacaagcctagcaacaccaaggtggacaagagagtggaacccaagagctgtgaagtgaaaaccgactccaccgaccacgtgaagcccaaagagacagagaacaccaagcagcccagcaagagctgccacaagcccaaggccatcgtgcacaccgagaaagtgaacatgatgagcctgaccgtgctgggcctgcggatgctgttcgccaaaaccgtggccgtgaacttcctgctgaccgccaagctgttcttcctc

SEQ ID NO: 2901 - DNA, 2340 bp, Artificial Sequence
  Synthetic Polynucloetide
atggccttaccagtgaccgccttgctcctgccgctggccttgctgctccacgccgccaggccggaagtgcagctggttgaatctggcggaggactggttcagcctggcggatctctgagactgtcttgtgccgccagcggcttcagcttcagcgacttttggatgagctgggtccgacaggcccctggcaaaggacttgaatgggtcgccacaatcagccaggccggcagcgagaaggactacgtggactctgtgaagggcagattcaccatcagccgggacaacgccaagaagtccctgtacctccagatgaacagcctgagagccgaggacaccgccgtgtactattgtgcctctggcgtgtacagcttcgactacagaggccagggcaccctggtcacagtctcttctggtaccggcggaggcggatctggcggcggaggtagcggtggcggaggatctgaattcgacatccaactgacccagagccccagcagcctgtctgcctctgtgggcgacagagtgaccatcacctgtagagccagccagggcatcagaaacgacctgggctggtatcagcagaagcccggcaaggcccccaagcggctgatctatgctgccagctccctccagaatggcgtgcccagcagattttccggcagcggctctggcaccgagttcaccctgaccatcagctccctccagcccgaggacttcgccacctactactgcctccagcacaacacctaccccgccttcggccagggcaccaaggtggaaatcaagagactcgagggacagcctaaggccaatcctaccgtgacactgttccctccaagcagcgaagaactccaggccaacaaggccacacttgtgtgcctgatctccgacttctaccctggggctgtgacagtggcttggaaggccgatggatctcctgtgaaagccggcgtggaaaccaccaagccatccaagcagagcaacaacaaatacgccgccagctcctacctgagcctgacacctgagcagtggaagtcccacagatcctacagctgccaagtgacccacgaaggcagcaccgtggaaaagacagtggcccctacagagtgcagccccatcaagaccgatgtgattacaatggaccccaaggacaactgctccaaggacgccaacgataccctgctgctccagctgaccaacaccagcgcctactacatgtacttgttgctgctgctgaagtccgtggtgtacttcgccatcatcacatgctgcctgctgcggagaaccgccttctgctgcaacggcgagaagtctagggccaagcgatctggatctggagcaacaaacttctcactactcaaacaagcaggtgacgtggaggagaatcccgggcctactagtatggactggatttggcgcatccttttccttgtcggcgctgctaccggcgcgcattccttcgaacaggtgcaactccaggaatctggccctggcctcgtgaagcctagccagaccctgagcctgacctgtaccgtgtctggcggcagcatcagcagcttcaactactactggtcctggatcagacaccaccctggcaagggcctggaatggatcggctacatctactacagcggcagcacctacagcaaccccagcctgaagtcccgcgtgaccatctccgtggacaccagcaagaaccagtttagcctgaccctgtccagcgtgacagccgccgataccgccgtgtactactgcgccagaggctacaactggaactacttcgactactggggccagggaaccctcgtgaccgtgtctagtacgcgtgcctctacaaagggaccctccgtgtttcctctggctcccagcagcaagtctacaagcggaggaacagccgctctgggctgcctggtcaaggattactttcccgagcctgtgaccgtgtcctggaatagcggagcactgacaagcggcgtgcacacctttccagccgtgctgcaaagcagcggcctgtactctctgagcagcgtggtcacagtgcctagctctagcctgggcacccagacctacatctgcaatgtgaaccacaagcctagcaacaccaaggtggacaagagagtggaacccaagagctgtgaagtgaaaaccgactccaccgaccacgtgaagcccaaagagacagagaacaccaagcagcccagcaagagctgccacaagcccaaggccatcgtgcacaccgagaaagtgaacatgatgagcctgaccgtgctgggcctgcggatgctgttcgccaaaaccgtggccgtgaacttcctgctgaccgccaagctgttcttcctc

SEQ ID NO: 2902 - DNA, 2346 bp, Artificial Sequence
  Synthetic Polynucloetide
atggccttaccagtgaccgccttgctcctgccgctggccttgctgctccacgccgccaggccggaagtgcagctggttgaatctggcggaggactggttcagcctggcggatctctgagactgtcttgtgccgccagcggcttcagcttcagcgacttttggatgagctgggtccgacaggcccctggcaaaggacttgaatgggtcgccacaatcagccaggccggcagcgagaaggactacgtggactctgtgaagggcagattcaccatcagccgggacaacgccaagaagtccctgtacctccagatgaacagcctgagagccgaggacaccgccgtgtactattgtgcctctggcgtgtacagcttcgactacagaggccagggcaccctggtcacagtctcttctggtaccggcggaggcggatctggcggcggaggtagcggtggcggaggatctgaattcgacgacatcgtgctgacccagagccccgccagcctggccgtgagcctgggccagagcgtgaccatcagctgcagagccagcgagagcgtggagtactacggcaccagcctgatgcagtggtaccagcagaagcccggccagccccccaagctgctgatctacgccaccagcaacgtggagagcggcgtgcccgccagattcagcggcagcggcagcggcaccgacttcagcctgaacatccaccccgtggaggaggacgacatcgccatgtacttctgccagcagagcagaaagctgcccagcaccttcggcggcggcaccaagctggagatcaagctcgagggacagcctaaggccaatcctaccgtgacactgttccctccaagcagcgaagaactccaggccaacaaggccacacttgtgtgcctgatctccgacttctaccctggggctgtgacagtggcttggaaggccgatggatctcctgtgaaagccggcgtggaaaccaccaagccatccaagcagagcaacaacaaatacgccgccagctcctacctgagcctgacacctgagcagtggaagtcccacagatcctacagctgccaagtgacccacgaaggcagcaccgtggaaaagacagtggcccctacagagtgcagccccatcaagaccgatgtgattacaatggaccccaaggacaactgctccaaggacgccaacgataccctgctgctccagctgaccaacaccagcgcctactacatgtacttgttgctgctgctgaagtccgtggtgtacttcgccatcatcacatgctgcctgctgcggagaaccgccttctgctgcaacggcgagaagtctagggccaagcgatctggatctggagcaacaaacttctcactactcaaacaagcaggtgacgtggaggagaatcccgggcctactagtatggactggatttggcgcatccttttccttgtcggcgctgctaccggcgcgcattccttcgaagacgtgagactgcaggagagcggccccggccaggtgaagcccagccagaccgtgagcctgacctgcagcgtgaccggctacagcatcaccaacggcaaccactggtggaactggatcagacaggtgagcggcagcaagctggagtggatcggctacatcagcagcagcggcagcaccgacagcaaccccagcctgaagagcagaatcagcatcaccagagacaccagcaagaaccagctgttcctgcagctgaacagcgtgaccaccgaggacatcgccacctactactgcgccagaggctactacttcgactactggggccagggcaccaccctgaccgtgagcagcacgcgtgcctctacaaagggaccctccgtgtttcctctggctcccagcagcaagtctacaagcggaggaacagccgctctgggctgcctggtcaaggattactttcccgagcctgtgaccgtgtcctggaatagcggagcactgacaagcggcgtgcacacctttccagccgtgctgcaaagcagcggcctgtactctctgagcagcgtggtcacagtgcctagctctagcctgggcacccagacctacatctgcaatgtgaaccacaagcctagcaacaccaaggtggacaagagagtggaacccaagagctgtgaagtgaaaaccgactccaccgaccacgtgaagcccaaagagacagagaacaccaagcagcccagcaagagctgccacaagcccaaggccatcgtgcacaccgagaaagtgaacatgatgagcctgaccgtgctgggcctgcggatgctgttcgccaaaaccgtggccgtgaacttcctgctgaccgccaagctgttcttcctc

SEQ ID NO: 2903 - DNA, 2343 bp, Artificial Sequence
  Synthetic Polynucloetide
atggccttaccagtgaccgccttgctcctgccgctggccttgctgctccacgccgccaggccggaagtgcagctggttgaatctggcggaggactggttcagcctggcggatctctgagactgtcttgtgccgccagcggcttcagcttcagcgacttttggatgagctgggtccgacaggcccctggcaaaggacttgaatgggtcgccacaatcagccaggccggcagcgagaaggactacgtggactctgtgaagggcagattcaccatcagccgggacaacgccaagaagtccctgtacctccagatgaacagcctgagagccgaggacaccgccgtgtactattgtgcctctggcgtgtacagcttcgactacagaggccagggcaccctggtcacagtctcttctggtaccggcggaggcggatctggcggcggaggtagcggtggcggaggatctgaattcgacatccagatgacccagagccccagcagcctgtctgccagcgtgggcgacagagtgaccatcacctgtagagccagccaggacgtgaacaccgccgtggcctggtatcagcagaagcctggcaaggcccccaagctgctgatctacagcgccagcttcctggaaagcggcgtgcccagcagattcagcggaagcagaagcggcaccgacttcaccctgaccatcagctccctccagcccgaggacttcgccacctactactgccagcagcactacaccacccctcccaccttcggccagaccaaggtggaaatcaagagactcgagggacagcctaaggccaatcctaccgtgacactgttccctccaagcagcgaagaactccaggccaacaaggccacacttgtgtgcctgatctccgacttctaccctggggctgtgacagtggcttggaaggccgatggatctcctgtgaaagccggcgtggaaaccaccaagccatccaagcagagcaacaacaaatacgccgccagctcctacctgagcctgacacctgagcagtggaagtcccacagatcctacagctgccaagtgacccacgaaggcagcaccgtggaaaagacagtggcccctacagagtgcagccccatcaagaccgatgtgattacaatggaccccaaggacaactgctccaaggacgccaacgataccctgctgctccagctgaccaacaccagcgcctactacatgtacttgttgctgctgctgaagtccgtggtgtacttcgccatcatcacatgctgcctgctgcggagaaccgccttctgctgcaacggcgagaagtctagggccaagcgatctggatctggagcaacaaacttctcactactcaaacaagcaggtgacgtggaggagaatcccgggcctactagtatggactggatttggcgcatccttttccttgtcggcgctgctaccggcgcgcattccttcgaagaagtgcaactggtggaatctggcggcggactggtgcagcctggcggatctctgagactgagctgtgccgccagcggcttcaacatcaaggacacctacatccactgggtgcgccaggcccctggaaagggactggaatgggtggcccggatctaccccaccaacggctacaccagatacgccgacagcgtgaagggccggttcaccatcagcgccgacaccagcaagaataccgcctacctccagatgaacagcctgcgggccgaggataccgccgtgtactactgctcaagatggggaggcgacggcttctacgctatggacgtgtggggccagggcacccttgtgaccgtgtcatctacgcgtgcctctacaaagggaccctccgtgtttcctctggctcccagcagcaagtctacaagcggaggaacagccgctctgggctgcctggtcaaggattactttcccgagcctgtgaccgtgtcctggaatagcggagcactgacaagcggcgtgcacacctttccagccgtgctgcaaagcagcggcctgtactctctgagcagcgtggtcacagtgcctagctctagcctgggcacccagacctacatctgcaatgtgaaccacaagcctagcaacaccaaggtggacaagagagtggaacccaagagctgtgaagtgaaaaccgactccaccgaccacgtgaagcccaaagagacagagaacaccaagcagcccagcaagagctgccacaagcccaaggccatcgtgcacaccgagaaagtgaacatgatgagcctgaccgtgctgggcctgcggatgctgttcgccaaaaccgtggccgtgaacttcctgctgaccgccaagctgttcttcctc

SEQ ID NO: 2904 - DNA, 2340 bp, Artificial Sequence
  Synthetic Polynucloetide
atggccttaccagtgaccgccttgctcctgccgctggccttgctgctccacgccgccaggccggaagtgcagctggttgaatctggcggaggactggttcagcctggcggatctctgagactgtcttgtgccgccagcggcttcagcttcagcgacttttggatgagctgggtccgacaggcccctggcaaaggacttgaatgggtcgccacaatcagccaggccggcagcgagaaggactacgtggactctgtgaagggcagattcaccatcagccgggacaacgccaagaagtccctgtacctccagatgaacagcctgagagccgaggacaccgccgtgtactattgtgcctctggcgtgtacagcttcgactacagaggccagggcaccctggtcacagtctcttctggtaccggcggaggcggatctggcggcggaggtagcggtggcggaggatctgaattcgaccagagcgtgctgacacagcctcctagcgtgtcagtggcccctggcaagaccgccagaatcccctgcgagggcaactacatcggcagcagcaacgtgcactggtatcagcagaagcccggccaggctcccgtgctcgtgatccacttcgacagcgacagacccagcggcatccccgacagattcagcggcagcaacagcggcaacatggctaccctgaccatcagcagagtggaagccggggacgaggccgactactactgtcaagtgtgggagaaccacggctgggtgttcggcggaggcaccaagctgacagtgctgtctctcgagggacagcctaaggccaatcctaccgtgacactgttccctccaagcagcgaagaactccaggccaacaaggccacacttgtgtgcctgatctccgacttctaccctggggctgtgacagtggcttggaaggccgatggatctcctgtgaaagccggcgtggaaaccaccaagccatccaagcagagcaacaacaaatacgccgccagctcctacctgagcctgacacctgagcagtggaagtcccacagatcctacagctgccaagtgacccacgaaggcagcaccgtggaaaagacagtggcccctacagagtgcagccccatcaagaccgatgtgattacaatggaccccaaggacaactgctccaaggacgccaacgataccctgctgctccagctgaccaacaccagcgcctactacatgtacttgttgctgctgctgaagtccgtggtgtacttcgccatcatcacatgctgcctgctgcggagaaccgccttctgctgcaacggcgagaagtctagggccaagcgatctggatctggagcaacaaacttctcactactcaaacaagcaggtgacgtggaggagaatcccgggcctactagtatggactggatttggcgcatccttttccttgtcggcgctgctaccggcgcgcattccttcgaagaggtgcaactggtggaaacaggcggcggactggtgcagcctggcgagtctctgagactgagctgtgccgccagcggcttcaccttcagcgactacgagatgaactgggtgcgccaggcccctggaaagggcctggaatgggtgtcctacatcagcagctccggcagcaccatctactacgccgacagcgtgaagggccggtttaccatctaccgggacaacgccaagaacagcctgtacctccagatgaactccctgcgggccgaggacaccgccctgtactattgtgccagagcctggggcgtgggaccccctgattattggggacagggcaccctcgtgaccgtgtcctctacgcgtgcctctacaaagggaccctccgtgtttcctctggctcccagcagcaagtctacaagcggaggaacagccgctctgggctgcctggtcaaggattactttcccgagcctgtgaccgtgtcctggaatagcggagcactgacaagcggcgtgcacacctttccagccgtgctgcaaagcagcggcctgtactctctgagcagcgtggtcacagtgcctagctctagcctgggcacccagacctacatctgcaatgtgaaccacaagcctagcaacaccaaggtggacaagagagtggaacccaagagctgtgaagtgaaaaccgactccaccgaccacgtgaagcccaaagagacagagaacaccaagcagcccagcaagagctgccacaagcccaaggccatcgtgcacaccgagaaagtgaacatgatgagcctgaccgtgctgggcctgcggatgctgttcgccaaaaccgtggccgtgaacttcctgctgaccgccaagctgttcttcctc

SEQ ID NO: 2905 - DNA, 2364 bp, Artificial Sequence
  Synthetic Polynucloetide
atggccttaccagtgaccgccttgctcctgccgctggccttgctgctccacgccgccaggccggaagtgcagctggttgaatctggcggaggactggttcagcctggcggatctctgagactgtcttgtgccgccagcggcttcagcttcagcgacttttggatgagctgggtccgacaggcccctggcaaaggacttgaatgggtcgccacaatcagccaggccggcagcgagaaggactacgtggactctgtgaagggcagattcaccatcagccgggacaacgccaagaagtccctgtacctccagatgaacagcctgagagccgaggacaccgccgtgtactattgtgcctctggcgtgtacagcttcgactacagaggccagggcaccctggtcacagtctcttctggtaccggcggaggcggatctggcggcggaggtagcggtggcggaggatctgaattcgacatccagatgacccagagccccagcagcctgtctgccagcgtgggcgataccgtgaccatcacctgtcaggccaacggctacctgaactggtatcagcagcggagaggcaaggcccccaagctgctgatctacgacggcagcaagctggaaagaggcgtgcccagcagattcagcggcagaagatggggccaggagtacaacctgaccatcaacaacctccagcccgaggatattgccacatacttttgccaggtgtacgagttcgtggtgcccggcacacggctggacctgaagagaacagtggctgctcctctcgagggacagcctaaggccaatcctaccgtgacactgttccctccaagcagcgaagaactccaggccaacaaggccacacttgtgtgcctgatctccgacttctaccctggggctgtgacagtggcttggaaggccgatggatctcctgtgaaagccggcgtggaaaccaccaagccatccaagcagagcaacaacaaatacgccgccagctcctacctgagcctgacacctgagcagtggaagtcccacagatcctacagctgccaagtgacccacgaaggcagcaccgtggaaaagacagtggcccctacagagtgcagccccatcaagaccgatgtgattacaatggaccccaaggacaactgctccaaggacgccaacgataccctgctgctccagctgaccaacaccagcgcctactacatgtacttgttgctgctgctgaagtccgtggtgtacttcgccatcatcacatgctgcctgctgcggagaaccgccttctgctgcaacggcgagaagtctagggccaagcgatctggatctggagcaacaaacttctcactactcaaacaagcaggtgacgtggaggagaatcccgggcctactagtatggactggatttggcgcatccttttccttgtcggcgctgctaccggcgcgcattccttcgaacaggtgcagctgctccagtctggcgctgccgtgacaaagcctggcgcttctgtgcgggtgtcctgtgaagccagcggctacaacatccgggactacttcatccactggtggcggcaggctccaggccagggactccagtgggtgggatggatcaaccccaagaccggccagcccaacaaccccagacagttccagggcagagtgtccctgaccagacacgccagctgggacttcgacaccttcagcttctacatggatctgaaggccctgcggagcgacgataccgccgtgtacttctgcgccagacagagaagcgactactgggatttcgacgtgtggggcagcggcacccaagtgacagtgtctagcgccagcaccaagggacccacgcgtgcctctacaaagggaccctccgtgtttcctctggctcccagcagcaagtctacaagcggaggaacagccgctctgggctgcctggtcaaggattactttcccgagcctgtgaccgtgtcctggaatagcggagcactgacaagcggcgtgcacacctttccagccgtgctgcaaagcagcggcctgtactctctgagcagcgtggtcacagtgcctagctctagcctgggcacccagacctacatctgcaatgtgaaccacaagcctagcaacaccaaggtggacaagagagtggaacccaagagctgtgaagtgaaaaccgactccaccgaccacgtgaagcccaaagagacagagaacaccaagcagcccagcaagagctgccacaagcccaaggccatcgtgcacaccgagaaagtgaacatgatgagcctgaccgtgctgggcctgcggatgctgttcgccaaaaccgtggccgtgaacttcctgctgaccgccaagctgttcttcctc

SEQ ID NO: 2906 - DNA, 2382 bp, Artificial Sequence
  Synthetic Polynucloetide
atggccttaccagtgaccgccttgctcctgccgctggccttgctgctccacgccgccaggccggaagtgcagctggttgaatctggcggaggactggttcagcctggcggatctctgagactgtcttgtgccgccagcggcttcagcttcagcgacttttggatgagctgggtccgacaggcccctggcaaaggacttgaatgggtcgccacaatcagccaggccggcagcgagaaggactacgtggactctgtgaagggcagattcaccatcagccgggacaacgccaagaagtccctgtacctccagatgaacagcctgagagccgaggacaccgccgtgtactattgtgcctctggcgtgtacagcttcgactacagaggccagggcaccctggtcacagtctcttctggtaccggcggaggcggatctggcggcggaggtagcggtggcggaggatctgaattccagtctgccctgacacagcctcctagcgcctctggctctcccggccagagcatcaccatcagctgtaccggcaccagcaacaacttcgtgtcctggtatcagcagcacgccggcaaggcccccaagctcgtgatctacgacgtgaacaagcggcccagcggcgtgcccgatagattcagcggcagcaagagcggcaacaccgccagcctgacagtgtctggcctccagaccgatgacgaggccgtgtactactgcggcagcctcgtgggcaactgggacgtgatctttggcggaggcaccaagctgaccgtgctgctcgagggacagcctaaggccaatcctaccgtgacactgttccctccaagcagcgaagaactccaggccaacaaggccacacttgtgtgcctgatctccgacttctaccctggggctgtgacagtggcttggaaggccgatggatctcctgtgaaagccggcgtggaaaccaccaagccatccaagcagagcaacaacaaatacgccgccagctcctacctgagcctgacacctgagcagtggaagtcccacagatcctacagctgccaagtgacccacgaaggcagcaccgtggaaaagacagtggcccctacagagtgcagccccatcaagaccgatgtgattacaatggaccccaaggacaactgctccaaggacgccaacgataccctgctgctccagctgaccaacaccagcgcctactacatgtacttgttgctgctgctgaagtccgtggtgtacttcgccatcatcacatgctgcctgctgcggagaaccgccttctgctgcaacggcgagaagtctagggccaagcgatctggatctggagcaacaaacttctcactactcaaacaagcaggtgacgtggaggagaatcccgggcctactagtatggactggatttggcgcatccttttccttgtcggcgctgctaccggcgcgcattccttcgaacagccccagctccaggaatctggccccacactggtggaagccagcgagacactgagcctgacctgtgccgtgtccggcgattctaccgccgcctgcaatagcttctggggctgggtgcgccagcctcctggaaagggactggaatgggtgggaagcctgagccactgcgccagctattggaaccggggctggacctaccacaaccccagcctgaagtccagactgaccctggccctggacacccccaagaacctggtgttcctgaagctgaacagcgtgacagccgccgacaccgccacctactactgtgccagatttggcggcgaggtgctgcggtacaccgactggcctaaacctgcctgggtggacctgtggggcagaggaacactcgtgaccgtgtccagcacgcgtgcctctacaaagggaccctccgtgtttcctctggctcccagcagcaagtctacaagcggaggaacagccgctctgggctgcctggtcaaggattactttcccgagcctgtgaccgtgtcctggaatagcggagcactgacaagcggcgtgcacacctttccagccgtgctgcaaagcagcggcctgtactctctgagcagcgtggtcacagtgcctagctctagcctgggcacccagacctacatctgcaatgtgaaccacaagcctagcaacaccaaggtggacaagagagtggaacccaagagctgtgaagtgaaaaccgactccaccgaccacgtgaagcccaaagagacagagaacaccaagcagcccagcaagagctgccacaagcccaaggccatcgtgcacaccgagaaagtgaacatgatgagcctgaccgtgctgggcctgcggatgctgttcgccaaaaccgtggccgtgaacttcctgctgaccgccaagctgttcttcctc

SEQ ID NO: 2907 - DNA, 2337 bp, Artificial Sequence
  Synthetic Polynucloetide
atggccttaccagtgaccgccttgctcctgccgctggccttgctgctccacgccgccaggccggaagtgcagctggttgaatctggcggaggactggttcagcctggcggatctctgagactgtcttgtgccgccagcggcttcagcttcagcgacttttggatgagctgggtccgacaggcccctggcaaaggacttgaatgggtcgccacaatcagccaggccggcagcgagaaggactacgtggactctgtgaagggcagattcaccatcagccgggacaacgccaagaagtccctgtacctccagatgaacagcctgagagccgaggacaccgccgtgtactattgtgcctctggcgtgtacagcttcgactacagaggccagggcaccctggtcacagtctcttctggtaccggcggaggcggatctggcggcggaggtagcggtggcggaggatctgaattcgagatcgtgctgacacagagccctggcaccctgagcctgtctccaggcgagacagccatcatcagctgccggacaagccagtacggcagcctggcctggtatcagcagaggccaggacaggcccccagactcgtgatctacagcggcagcacaagagccgccggaatccccgatagattcagcggctccagatggggacccgactacaacctgaccatcagcaacctggaaagcggcgacttcggcgtgtactactgccagcagtacgagttcttcggccagggcaccaaggtgcaggtggacatcaaaagactcgagggacagcctaaggccaatcctaccgtgacactgttccctccaagcagcgaagaactccaggccaacaaggccacacttgtgtgcctgatctccgacttctaccctggggctgtgacagtggcttggaaggccgatggatctcctgtgaaagccggcgtggaaaccaccaagccatccaagcagagcaacaacaaatacgccgccagctcctacctgagcctgacacctgagcagtggaagtcccacagatcctacagctgccaagtgacccacgaaggcagcaccgtggaaaagacagtggcccctacagagtgcagccccatcaagaccgatgtgattacaatggaccccaaggacaactgctccaaggacgccaacgataccctgctgctccagctgaccaacaccagcgcctactacatgtacttgttgctgctgctgaagtccgtggtgtacttcgccatcatcacatgctgcctgctgcggagaaccgccttctgctgcaacggcgagaagtctagggccaagcgatctggatctggagcaacaaacttctcactactcaaacaagcaggtgacgtggaggagaatcccgggcctactagtatggactggatttggcgcatccttttccttgtcggcgctgctaccggcgcgcattccttcgaacaggtgcagctggtgcagtctggcggccagatgaagaaacccggcgagagcatgagaatcagctgtcgggcctccggctacgagttcatcgactgcaccctgaactggatcagactggcccctggcaagcggcctgagtggatgggatggctgaagcctagaggcggagccgtgaactacgccagacctctccagggcagagtgaccatgaccagggacgtgtacagcgataccgccttcctggaactgcggagcctgaccgtggatgataccgccgtgtacttctgcaccagaggcaagaactgcgattacaactgggacttcgagcactggggcagaggcacccctgtgatcgtgtctagcacgcgtgcctctacaaagggaccctccgtgtttcctctggctcccagcagcaagtctacaagcggaggaacagccgctctgggctgcctggtcaaggattactttcccgagcctgtgaccgtgtcctggaatagcggagcactgacaagcggcgtgcacacctttccagccgtgctgcaaagcagcggcctgtactctctgagcagcgtggtcacagtgcctagctctagcctgggcacccagacctacatctgcaatgtgaaccacaagcctagcaacaccaaggtggacaagagagtggaacccaagagctgtgaagtgaaaaccgactccaccgaccacgtgaagcccaaagagacagagaacaccaagcagcccagcaagagctgccacaagcccaaggccatcgtgcacaccgagaaagtgaacatgatgagcctgaccgtgctgggcctgcggatgctgttcgccaaaaccgtggccgtgaacttcctgctgaccgccaagctgttcttcctc

SEQ ID NO: 2908 - DNA, 2367 bp, Artificial Sequence
  Synthetic Polynucloetide
atggccttaccagtgaccgccttgctcctgccgctggccttgctgctccacgccgccaggccggaagtgcagctggttgaatctggcggaggactggttcagcctggcggatctctgagactgtcttgtgccgccagcggcttcagcttcagcgacttttggatgagctgggtccgacaggcccctggcaaaggacttgaatgggtcgccacaatcagccaggccggcagcgagaaggactacgtggactctgtgaagggcagattcaccatcagccgggacaacgccaagaagtccctgtacctccagatgaacagcctgagagccgaggacaccgccgtgtactattgtgcctctggcgtgtacagcttcgactacagaggccagggcaccctggtcacagtctcttctggtaccggcggaggcggatctggcggcggaggtagcggtggcggaggatctgaattcgagctggtgctgacacagagccctggcaccctgtctctgtctgccggcgaaagagccaccctgagctgtagagccagccagagcgtgtcctctggcagcctggcttggtatcagcagaagccaggccaggcccccagactgctgatctacggcgcttctaccagagccaccggcatccccgatagattcagcggctctggctccggcaccgacttcaccctgacaatcggcagactggaacccgaggacctggccgtgtactactgccagcagtacggcaccagcccctacacattcggccagggcaccaagctggaaatcctcgagggacagcctaaggccaatcctaccgtgacactgttccctccaagcagcgaagaactccaggccaacaaggccacacttgtgtgcctgatctccgacttctaccctggggctgtgacagtggcttggaaggccgatggatctcctgtgaaagccggcgtggaaaccaccaagccatccaagcagagcaacaacaaatacgccgccagctcctacctgagcctgacacctgagcagtggaagtcccacagatcctacagctgccaagtgacccacgaaggcagcaccgtggaaaagacagtggcccctacagagtgcagccccatcaagaccgatgtgattacaatggaccccaaggacaactgctccaaggacgccaacgataccctgctgctccagctgaccaacaccagcgcctactacatgtacttgttgctgctgctgaagtccgtggtgtacttcgccatcatcacatgctgcctgctgcggagaaccgccttctgctgcaacggcgagaagtctagggccaagcgatctggatctggagcaacaaacttctcactactcaaacaagcaggtgacgtggaggagaatcccgggcctactagtatggactggatttggcgcatccttttccttgtcggcgctgctaccggcgcgcattccttcgaactggaacagagcggagccgaagtgaagaaacccggcagcagcgtgcaggtgtcctgcaaagcaagcggcggcaccttctctatgtacggcttcaactgggtgcgccaggctcctggacacggcctggaatggatgggcggcatcatccccatcttcggcacctccaactacgcccagaaattccggggcagagtgaccttcaccgccgaccaggccacaagcaccgcctacatggaactgaccaacctgcggagcgacgacaccgccgtgtattattgcgccagagacttcggccccgactgggaggatggcgacagctacgatggcagcggcagaggcttcttcgacttctggggccagggaacccttgtgaccgtgtcctcaacgcgtgcctctacaaagggaccctccgtgtttcctctggctcccagcagcaagtctacaagcggaggaacagccgctctgggctgcctggtcaaggattactttcccgagcctgtgaccgtgtcctggaatagcggagcactgacaagcggcgtgcacacctttccagccgtgctgcaaagcagcggcctgtactctctgagcagcgtggtcacagtgcctagctctagcctgggcacccagacctacatctgcaatgtgaaccacaagcctagcaacaccaaggtggacaagagagtggaacccaagagctgtgaagtgaaaaccgactccaccgaccacgtgaagcccaaagagacagagaacaccaagcagcccagcaagagctgccacaagcccaaggccatcgtgcacaccgagaaagtgaacatgatgagcctgaccgtgctgggcctgcggatgctgttcgccaaaaccgtggccgtgaacttcctgctgaccgccaagctgttcttcctc

SEQ ID NO: 2909 - DNA, 2307 bp, Artificial Sequence
  Synthetic Polynucloetide
atggccttaccagtgaccgccttgctcctgccgctggccttgctgctccacgccgccaggccggaagtgcagctggttgaatctggcggaggactggttcagcctggcggatctctgagactgtcttgtgccgccagcggcttcagcttcagcgacttttggatgagctgggtccgacaggcccctggcaaaggacttgaatgggtcgccacaatcagccaggccggcagcgagaaggactacgtggactctgtgaagggcagattcaccatcagccgggacaacgccaagaagtccctgtacctccagatgaacagcctgagagccgaggacaccgccgtgtactattgtgcctctggcgtgtacagcttcgactacagaggccagggcaccctggtcacagtctcttctggtaccggcggaggcggatctggcggcggaggtagcggtggcggaggatctgaattcgacatccagatgacccagagccccagcagcctgtctgccagcgtgggcgacagagtgaccatcacctgtcaggccagccaggacatcaacaactacctgaactggtatcagcagaagcccggcaaggcccccaagctgctgatctacgacgccagcaatctgcagaccggcgtgcccagcagattttccggctctggcagcggcaccgacttcaccttcaccatcgaggacattgccacctactactgccagcagtacaccttcggccctggcaccaaggtggacatcaaactcgagggacagcctaaggccaatcctaccgtgacactgttccctccaagcagcgaagaactccaggccaacaaggccacacttgtgtgcctgatctccgacttctaccctggggctgtgacagtggcttggaaggccgatggatctcctgtgaaagccggcgtggaaaccaccaagccatccaagcagagcaacaacaaatacgccgccagctcctacctgagcctgacacctgagcagtggaagtcccacagatcctacagctgccaagtgacccacgaaggcagcaccgtggaaaagacagtggcccctacagagtgcagccccatcaagaccgatgtgattacaatggaccccaaggacaactgctccaaggacgccaacgataccctgctgctccagctgaccaacaccagcgcctactacatgtacttgttgctgctgctgaagtccgtggtgtacttcgccatcatcacatgctgcctgctgcggagaaccgccttctgctgcaacggcgagaagtctagggccaagcgatctggatctggagcaacaaacttctcactactcaaacaagcaggtgacgtggaggagaatcccgggcctactagtatggactggatttggcgcatccttttccttgtcggcgctgctaccggcgcgcattccttcgaagaagtgcaactgctggaatctggcggcggactggtgcagcctggcggatctctgagactgagctgtgccgccagcggcttcacctttagctggtacagcatgacctgggtgcgccaggcccctggcaaaggactggaatgggtgtccagcatcgtgccctggggcgatttcacccagtacgccgatagcgtgaagggccggttcaccatcagccgggacaacagcaagaacaccctgtacctgcagatgaacagcctgcgggccgaggacaccgccgtgtactattgtgccaagggacctggctggggcagcttcgatctgtggggcagaggaacccttgtgaccgtgtccagcacgcgtgcctctacaaagggaccctccgtgtttcctctggctcccagcagcaagtctacaagcggaggaacagccgctctgggctgcctggtcaaggattactttcccgagcctgtgaccgtgtcctggaatagcggagcactgacaagcggcgtgcacacctttccagccgtgctgcaaagcagcggcctgtactctctgagcagcgtggtcacagtgcctagctctagcctgggcacccagacctacatctgcaatgtgaaccacaagcctagcaacaccaaggtggacaagagagtggaacccaagagctgtgaagtgaaaaccgactccaccgaccacgtgaagcccaaagagacagagaacaccaagcagcccagcaagagctgccacaagcccaaggccatcgtgcacaccgagaaagtgaacatgatgagcctgaccgtgctgggcctgcggatgctgttcgccaaaaccgtggccgtgaacttcctgctgaccgccaagctgttcttcctc

SEQ ID NO: 2910 - DNA, 2337 bp, Artificial Sequence
  Synthetic Polynucloetide
atggccttaccagtgaccgccttgctcctgccgctggccttgctgctccacgccgccaggccggaagtgcagctggttgaatctggcggaggactggttcagcctggcggatctctgagactgtcttgtgccgccagcggcttcagcttcagcgacttttggatgagctgggtccgacaggcccctggcaaaggacttgaatgggtcgccacaatcagccaggccggcagcgagaaggactacgtggactctgtgaagggcagattcaccatcagccgggacaacgccaagaagtccctgtacctccagatgaacagcctgagagccgaggacaccgccgtgtactattgtgcctctggcgtgtacagcttcgactacagaggccagggcaccctggtcacagtctcttctggtaccggcggaggcggatctggcggcggaggtagcggtggcggaggatctgaattcgacatccagatgacccagagccccagcagcctgtctgccagcgtgggcgacagagtgaccatcacctgtaccgccagcctgagcgtgtccagcacctacctgcactggtatcagcagaagcccggcagcagccccaagctgtggatctacagcaccagcaacctggcctccggcgtgcccagcagattttctggcagcggctctggcaccagctacaccctgaccatcagctccctccagcccgaggacttcgccacctactactgccaccagtaccacagaagccccctgacctttggcggaggcaccaaggtggaaatcaagagactcgagggacagcctaaggccaatcctaccgtgacactgttccctccaagcagcgaagaactccaggccaacaaggccacacttgtgtgcctgatctccgacttctaccctggggctgtgacagtggcttggaaggccgatggatctcctgtgaaagccggcgtggaaaccaccaagccatccaagcagagcaacaacaaatacgccgccagctcctacctgagcctgacacctgagcagtggaagtcccacagatcctacagctgccaagtgacccacgaaggcagcaccgtggaaaagacagtggcccctacagagtgcagccccatcaagaccgatgtgattacaatggaccccaaggacaactgctccaaggacgccaacgataccctgctgctccagctgaccaacaccagcgcctactacatgtacttgttgctgctgctgaagtccgtggtgtacttcgccatcatcacatgctgcctgctgcggagaaccgccttctgctgcaacggcgagaagtctagggccaagcgatctggatctggagcaacaaacttctcactactcaaacaagcaggtgacgtggaggagaatcccgggcctactagtatggactggatttggcgcatccttttccttgtcggcgctgctaccggcgcgcattccttcgaagaagtgcaactggtggaatctggcggcggactggtgcagcctggcggatctctgagactgagctgtgccgccagcggcttcagcctgaccaaatacggcgtgcactgggtgcgccaggcccctggaaaaggactggaatgggtgggagtgaagtgggctggcggctccaccgactacaacagcgccctgatgagccggttcaccatcagcaaggacaacgccaagaacagcctgtacctccagatgaactccctgcgggccgaggacaccgccgtgtactactgtgccagagatcaccgggacgctatggactactggggccagggaacactcgtgaccgtgtcctctacgcgtgcctctacaaagggaccctccgtgtttcctctggctcccagcagcaagtctacaagcggaggaacagccgctctgggctgcctggtcaaggattactttcccgagcctgtgaccgtgtcctggaatagcggagcactgacaagcggcgtgcacacctttccagccgtgctgcaaagcagcggcctgtactctctgagcagcgtggtcacagtgcctagctctagcctgggcacccagacctacatctgcaatgtgaaccacaagcctagcaacaccaaggtggacaagagagtggaacccaagagctgtgaagtgaaaaccgactccaccgaccacgtgaagcccaaagagacagagaacaccaagcagcccagcaagagctgccacaagcccaaggccatcgtgcacaccgagaaagtgaacatgatgagcctgaccgtgctgggcctgcggatgctgttcgccaaaaccgtggccgtgaacttcctgctgaccgccaagctgttcttcctc

SEQ ID NO: 2911 - DNA, 2349 bp, Artificial Sequence
  Synthetic Polynucloetide
atggccttaccagtgaccgccttgctcctgccgctggccttgctgctccacgccgccaggccggaagtgcagctggttgaatctggcggaggactggttcagcctggcggatctctgagactgtcttgtgccgccagcggcttcagcttcagcgacttttggatgagctgggtccgacaggcccctggcaaaggacttgaatgggtcgccacaatcagccaggccggcagcgagaaggactacgtggactctgtgaagggcagattcaccatcagccgggacaacgccaagaagtccctgtacctccagatgaacagcctgagagccgaggacaccgccgtgtactattgtgcctctggcgtgtacagcttcgactacagaggccagggcaccctggtcacagtctcttctggtaccggcggaggcggatctggcggcggaggtagcggtggcggaggatctgaattcgacatccagatgacccagagccccagcagcctgtctgccagcgtgggcgacagagtgaccatcacatgcaaggccagccaggacgtgggaacagccgtggcctggtatcagcagaagcctggcaaggcccccaagctgctgatctacagcgccagctacagatccaccggcgtgcccagcagattttccggctctggcagcggcaccgacttcaccctgaccatctctagcctccagcccgaggacttcgccacctactactgccagcaccactactccgccccctggacatttggcggaggcaccaaggtggaaatcaagctcgagggacagcctaaggccaatcctaccgtgacactgttccctccaagcagcgaagaactccaggccaacaaggccacacttgtgtgcctgatctccgacttctaccctggggctgtgacagtggcttggaaggccgatggatctcctgtgaaagccggcgtggaaaccaccaagccatccaagcagagcaacaacaaatacgccgccagctcctacctgagcctgacacctgagcagtggaagtcccacagatcctacagctgccaagtgacccacgaaggcagcaccgtggaaaagacagtggcccctacagagtgcagccccatcaagaccgatgtgattacaatggaccccaaggacaactgctccaaggacgccaacgataccctgctgctccagctgaccaacaccagcgcctactacatgtacttgttgctgctgctgaagtccgtggtgtacttcgccatcatcacatgctgcctgctgcggagaaccgccttctgctgcaacggcgagaagtctagggccaagcgatctggatctggagcaacaaacttctcactactcaaacaagcaggtgacgtggaggagaatcccgggcctactagtatggactggatttggcgcatccttttccttgtcggcgctgctaccggcgcgcattccttcgaagaagtgcaactggtggaatcaggcggcggactggtgcagcctggcggatctctgagactgagctgtgccgccagcggcttcaccttcagcagaaacggcatgagctgggtgcgccaggcccctggaaaaggactggaatgggtggcaaccgtgtccagcggcggcagctacatctactacgccgacagcgtgaagggccggttcaccatctccagagacaacgccaagaacagcctgtacctccagatgaactccctgcgggccgaggacaccgccgtgtactattgtgccagacagggcaccaccgccctggctaccagattcttcgatgtgtggggccagggcaccctcgtgaccgtgtcatctacgcgtgcctctacaaagggaccctccgtgtttcctctggctcccagcagcaagtctacaagcggaggaacagccgctctgggctgcctggtcaaggattactttcccgagcctgtgaccgtgtcctggaatagcggagcactgacaagcggcgtgcacacctttccagccgtgctgcaaagcagcggcctgtactctctgagcagcgtggtcacagtgcctagctctagcctgggcacccagacctacatctgcaatgtgaaccacaagcctagcaacaccaaggtggacaagagagtggaacccaagagctgtgaagtgaaaaccgactccaccgaccacgtgaagcccaaagagacagagaacaccaagcagcccagcaagagctgccacaagcccaaggccatcgtgcacaccgagaaagtgaacatgatgagcctgaccgtgctgggcctgcggatgctgttcgccaaaaccgtggccgtgaacttcctgctgaccgccaagctgttcttcctc

SEQ ID NO: 2912 - DNA, 2337 bp, Artificial Sequence
  Synthetic Polynucloetide
atggccttaccagtgaccgccttgctcctgccgctggccttgctgctccacgccgccaggccggaagtgcagctggttgaatctggcggaggactggttcagcctggcggatctctgagactgtcttgtgccgccagcggcttcagcttcagcgacttttggatgagctgggtccgacaggcccctggcaaaggacttgaatgggtcgccacaatcagccaggccggcagcgagaaggactacgtggactctgtgaagggcagattcaccatcagccgggacaacgccaagaagtccctgtacctccagatgaacagcctgagagccgaggacaccgccgtgtactattgtgcctctggcgtgtacagcttcgactacagaggccagggcaccctggtcacagtctcttctggtaccggcggaggcggatctggcggcggaggtagcggtggcggaggatctgaattcgacatccagatgacccagagcccccctagcctgtctgcctctgtgggcggcaaagtgaccatcacatgcaaggccagccaggacatcgaccgctacatggcctggtatcaggacaagcccggcaagggacccaagctgctgatccacgataccagcaccctccagcccggcatccccagcagattttctggcagcggctccggcagagactacagcttcagcatcagcaacctggaacccgaggacattgccacctactactgcctccagtacgacaacctgtggaccttcggcggaggcaccaagctggaaatcaagagactcgagggacagcctaaggccaatcctaccgtgacactgttccctccaagcagcgaagaactccaggccaacaaggccacacttgtgtgcctgatctccgacttctaccctggggctgtgacagtggcttggaaggccgatggatctcctgtgaaagccggcgtggaaaccaccaagccatccaagcagagcaacaacaaatacgccgccagctcctacctgagcctgacacctgagcagtggaagtcccacagatcctacagctgccaagtgacccacgaaggcagcaccgtggaaaagacagtggcccctacagagtgcagccccatcaagaccgatgtgattacaatggaccccaaggacaactgctccaaggacgccaacgataccctgctgctccagctgaccaacaccagcgcctactacatgtacttgttgctgctgctgaagtccgtggtgtacttcgccatcatcacatgctgcctgctgcggagaaccgccttctgctgcaacggcgagaagtctagggccaagcgatctggatctggagcaacaaacttctcactactcaaacaagcaggtgacgtggaggagaatcccgggcctactagtatggactggatttggcgcatccttttccttgtcggcgctgctaccggcgcgcattccttcgaacaggtgcaactggtgcagagcggagccgagcttgtgaagcctggcgcttccgtgaagatgagctgcaaagccagcggctacatcttcaccaactacaacatccactgggtcaagaagtccccaggccagggcctggaatggatcggagccatctaccccggaaacggcgacgccccttacagccagaagttccaggacagagccaccctgaccgccgacaccagcagcagcaccacctacatggaactgagcagcctgaccagcgaggacagcgccgtgtactattgcgtgcgggccaactgggatgtggccttcgcctattggggccagggcacactggtgtccgtgtcctctacgcgtgcctctacaaagggaccctccgtgtttcctctggctcccagcagcaagtctacaagcggaggaacagccgctctgggctgcctggtcaaggattactttcccgagcctgtgaccgtgtcctggaatagcggagcactgacaagcggcgtgcacacctttccagccgtgctgcaaagcagcggcctgtactctctgagcagcgtggtcacagtgcctagctctagcctgggcacccagacctacatctgcaatgtgaaccacaagcctagcaacaccaaggtggacaagagagtggaacccaagagctgtgaagtgaaaaccgactccaccgaccacgtgaagcccaaagagacagagaacaccaagcagcccagcaagagctgccacaagcccaaggccatcgtgcacaccgagaaagtgaacatgatgagcctgaccgtgctgggcctgcggatgctgttcgccaaaaccgtggccgtgaacttcctgctgaccgccaagctgttcttcctc

SEQ ID NO: 2913 - DNA, 2340 bp, Artificial Sequence
  Synthetic Polynucloetide
atggccttaccagtgaccgccttgctcctgccgctggccttgctgctccacgccgccaggccggaagtgcagctggttgaatctggcggaggactggttcagcctggcggatctctgagactgtcttgtgccgccagcggcttcagcttcagcgacttttggatgagctgggtccgacaggcccctggcaaaggacttgaatgggtcgccacaatcagccaggccggcagcgagaaggactacgtggactctgtgaagggcagattcaccatcagccgggacaacgccaagaagtccctgtacctccagatgaacagcctgagagccgaggacaccgccgtgtactattgtgcctctggcgtgtacagcttcgactacagaggccagggcaccctggtcacagtctcttctggtaccggcggaggcggatctggcggcggaggtagcggtggcggaggatctgaattcgacatccagatgacccagagccctgccagcctgtctgcctctgtgggcgagacagtgaccatcacctgtcgggtgtccggcaacatccacaactacctggcctggtatcagcagaagcagggcaagagcccccaactgctggtgtacaacgccaagaccctggccgatggcgtgcccagcagattttctggctctggcagcggcacccagtacagcctgaagatcaacagcctccagcccgaggacttcggcagctactactgccagcacttctggtccaacccctacaccttcggcggaggcaccaagctggaaatcaagctcgagggacagcctaaggccaatcctaccgtgacactgttccctccaagcagcgaagaactccaggccaacaaggccacacttgtgtgcctgatctccgacttctaccctggggctgtgacagtggcttggaaggccgatggatctcctgtgaaagccggcgtggaaaccaccaagccatccaagcagagcaacaacaaatacgccgccagctcctacctgagcctgacacctgagcagtggaagtcccacagatcctacagctgccaagtgacccacgaaggcagcaccgtggaaaagacagtggcccctacagagtgcagccccatcaagaccgatgtgattacaatggaccccaaggacaactgctccaaggacgccaacgataccctgctgctccagctgaccaacaccagcgcctactacatgtacttgttgctgctgctgaagtccgtggtgtacttcgccatcatcacatgctgcctgctgcggagaaccgccttctgctgcaacggcgagaagtctagggccaagcgatctggatctggagcaacaaacttctcactactcaaacaagcaggtgacgtggaggagaatcccgggcctactagtatggactggatttggcgcatccttttccttgtcggcgctgctaccggcgcgcattccttcgaacaggtgcaactccagcagtctggcgcttccgtgaaggtgtcctgcaaggccagcgaactcgtgcggcctggcacaggctacgccttcaccaattacctgatcgagtgggtcaagcagaggcccggacagggcctggaatggatcggagtgattaacccaggcagcggcggcaccaactacaacgagaagttcaagggcaaggccaccctgaccgccgacaagagcagcagcacagcctacatgcaactgagcagcctgaccagcgacgacagcgccgtgtacttctgcgcccggtacagaagctacgactggtacttcgacgtgtggggagccggcaccaccgtgacagtgtcatctacgcgtgcctctacaaagggaccctccgtgtttcctctggctcccagcagcaagtctacaagcggaggaacagccgctctgggctgcctggtcaaggattactttcccgagcctgtgaccgtgtcctggaatagcggagcactgacaagcggcgtgcacacctttccagccgtgctgcaaagcagcggcctgtactctctgagcagcgtggtcacagtgcctagctctagcctgggcacccagacctacatctgcaatgtgaaccacaagcctagcaacaccaaggtggacaagagagtggaacccaagagctgtgaagtgaaaaccgactccaccgaccacgtgaagcccaaagagacagagaacaccaagcagcccagcaagagctgccacaagcccaaggccatcgtgcacaccgagaaagtgaacatgatgagcctgaccgtgctgggcctgcggatgctgttcgccaaaaccgtggccgtgaacttcctgctgaccgccaagctgttcttcctc

SEQ ID NO: 2914 - DNA, 2337 bp, Artificial Sequence
  Synthetic Polynucloetide
atggccttaccagtgaccgccttgctcctgccgctggccttgctgctccacgccgccaggccggaagtgcagctggttgaatctggcggaggactggttcagcctggcggatctctgagactgtcttgtgccgccagcggcttcagcttcagcgacttttggatgagctgggtccgacaggcccctggcaaaggacttgaatgggtcgccacaatcagccaggccggcagcgagaaggactacgtggactctgtgaagggcagattcaccatcagccgggacaacgccaagaagtccctgtacctccagatgaacagcctgagagccgaggacaccgccgtgtactattgtgcctctggcgtgtacagcttcgactacagaggccagggcaccctggtcacagtctcttctggtaccggcggaggcggatctggcggcggaggtagcggtggcggaggatctgaattcgacatccagatgacccagagcttcagcagcctgagcgccagcgtgggcgacagagtgaccatcacctgtagagccagccaggacatcagcaactacctgaactggtatcagcagaagcccggcaaggcccccaagctgctgatctactacaccagcagactgcacagcggcgtgcccagcagattttctggcagcggctccggcaccgactacaccctgacaatcagctccctgcagcccgaggacttcgctacctacttctgtcagcaaggcaacaccctgccctggacctttggcggaggcaccaagctggaaatcaagagactcgagggacagcctaaggccaatcctaccgtgacactgttccctccaagcagcgaagaactccaggccaacaaggccacacttgtgtgcctgatctccgacttctaccctggggctgtgacagtggcttggaaggccgatggatctcctgtgaaagccggcgtggaaaccaccaagccatccaagcagagcaacaacaaatacgccgccagctcctacctgagcctgacacctgagcagtggaagtcccacagatcctacagctgccaagtgacccacgaaggcagcaccgtggaaaagacagtggcccctacagagtgcagccccatcaagaccgatgtgattacaatggaccccaaggacaactgctccaaggacgccaacgataccctgctgctccagctgaccaacaccagcgcctactacatgtacttgttgctgctgctgaagtccgtggtgtacttcgccatcatcacatgctgcctgctgcggagaaccgccttctgctgcaacggcgagaagtctagggccaagcgatctggatctggagcaacaaacttctcactactcaaacaagcaggtgacgtggaggagaatcccgggcctactagtatggactggatttggcgcatccttttccttgtcggcgctgctaccggcgcgcattccttcgaagaagtgcaactggtgcagtccggcggagggctggtgcagagcggaggatctctgagactgagctgcagagccagcggctacaccttcacccggtactggatgctgtgggtgcgccagaggccaggcaagggactggaatgggtggccgagatcaacccccggaacgaccggaccaactacaacgagaagttcaagacccggttcaccatcagcgtggacagaagcaagaacaccctgtacctgcagatggacagcctgcgggccgaggataccgccgtgtacttttgtgctctgggaggcggctacgctatggactactggggccagggaacccttgtgaccgtgtcctctacgcgtgcctctacaaagggaccctccgtgtttcctctggctcccagcagcaagtctacaagcggaggaacagccgctctgggctgcctggtcaaggattactttcccgagcctgtgaccgtgtcctggaatagcggagcactgacaagcggcgtgcacacctttccagccgtgctgcaaagcagcggcctgtactctctgagcagcgtggtcacagtgcctagctctagcctgggcacccagacctacatctgcaatgtgaaccacaagcctagcaacaccaaggtggacaagagagtggaacccaagagctgtgaagtgaaaaccgactccaccgaccacgtgaagcccaaagagacagagaacaccaagcagcccagcaagagctgccacaagcccaaggccatcgtgcacaccgagaaagtgaacatgatgagcctgaccgtgctgggcctgcggatgctgttcgccaaaaccgtggccgtgaacttcctgctgaccgccaagctgttcttcctc

SEQ ID NO: 2915 - DNA, 2340 bp, Artificial Sequence
  Synthetic Polynucloetide
atggccttaccagtgaccgccttgctcctgccgctggccttgctgctccacgccgccaggccggaagtgcagctggttgaatctggcggaggactggttcagcctggcggatctctgagactgtcttgtgccgccagcggcttcagcttcagcgacttttggatgagctgggtccgacaggcccctggcaaaggacttgaatgggtcgccacaatcagccaggccggcagcgagaaggactacgtggactctgtgaagggcagattcaccatcagccgggacaacgccaagaagtccctgtacctccagatgaacagcctgagagccgaggacaccgccgtgtactattgtgcctctggcgtgtacagcttcgactacagaggccagggcaccctggtcacagtctcttctggtaccggcggaggcggatctggcggcggaggtagcggtggcggaggatctgaattcgacatccagatgacacagtctccggcgtcactgtccgcctccgtgggggagactgtgactattatttgtagggcatcagttaacatctactcttatttggcctggtaccagcagaagcaaggcaagagtcctcagctgctggtgtataatgcgaagatcctggcagagggcgtgccgagccggttctccggcagcggctcaggtacccaattttccctcaagatcaattcactgcagccagaggactttggcagttactattgtcaacaccactacggcacattcactttcgggtccggtacaaaattggagattaagcgactcgagggacagcctaaggccaatcctaccgtgacactgttccctccaagcagcgaagaactccaggccaacaaggccacacttgtgtgcctgatctccgacttctaccctggggctgtgacagtggcttggaaggccgatggatctcctgtgaaagccggcgtggaaaccaccaagccatccaagcagagcaacaacaaatacgccgccagctcctacctgagcctgacacctgagcagtggaagtcccacagatcctacagctgccaagtgacccacgaaggcagcaccgtggaaaagacagtggcccctacagagtgcagccccatcaagaccgatgtgattacaatggaccccaaggacaactgctccaaggacgccaacgataccctgctgctccagctgaccaacaccagcgcctactacatgtacttgttgctgctgctgaagtccgtggtgtacttcgccatcatcacatgctgcctgctgcggagaaccgccttctgctgcaacggcgagaagtctagggccaagcgatctggatctggagcaacaaacttctcactactcaaacaagcaggtgacgtggaggagaatcccgggcctactagtatggactggatttggcgcatccttttccttgtcggcgctgctaccggcgcgcattccttcgaacaggtacagttgaaagaaagcgggcctggactggtagcgccttcccaatctctctccatcacgtgcaccatctctggcttctccctgacttcctatggagttcactgggtgaggcagccccccggcaagggactggaatggctggtcgtcatctggtccgacgggtccacaacctacaactccgctctgaaaagtcggctctctatttctaaagataatagcaagagccaggtgtttctgaaaatgaactctctgcagaccgatgatacggccatttactactgcgcttcacactatggctcaaccttggcattcgcttcctggggccacggaacactggtgaccgtttccgcagccacgcgtgcctctacaaagggaccctccgtgtttcctctggctcccagcagcaagtctacaagcggaggaacagccgctctgggctgcctggtcaaggattactttcccgagcctgtgaccgtgtcctggaatagcggagcactgacaagcggcgtgcacacctttccagccgtgctgcaaagcagcggcctgtactctctgagcagcgtggtcacagtgcctagctctagcctgggcacccagacctacatctgcaatgtgaaccacaagcctagcaacaccaaggtggacaagagagtggaacccaagagctgtgaagtgaaaaccgactccaccgaccacgtgaagcccaaagagacagagaacaccaagcagcccagcaagagctgccacaagcccaaggccatcgtgcacaccgagaaagtgaacatgatgagcctgaccgtgctgggcctgcggatgctgttcgccaaaaccgtggccgtgaacttcctgctgaccgccaagctgttcttcctc

SEQ ID NO: 2916 - DNA, 2364 bp, Artificial Sequence
  Synthetic Polynucloetide
atggccttaccagtgaccgccttgctcctgccgctggccttgctgctccacgccgccaggccggaagtgcagctggttgaatctggcggaggactggttcagcctggcggatctctgagactgtcttgtgccgccagcggcttcagcttcagcgacttttggatgagctgggtccgacaggcccctggcaaaggacttgaatgggtcgccacaatcagccaggccggcagcgagaaggactacgtggactctgtgaagggcagattcaccatcagccgggacaacgccaagaagtccctgtacctccagatgaacagcctgagagccgaggacaccgccgtgtactattgtgcctctggcgtgtacagcttcgactacagaggccagggcaccctggtcacagtctcttctggtaccggcggaggcggatctggcggcggaggtagcggtggcggaggatctgaattcgacattgtgatgacccagtctcacaaattcatgtccacatcagtaggagacagggtcagcgtcacctgcaaggccagtcagaatgtgggtaataatgtagcctggtatcaacagaaaccagggcaatctcctaaagtactgatttactcggcatcctaccggtacagtggagtccctgatcgcttcacaggcagtggatctgggacagatttcactctcaccatcagtaatgtgcagtctgaagacttggcagagtatttctgtcagcaatataacacctatccattcacgttcggctcggggacaaagttggaaataaaactcgagggacagcctaaggccaatcctaccgtgacactgttccctccaagcagcgaagaactccaggccaacaaggccacacttgtgtgcctgatctccgacttctaccctggggctgtgacagtggcttggaaggccgatggatctcctgtgaaagccggcgtggaaaccaccaagccatccaagcagagcaacaacaaatacgccgccagctcctacctgagcctgacacctgagcagtggaagtcccacagatcctacagctgccaagtgacccacgaaggcagcaccgtggaaaagacagtggcccctacagagtgcagccccatcaagaccgatgtgattacaatggaccccaaggacaactgctccaaggacgccaacgataccctgctgctccagctgaccaacaccagcgcctactacatgtacttgttgctgctgctgaagtccgtggtgtacttcgccatcatcacatgctgcctgctgcggagaaccgccttctgctgcaacggcgagaagtctagggccaagcgatctggatctggagcaacaaacttctcactactcaaacaagcaggtgacgtggaggagaatcccgggcctactagtatggactggatttggcgcatccttttccttgtcggcgctgctaccggcgcgcattccttcgaagaggtacagctggaggaaagcggtggaggactggtgcaacctggagggtctatgaagctctcttgcgtagcttctgggttcacgttctccaattactggatgaactgggtgcggcagtcccccgagaaaggcctggaatgggtagcagaaattcggttcaagtcccataactatgctacacactttgccgagtctgtcaaaggccggttcactattagtcgagacgacagcaagtcttcagtctacctgcagatgaataacttgcgggcagaggacacaggtatctactactgcaccaggagaatcggcaactccgactatgactggtggtactttgacgtctggggagcaggcaccagcgtgacggtgagttcagcctcaacgcgtgcctctacaaagggaccctccgtgtttcctctggctcccagcagcaagtctacaagcggaggaacagccgctctgggctgcctggtcaaggattactttcccgagcctgtgaccgtgtcctggaatagcggagcactgacaagcggcgtgcacacctttccagccgtgctgcaaagcagcggcctgtactctctgagcagcgtggtcacagtgcctagctctagcctgggcacccagacctacatctgcaatgtgaaccacaagcctagcaacaccaaggtggacaagagagtggaacccaagagctgtgaagtgaaaaccgactccaccgaccacgtgaagcccaaagagacagagaacaccaagcagcccagcaagagctgccacaagcccaaggccatcgtgcacaccgagaaagtgaacatgatgagcctgaccgtgctgggcctgcggatgctgttcgccaaaaccgtggccgtgaacttcctgctgaccgccaagctgttcttcctc

SEQ ID NO: 2917 - DNA, 2343 bp, Artificial Sequence
  Synthetic Polynucloetide
atggccttaccagtgaccgccttgctcctgccgctggccttgctgctccacgccgccaggccggaagtgcagctggttgaatctggcggaggactggttcagcctggcggatctctgagactgtcttgtgccgccagcggcttcagcttcagcgacttttggatgagctgggtccgacaggcccctggcaaaggacttgaatgggtcgccacaatcagccaggccggcagcgagaaggactacgtggactctgtgaagggcagattcaccatcagccgggacaacgccaagaagtccctgtacctccagatgaacagcctgagagccgaggacaccgccgtgtactattgtgcctctggcgtgtacagcttcgactacagaggccagggcaccctggtcacagtctcttctggtaccggcggaggcggatctggcggcggaggtagcggtggcggaggatctgaattcgaccagatcgtgctgacccagtcccccgctattatgtccgcatcaccgggcgaaaaagtgacgatctcctgtagcgcttcatctagcgtctcctacatgtattggtatcaacagaaacctgggtctagcccaaagccgtggatctacagaaccagtaaccttgccagtggggtgccagcccgcttcagcggtagtggcagtggaacttcctatagcctcacaataagcaacatggaggctgaagatgccgctgcctattactgccagcagtaccacagttacccaaccacgttcggcgggggaactaagctcgaagtaaaactcgagggacagcctaaggccaatcctaccgtgacactgttccctccaagcagcgaagaactccaggccaacaaggccacacttgtgtgcctgatctccgacttctaccctggggctgtgacagtggcttggaaggccgatggatctcctgtgaaagccggcgtggaaaccaccaagccatccaagcagagcaacaacaaatacgccgccagctcctacctgagcctgacacctgagcagtggaagtcccacagatcctacagctgccaagtgacccacgaaggcagcaccgtggaaaagacagtggcccctacagagtgcagccccatcaagaccgatgtgattacaatggaccccaaggacaactgctccaaggacgccaacgataccctgctgctccagctgaccaacaccagcgcctactacatgtacttgttgctgctgctgaagtccgtggtgtacttcgccatcatcacatgctgcctgctgcggagaaccgccttctgctgcaacggcgagaagtctagggccaagcgatctggatctggagcaacaaacttctcactactcaaacaagcaggtgacgtggaggagaatcccgggcctactagtatggactggatttggcgcatccttttccttgtcggcgctgctaccggcgcgcattccttcgaagaggtgcagctggtggaatctgggggcggcctggtccaacctaagggatcactcaagctctcttgtgcggccagcggattctctttcaatacctatgctatgaattgggtgagacaggcgcccggaaagggcctcgaatggatagcccatatccggtcaaaatcaaacaatttcgcaacctactatgcggactccgtgaaggaccgattttccatctcccgagatgcctccgagaatattctgttcctgcagatgaataacctcaagacagaggacaccgccatgtactactgtgtgcgccagggcggtgactttcccatggattactgggggcaggggaccagcgtgaccgtgagctctacgcgtgcctctacaaagggaccctccgtgtttcctctggctcccagcagcaagtctacaagcggaggaacagccgctctgggctgcctggtcaaggattactttcccgagcctgtgaccgtgtcctggaatagcggagcactgacaagcggcgtgcacacctttccagccgtgctgcaaagcagcggcctgtactctctgagcagcgtggtcacagtgcctagctctagcctgggcacccagacctacatctgcaatgtgaaccacaagcctagcaacaccaaggtggacaagagagtggaacccaagagctgtgaagtgaaaaccgactccaccgaccacgtgaagcccaaagagacagagaacaccaagcagcccagcaagagctgccacaagcccaaggccatcgtgcacaccgagaaagtgaacatgatgagcctgaccgtgctgggcctgcggatgctgttcgccaaaaccgtggccgtgaacttcctgctgaccgccaagctgttcttcctc

SEQ ID NO: 2918 - DNA, 2340 bp, Artificial Sequence
  Synthetic Polynucloetide
atggccttaccagtgaccgccttgctcctgccgctggccttgctgctccacgccgccaggccggaagtgcagctggttgaatctggcggaggactggttcagcctggcggatctctgagactgtcttgtgccgccagcggcttcagcttcagcgacttttggatgagctgggtccgacaggcccctggcaaaggacttgaatgggtcgccacaatcagccaggccggcagcgagaaggactacgtggactctgtgaagggcagattcaccatcagccgggacaacgccaagaagtccctgtacctccagatgaacagcctgagagccgaggacaccgccgtgtactattgtgcctctggcgtgtacagcttcgactacagaggccagggcaccctggtcacagtctcttctggtaccggcggaggcggatctggcggcggaggtagcggtggcggaggatctgaattcgacgacatccagatgacccagagcagcagcagcttcagcgtgagcctgggcgacagagtgaccatcacctgcatggccagcgaggacatctacatcagactggcctggtaccagcagaagcccggcaacgcccccagactgctgatcagcgccgccaccagcctggagaccggcgtgcccagcagattcagcggcagcggcagcggcaaggactacaccctgagcatcaccagcctgcagaccgaggacgtgggcacctactactgccagcagtactggagcagcccctggaccttcggcggcggcaccaagctggagatcaacctcgagggacagcctaaggccaatcctaccgtgacactgttccctccaagcagcgaagaactccaggccaacaaggccacacttgtgtgcctgatctccgacttctaccctggggctgtgacagtggcttggaaggccgatggatctcctgtgaaagccggcgtggaaaccaccaagccatccaagcagagcaacaacaaatacgccgccagctcctacctgagcctgacacctgagcagtggaagtcccacagatcctacagctgccaagtgacccacgaaggcagcaccgtggaaaagacagtggcccctacagagtgcagccccatcaagaccgatgtgattacaatggaccccaaggacaactgctccaaggacgccaacgataccctgctgctccagctgaccaacaccagcgcctactacatgtacttgttgctgctgctgaagtccgtggtgtacttcgccatcatcacatgctgcctgctgcggagaaccgccttctgctgcaacggcgagaagtctagggccaagcgatctggatctggagcaacaaacttctcactactcaaacaagcaggtgacgtggaggagaatcccgggcctactagtatggactggatttggcgcatccttttccttgtcggcgctgctaccggcgcgcattccttcgaagacgtgcagctgcaggagagcggccccggcctggtgaagcccagccagagcctgagcctgacctgcaccgtgaccggctacagcatcaccagcgactacacctggaactggatcagacagttccccggcaacaagctggagtggatgggctacatcacctacagcggcagcaccagctacaaccccagcctgaagagcagaaacagcatcaccagagacaccagcaagaaccagttcttcctgcagctgaacagcgtgaccaccgaggacaccgccacctactactgcgccagactgggcagaagatacacaatggactactggggccagggcaccagcgtgaccgtgagcagcacgcgtgcctctacaaagggaccctccgtgtttcctctggctcccagcagcaagtctacaagcggaggaacagccgctctgggctgcctggtcaaggattactttcccgagcctgtgaccgtgtcctggaatagcggagcactgacaagcggcgtgcacacctttccagccgtgctgcaaagcagcggcctgtactctctgagcagcgtggtcacagtgcctagctctagcctgggcacccagacctacatctgcaatgtgaaccacaagcctagcaacaccaaggtggacaagagagtggaacccaagagctgtgaagtgaaaaccgactccaccgaccacgtgaagcccaaagagacagagaacaccaagcagcccagcaagagctgccacaagcccaaggccatcgtgcacaccgagaaagtgaacatgatgagcctgaccgtgctgggcctgcggatgctgttcgccaaaaccgtggccgtgaacttcctgctgaccgccaagctgttcttcctc

SEQ ID NO: 2919 - DNA, 2349 bp, Artificial Sequence
  Synthetic Polynucloetide
atggccttaccagtgaccgccttgctcctgccgctggccttgctgctccacgccgccaggccggaagtgcagctggttgaatctggcggaggactggttcagcctggcggatctctgagactgtcttgtgccgccagcggcttcagcttcagcgacttttggatgagctgggtccgacaggcccctggcaaaggacttgaatgggtcgccacaatcagccaggccggcagcgagaaggactacgtggactctgtgaagggcagattcaccatcagccgggacaacgccaagaagtccctgtacctccagatgaacagcctgagagccgaggacaccgccgtgtactattgtgcctctggcgtgtacagcttcgactacagaggccagggcaccctggtcacagtctcttctggtaccggcggaggcggatctggcggcggaggtagcggtggcggaggatctgaattcgacgacatccagatgacccagagccccagcagcctgtctgccagcgtgggcgacagagtgaccatcacctgtagagccagccagagcatcagcagctacctgaactggtatcagcagaagcccggcaaggcccccaaactgctgatctacgacgccagcaacctggaaaccggcgtgcccagcagattttccggcagcggctctggcaccgacttcaccttcaccatcagctccctccagcccgaggacattgccacctactactgccagcagtacgacaacctgcccctgacctttggcggaggcaccaaggtggacatcaagagactcgagggacagcctaaggccaatcctaccgtgacactgttccctccaagcagcgaagaactccaggccaacaaggccacacttgtgtgcctgatctccgacttctaccctggggctgtgacagtggcttggaaggccgatggatctcctgtgaaagccggcgtggaaaccaccaagccatccaagcagagcaacaacaaatacgccgccagctcctacctgagcctgacacctgagcagtggaagtcccacagatcctacagctgccaagtgacccacgaaggcagcaccgtggaaaagacagtggcccctacagagtgcagccccatcaagaccgatgtgattacaatggaccccaaggacaactgctccaaggacgccaacgataccctgctgctccagctgaccaacaccagcgcctactacatgtacttgttgctgctgctgaagtccgtggtgtacttcgccatcatcacatgctgcctgctgcggagaaccgccttctgctgcaacggcgagaagtctagggccaagcgatctggatctggagcaacaaacttctcactactcaaacaagcaggtgacgtggaggagaatcccgggcctactagtatggactggatttggcgcatccttttccttgtcggcgctgctaccggcgcgcattccttcgaacaggtgcaactggtggaatctggcggcggagtggtgcagcctggcagaagcctgagactgagctgtgccgccagcggcttcacctttagcagctacgccatgcactgggtgcgccaggcccctggaaaaggcctggaatgggtggccgtgatctcctacgacggctccaacaagtattacgccgacagcgtgaagggccggttcaccatctccagagacaacagcaagaacaccctgtacctccagatgaacagcctgcgggccgaggacaccgccgtgtactattgtgccagggctcacaacagcagctcttggagcttcgactactggggccagggcaccctcgtgaccgtgtcatctacgcgtgcctctacaaagggaccctccgtgtttcctctggctcccagcagcaagtctacaagcggaggaacagccgctctgggctgcctggtcaaggattactttcccgagcctgtgaccgtgtcctggaatagcggagcactgacaagcggcgtgcacacctttccagccgtgctgcaaagcagcggcctgtactctctgagcagcgtggtcacagtgcctagctctagcctgggcacccagacctacatctgcaatgtgaaccacaagcctagcaacaccaaggtggacaagagagtggaacccaagagctgtgaagtgaaaaccgactccaccgaccacgtgaagcccaaagagacagagaacaccaagcagcccagcaagagctgccacaagcccaaggccatcgtgcacaccgagaaagtgaacatgatgagcctgaccgtgctgggcctgcggatgctgttcgccaaaaccgtggccgtgaacttcctgctgaccgccaagctgttcttcctc

SEQ ID NO: 2920 - DNA, 2376 bp, Artificial Sequence
  Synthetic Polynucloetide
atggccttaccagtgaccgccttgctcctgccgctggccttgctgctccacgccgccaggccggaagtgcagctggttgaatctggcggaggactggttcagcctggcggatctctgagactgtcttgtgccgccagcggcttcagcttcagcgacttttggatgagctgggtccgacaggcccctggcaaaggacttgaatgggtcgccacaatcagccaggccggcagcgagaaggactacgtggactctgtgaagggcagattcaccatcagccgggacaacgccaagaagtccctgtacctccagatgaacagcctgagagccgaggacaccgccgtgtactattgtgcctctggcgtgtacagcttcgactacagaggccagggcaccctggtcacagtctcttctggtaccggcggaggcggatctggcggcggaggtagcggtggcggaggatctgaattcgacgacgtcgtgatgacccagagccctctgagcctgcctgtgtccctgggcgatcaggccagcatctcctgcagatccagccagagactggtgcacagcaacggcaacacctacctgcactggtatctgcagaagcccggccagagccccaagctgctgatctaccgggtgtccaacagattccccggcgtgcccgatagattcagcggctctggcagcggcaccgacttcaccctgaagatcagccgggtggaagccgaggacctgggcatctatttctgcagccagagcacccacgtgccctacacctttggcggaggcaccaagctggaaatcaagcggctcgagggacagcctaaggccaatcctaccgtgacactgttccctccaagcagcgaagaactccaggccaacaaggccacacttgtgtgcctgatctccgacttctaccctggggctgtgacagtggcttggaaggccgatggatctcctgtgaaagccggcgtggaaaccaccaagccatccaagcagagcaacaacaaatacgccgccagctcctacctgagcctgacacctgagcagtggaagtcccacagatcctacagctgccaagtgacccacgaaggcagcaccgtggaaaagacagtggcccctacagagtgcagccccatcaagaccgatgtgattacaatggaccccaaggacaactgctccaaggacgccaacgataccctgctgctccagctgaccaacaccagcgcctactacatgtacttgttgctgctgctgaagtccgtggtgtacttcgccatcatcacatgctgcctgctgcggagaaccgccttctgctgcaacggcgagaagtctagggccaagcgatctggatctggagcaacaaacttctcactactcaaacaagcaggtgacgtggaggagaatcccgggcctactagtatggactggatttggcgcatccttttccttgtcggcgctgctaccggcgcgcattccttcgaagaagtgcggctgcagcagtctggccccgacctgattaagcctggggccagcgtgaagatgagctgcaaggccagcggctacaccttcaccggctacgtgatgcactgggtcaagcagaggccaggccagggcctggaatggatcggcttcatcaacccctacaacgacgacatccagagcaacgagcggttccggggcaaggccaccctgaccagcgataagagcagcaccaccgcctacatggaactgagcagcctgacctccgaggacagcgccgtgtactactgtgctaggggagccggctacaacttcgacggggcctacagattcttcgacttttggggccagggcaccacactgaccgtgtcctctacgcgtgcctctacaaagggaccctccgtgtttcctctggctcccagcagcaagtctacaagcggaggaacagccgctctgggctgcctggtcaaggattactttcccgagcctgtgaccgtgtcctggaatagcggagcactgacaagcggcgtgcacacctttccagccgtgctgcaaagcagcggcctgtactctctgagcagcgtggtcacagtgcctagctctagcctgggcacccagacctacatctgcaatgtgaaccacaagcctagcaacaccaaggtggacaagagagtggaacccaagagctgtgaagtgaaaaccgactccaccgaccacgtgaagcccaaagagacagagaacaccaagcagcccagcaagagctgccacaagcccaaggccatcgtgcacaccgagaaagtgaacatgatgagcctgaccgtgctgggcctgcggatgctgttcgccaaaaccgtggccgtgaacttcctgctgaccgccaagctgttcttcctc

SEQ ID NO: 2921 - DNA, 2349 bp, Artificial Sequence
  Synthetic Polynucloetide
atggccttaccagtgaccgccttgctcctgccgctggccttgctgctccacgccgccaggccggaagtgcagctggttgaatctggcggaggactggttcagcctggcggatctctgagactgtcttgtgccgccagcggcttcagcttcagcgacttttggatgagctgggtccgacaggcccctggcaaaggacttgaatgggtcgccacaatcagccaggccggcagcgagaaggactacgtggactctgtgaagggcagattcaccatcagccgggacaacgccaagaagtccctgtacctccagatgaacagcctgagagccgaggacaccgccgtgtactattgtgcctctggcgtgtacagcttcgactacagaggccagggcaccctggtcacagtctcttctggtaccggcggaggcggatctggcggcggaggtagcggtggcggaggatctgaattcgacagctacgagctgacccagcctcctagcgtgtccgtgtctcctggacagaccgccaccatctcttgcagcggcgatcaactgggcgggaagtacggccactggtatcagaagaagcccggccagagccccgtgctggtgctgtaccaggacagaaaacggcctgccggcatccccgagagattcagcggaagcagcagcggcaacaccatcaccctgaccatcagcggcacccaggccgtggatgaggccgactactactgccaggcttgggacaccaatctgggcggcgtgttcggcggaggcaccaaagtgacagtgctgggacagctcgagggacagcctaaggccaatcctaccgtgacactgttccctccaagcagcgaagaactccaggccaacaaggccacacttgtgtgcctgatctccgacttctaccctggggctgtgacagtggcttggaaggccgatggatctcctgtgaaagccggcgtggaaaccaccaagccatccaagcagagcaacaacaaatacgccgccagctcctacctgagcctgacacctgagcagtggaagtcccacagatcctacagctgccaagtgacccacgaaggcagcaccgtggaaaagacagtggcccctacagagtgcagccccatcaagaccgatgtgattacaatggaccccaaggacaactgctccaaggacgccaacgataccctgctgctccagctgaccaacaccagcgcctactacatgtacttgttgctgctgctgaagtccgtggtgtacttcgccatcatcacatgctgcctgctgcggagaaccgccttctgctgcaacggcgagaagtctagggccaagcgatctggatctggagcaacaaacttctcactactcaaacaagcaggtgacgtggaggagaatcccgggcctactagtatggactggatttggcgcatccttttccttgtcggcgctgctaccggcgcgcattccttcgaacaggtgcaactggtggaaagcggagccgaagtgaagaaacctggggccagcgtgaaggtgtcctgcaaggccagcggctacacctttaccggctactacatgcactgggtgcgccaggctccaggccagggactggaatggatgggccggatcaaccccaatagcggcggcaccaactacgcccagaaattccagggcagagtgaccatgaccagagacaccagcatcagcaccgcctacatggaactgagccggctgagaagcgacgacaccgccgtgtactactgcgccagccctagaggcagaggcagcgccttcgatatttggggccagggcacactcgtgaccgtgtcctctacgcgtgcctctacaaagggaccctccgtgtttcctctggctcccagcagcaagtctacaagcggaggaacagccgctctgggctgcctggtcaaggattactttcccgagcctgtgaccgtgtcctggaatagcggagcactgacaagcggcgtgcacacctttccagccgtgctgcaaagcagcggcctgtactctctgagcagcgtggtcacagtgcctagctctagcctgggcacccagacctacatctgcaatgtgaaccacaagcctagcaacaccaaggtggacaagagagtggaacccaagagctgtgaagtgaaaaccgactccaccgaccacgtgaagcccaaagagacagagaacaccaagcagcccagcaagagctgccacaagcccaaggccatcgtgcacaccgagaaagtgaacatgatgagcctgaccgtgctgggcctgcggatgctgttcgccaaaaccgtggccgtgaacttcctgctgaccgccaagctgttcttcctc

SEQ ID NO: 2922 - DNA, 2358 bp, Artificial Sequence
  Synthetic Polynucloetide
atggccttaccagtgaccgccttgctcctgccgctggccttgctgctccacgccgccaggccggaagtgcagctggttgaatctggcggaggactggttcagcctggcggatctctgagactgtcttgtgccgccagcggcttcagcttcagcgacttttggatgagctgggtccgacaggcccctggcaaaggacttgaatgggtcgccacaatcagccaggccggcagcgagaaggactacgtggactctgtgaagggcagattcaccatcagccgggacaacgccaagaagtccctgtacctccagatgaacagcctgagagccgaggacaccgccgtgtactattgtgcctctggcgtgtacagcttcgactacagaggccagggcaccctggtcacagtctcttctggtaccggcggaggcggatctggcggcggaggtagcggtggcggaggatctgaattcgacaacttcatgctgacccagccccacagcgtgtccgagagccctggcaagaccgtgaccatctcctgcaccagaagcagcggctctatcgccagcaaatacgtgcagtggtatcagcagaggcccggcagcagccctaccaccgtgatctacgaggacaaccagaggcctagcggcgtgcccgatagattcagcggcagcatcgacaccagcagcaacagcgccagcctgaccatcagcggcctgagaacagaggacgaggccgactactactgccacagctacgacagcaacaaccactccgtgttcggcggaggcaccaaagtgacagtgctgggacagctcgagggacagcctaaggccaatcctaccgtgacactgttccctccaagcagcgaagaactccaggccaacaaggccacacttgtgtgcctgatctccgacttctaccctggggctgtgacagtggcttggaaggccgatggatctcctgtgaaagccggcgtggaaaccaccaagccatccaagcagagcaacaacaaatacgccgccagctcctacctgagcctgacacctgagcagtggaagtcccacagatcctacagctgccaagtgacccacgaaggcagcaccgtggaaaagacagtggcccctacagagtgcagccccatcaagaccgatgtgattacaatggaccccaaggacaactgctccaaggacgccaacgataccctgctgctccagctgaccaacaccagcgcctactacatgtacttgttgctgctgctgaagtccgtggtgtacttcgccatcatcacatgctgcctgctgcggagaaccgccttctgctgcaacggcgagaagtctagggccaagcgatctggatctggagcaacaaacttctcactactcaaacaagcaggtgacgtggaggagaatcccgggcctactagtatggactggatttggcgcatccttttccttgtcggcgctgctaccggcgcgcattccttcgaagaagtgcaactggtggaaagcgggggaggcgtggtgcagccaggcggatctctgagactgagctgtgccgccagcggcttcaccttcagcagctacgccatgagctgggtgcgccaggcccctggaaaaggcctggaatgggtgtccgccatctctggctctggcggcagcacctactacgccgatagcgtgaagggccggttcagcatcagccgggacaacagcaagaacaccctgtacctccagatgaacagcctgcgggccgaggacaccgccgtgtactactgtgccagaaccagaagctccggggccttcgacatctggggccagggaacactcgtgaccgtgtcctctacgcgtgcctctacaaagggaccctccgtgtttcctctggctcccagcagcaagtctacaagcggaggaacagccgctctgggctgcctggtcaaggattactttcccgagcctgtgaccgtgtcctggaatagcggagcactgacaagcggcgtgcacacctttccagccgtgctgcaaagcagcggcctgtactctctgagcagcgtggtcacagtgcctagctctagcctgggcacccagacctacatctgcaatgtgaaccacaagcctagcaacaccaaggtggacaagagagtggaacccaagagctgtgaagtgaaaaccgactccaccgaccacgtgaagcccaaagagacagagaacaccaagcagcccagcaagagctgccacaagcccaaggccatcgtgcacaccgagaaagtgaacatgatgagcctgaccgtgctgggcctgcggatgctgttcgccaaaaccgtggccgtgaacttcctgctgaccgccaagctgttcttcctc

SEQ ID NO: 2923 - DNA, 2343 bp, Artificial Sequence
  Synthetic Polynucloetide
atggccttaccagtgaccgccttgctcctgccgctggccttgctgctccacgccgccaggccggaagtgcagctggttgaatctggcggaggactggttcagcctggcggatctctgagactgtcttgtgccgccagcggcttcagcttcagcgacttttggatgagctgggtccgacaggcccctggcaaaggacttgaatgggtcgccacaatcagccaggccggcagcgagaaggactacgtggactctgtgaagggcagattcaccatcagccgggacaacgccaagaagtccctgtacctccagatgaacagcctgagagccgaggacaccgccgtgtactattgtgcctctggcgtgtacagcttcgactacagaggccagggcaccctggtcacagtctcttctggtaccggcggaggcggatctggcggcggaggtagcggtggcggaggatctgaattcgacatccagatgaaccagagccccagcagcctgagcgccagcctgggcgataccatcaccatcacctgtcacgccagccagaacatcaacgtgtggctgagctggtatcagcagaagcccggcaacatccccaagctgctgatctacaaggccagcaacctgcacaccggcgtgcccagcagattttctggcagcggctctggcaccggcttcaccattaccatcagctccctccagcccgaggacattgccacctactactgccagcagggccagagctacccctggacatttggcggaggcaccaagctggaaatcaagagactcgagggacagcctaaggccaatcctaccgtgacactgttccctccaagcagcgaagaactccaggccaacaaggccacacttgtgtgcctgatctccgacttctaccctggggctgtgacagtggcttggaaggccgatggatctcctgtgaaagccggcgtggaaaccaccaagccatccaagcagagcaacaacaaatacgccgccagctcctacctgagcctgacacctgagcagtggaagtcccacagatcctacagctgccaagtgacccacgaaggcagcaccgtggaaaagacagtggcccctacagagtgcagccccatcaagaccgatgtgattacaatggaccccaaggacaactgctccaaggacgccaacgataccctgctgctccagctgaccaacaccagcgcctactacatgtacttgttgctgctgctgaagtccgtggtgtacttcgccatcatcacatgctgcctgctgcggagaaccgccttctgctgcaacggcgagaagtctagggccaagcgatctggatctggagcaacaaacttctcactactcaaacaagcaggtgacgtggaggagaatcccgggcctactagtatggactggatttggcgcatccttttccttgtcggcgctgctaccggcgcgcattccttcgaagaagtgcaactccagcagagcggcccagagcttgtgaagcctggcgcttccgtgaagattagctgcaaagccagcggctacagcttcaccggctacttcatgaactgggtcaagcagagccacggcaagagcctggagtacatcggcagattcaacccctacaacggcgagacactgtacaaccagaagttcaagggcaaggccaccctgaccgtggacaagagcagcagcaccgtgcacatggaactgctgagcgtgaccagcgaggacagcgccgtgtactactgtggcagaagcggcaacgacgacgctatggactattggggccagggcaccagcgtgaccgtgtctagtgctacgcgtgcctctacaaagggaccctccgtgtttcctctggctcccagcagcaagtctacaagcggaggaacagccgctctgggctgcctggtcaaggattactttcccgagcctgtgaccgtgtcctggaatagcggagcactgacaagcggcgtgcacacctttccagccgtgctgcaaagcagcggcctgtactctctgagcagcgtggtcacagtgcctagctctagcctgggcacccagacctacatctgcaatgtgaaccacaagcctagcaacaccaaggtggacaagagagtggaacccaagagctgtgaagtgaaaaccgactccaccgaccacgtgaagcccaaagagacagagaacaccaagcagcccagcaagagctgccacaagcccaaggccatcgtgcacaccgagaaagtgaacatgatgagcctgaccgtgctgggcctgcggatgctgttcgccaaaaccgtggccgtgaacttcctgctgaccgccaagctgttcttcctc

SEQ ID NO: 2924 - DNA, 2346 bp, Artificial Sequence
  Synthetic Polynucloetide
atggccttaccagtgaccgccttgctcctgccgctggccttgctgctccacgccgccaggccggaagtgcagctggttgaatctggcggaggactggttcagcctggcggatctctgagactgtcttgtgccgccagcggcttcagcttcagcgacttttggatgagctgggtccgacaggcccctggcaaaggacttgaatgggtcgccacaatcagccaggccggcagcgagaaggactacgtggactctgtgaagggcagattcaccatcagccgggacaacgccaagaagtccctgtacctccagatgaacagcctgagagccgaggacaccgccgtgtactattgtgcctctggcgtgtacagcttcgactacagaggccagggcaccctggtcacagtctcttctggtaccggcggaggcggatctggcggcggaggtagcggtggcggaggatctgaattcgagatcgtgctgacacagagccctgccaccctgtctctgagccctggcgaaagagccaccctgagctgtagagccagccagagcgtgcggagctacctggcctggtatcagcagaagcctggacaggcccccagactgctgatctacgacgccagcaatcgggccacaggcatccccgccagattttctggctctggcagcggcaccgacttcaccctgacaatcagcagcctggaacccgaggacttcgccgtgtactactgccagcagcggagcaactggccccctacctttggacagggcaccaaggtggaaatcaagctcgagggacagcctaaggccaatcctaccgtgacactgttccctccaagcagcgaagaactccaggccaacaaggccacacttgtgtgcctgatctccgacttctaccctggggctgtgacagtggcttggaaggccgatggatctcctgtgaaagccggcgtggaaaccaccaagccatccaagcagagcaacaacaaatacgccgccagctcctacctgagcctgacacctgagcagtggaagtcccacagatcctacagctgccaagtgacccacgaaggcagcaccgtggaaaagacagtggcccctacagagtgcagccccatcaagaccgatgtgattacaatggaccccaaggacaactgctccaaggacgccaacgataccctgctgctccagctgaccaacaccagcgcctactacatgtacttgttgctgctgctgaagtccgtggtgtacttcgccatcatcacatgctgcctgctgcggagaaccgccttctgctgcaacggcgagaagtctagggccaagcgatctggatctggagcaacaaacttctcactactcaaacaagcaggtgacgtggaggagaatcccgggcctactagtatggactggatttggcgcatccttttccttgtcggcgctgctaccggcgcgcattccttcgaacaactccaggtgcaggaatctggccccggactcgtgaagcccagcgagacactgagcctgacctgtaccgtgtccggcggcagcatcagcaacagctacttctcctggggctggatcagacagccccctggcaagggcctggaatggatcggcagcttctactacggcgagaaaacctactacaaccccagcctgaagtccagagccaccatcagcatcgacaccagcaagagccagttctccctgaagctgagcagcgtgacagccgccgacaccgccgtgtattattgccccagaggccccaccatgatccggggcgtgatcgactcttggggccagggaacactcgtgaccgtgtcctctacgcgtgcctctacaaagggaccctccgtgtttcctctggctcccagcagcaagtctacaagcggaggaacagccgctctgggctgcctggtcaaggattactttcccgagcctgtgaccgtgtcctggaatagcggagcactgacaagcggcgtgcacacctttccagccgtgctgcaaagcagcggcctgtactctctgagcagcgtggtcacagtgcctagctctagcctgggcacccagacctacatctgcaatgtgaaccacaagcctagcaacaccaaggtggacaagagagtggaacccaagagctgtgaagtgaaaaccgactccaccgaccacgtgaagcccaaagagacagagaacaccaagcagcccagcaagagctgccacaagcccaaggccatcgtgcacaccgagaaagtgaacatgatgagcctgaccgtgctgggcctgcggatgctgttcgccaaaaccgtggccgtgaacttcctgctgaccgccaagctgttcttcctc

SEQ ID NO: 2925 - DNA, 2373 bp, Artificial Sequence
  Synthetic Polynucloetide
atggccttaccagtgaccgccttgctcctgccgctggccttgctgctccacgccgccaggccggaagtgcagctggttgaatctggcggaggactggttcagcctggcggatctctgagactgtcttgtgccgccagcggcttcagcttcagcgacttttggatgagctgggtccgacaggcccctggcaaaggacttgaatgggtcgccacaatcagccaggccggcagcgagaaggactacgtggactctgtgaagggcagattcaccatcagccgggacaacgccaagaagtccctgtacctccagatgaacagcctgagagccgaggacaccgccgtgtactattgtgcctctggcgtgtacagcttcgactacagaggccagggcaccctggtcacagtctcttctggtaccggcggaggcggatctggcggcggaggtagcggtggcggaggatctgaattcgacatcgtgatgacccagacccccctgagcctgcctgtgacacctggcgagcctgccagcatctcctgcagaagcagcagaagcctgctggacagcgacgacggcaacacctacctggactggtatctgcagaaacccggccagagcccccaactgctgatctacaccctgagctacagagccagcggcgtgcccgatagattttccggctctggcagcggcaccgacttcaccctgaagatcagccgggtggaagccgaggacgtgggcgtgtactactgtatgcagcgggtggaatttcccatcaccttcggccagggcaccagactggaaatcaagagactcgagggacagcctaaggccaatcctaccgtgacactgttccctccaagcagcgaagaactccaggccaacaaggccacacttgtgtgcctgatctccgacttctaccctggggctgtgacagtggcttggaaggccgatggatctcctgtgaaagccggcgtggaaaccaccaagccatccaagcagagcaacaacaaatacgccgccagctcctacctgagcctgacacctgagcagtggaagtcccacagatcctacagctgccaagtgacccacgaaggcagcaccgtggaaaagacagtggcccctacagagtgcagccccatcaagaccgatgtgattacaatggaccccaaggacaactgctccaaggacgccaacgataccctgctgctccagctgaccaacaccagcgcctactacatgtacttgttgctgctgctgaagtccgtggtgtacttcgccatcatcacatgctgcctgctgcggagaaccgccttctgctgcaacggcgagaagtctagggccaagcgatctggatctggagcaacaaacttctcactactcaaacaagcaggtgacgtggaggagaatcccgggcctactagtatggactggatttggcgcatccttttccttgtcggcgctgctaccggcgcgcattccttcgaacaggtgcaactggtggaatctggcgggggagtggtgcagcctggcagatccctgagactgagctgtgccgccagcggcttcatcttcagcagatacggaatgcactgggtgcgccaggcccctggcaagggactgaaatgggtggccgtgatttggtacgacggcagcaacaagctgtacgccgacagcgtgaagggccggttcaccatcagcagagacaacagcaagaacaccctgtacctgcagatgaacagcctgcgggccgaggacaccgccgtgtactattgcgccagagactactacgacaacagccggcaccactggggcttcgactattggggccagggaacccttgtgaccgtgtcctctacgcgtgcctctacaaagggaccctccgtgtttcctctggctcccagcagcaagtctacaagcggaggaacagccgctctgggctgcctggtcaaggattactttcccgagcctgtgaccgtgtcctggaatagcggagcactgacaagcggcgtgcacacctttccagccgtgctgcaaagcagcggcctgtactctctgagcagcgtggtcacagtgcctagctctagcctgggcacccagacctacatctgcaatgtgaaccacaagcctagcaacaccaaggtggacaagagagtggaacccaagagctgtgaagtgaaaaccgactccaccgaccacgtgaagcccaaagagacagagaacaccaagcagcccagcaagagctgccacaagcccaaggccatcgtgcacaccgagaaagtgaacatgatgagcctgaccgtgctgggcctgcggatgctgttcgccaaaaccgtggccgtgaacttcctgctgaccgccaagctgttcttcctc

SEQ ID NO: 2926 - DNA, 2343 bp, Artificial Sequence
  Synthetic Polynucloetide
atggccttaccagtgaccgccttgctcctgccgctggccttgctgctccacgccgccaggccggaagtgcagctggttgaatctggcggaggactggttcagcctggcggatctctgagactgtcttgtgccgccagcggcttcagcttcagcgacttttggatgagctgggtccgacaggcccctggcaaaggacttgaatgggtcgccacaatcagccaggccggcagcgagaaggactacgtggactctgtgaagggcagattcaccatcagccgggacaacgccaagaagtccctgtacctccagatgaacagcctgagagccgaggacaccgccgtgtactattgtgcctctggcgtgtacagcttcgactacagaggccagggcaccctggtcacagtctcttctggtaccggcggaggcggatctggcggcggaggtagcggtggcggaggatctgaattcgagatccagatgacccagagccccagcagcatgtctgccagcctgggcgacaccatcaccatcacatgccaggccacccaggacatcttcaagaacctgaactggtatcagcagaagcccggcaagccccccagcctgctgatctactatgccaccgaactggccgagggcgtgcccagcagattttctggcagcggcagcggctccgactacagcctgaccatcagcaacctggaaagcgaggacttcgccgcctactactgcctccagttcttcgagttcccattcaccttcggctccggcaccaagctggaaatgaagctcgagggacagcctaaggccaatcctaccgtgacactgttccctccaagcagcgaagaactccaggccaacaaggccacacttgtgtgcctgatctccgacttctaccctggggctgtgacagtggcttggaaggccgatggatctcctgtgaaagccggcgtggaaaccaccaagccatccaagcagagcaacaacaaatacgccgccagctcctacctgagcctgacacctgagcagtggaagtcccacagatcctacagctgccaagtgacccacgaaggcagcaccgtggaaaagacagtggcccctacagagtgcagccccatcaagaccgatgtgattacaatggaccccaaggacaactgctccaaggacgccaacgataccctgctgctccagctgaccaacaccagcgcctactacatgtacttgttgctgctgctgaagtccgtggtgtacttcgccatcatcacatgctgcctgctgcggagaaccgccttctgctgcaacggcgagaagtctagggccaagcgatctggatctggagcaacaaacttctcactactcaaacaagcaggtgacgtggaggagaatcccgggcctactagtatggactggatttggcgcatccttttccttgtcggcgctgctaccggcgcgcattccttcgaacaggtgcaactccagcagtctggcgctgagcttgtgcggcctggcacctctgtgaaggtgtcctgtaaagccagcggctacgtgttcaccaactactggatcgagtggatcaagcagcggccaggccagggcctggaatggatcggcgtgatgaatccaggcagcggcgagacaacctacaacgagaagttcaagggcaaggccaccctgaccgccgacaagagcagcagcacagcctacatgcaactgtcctccctgaccagcgtggacagcgccgtgtacttctgcgccagggaccacgaccgggactactacgctatggactactggggccagggcaccagcgtgaccgtgtcatctacgcgtgcctctacaaagggaccctccgtgtttcctctggctcccagcagcaagtctacaagcggaggaacagccgctctgggctgcctggtcaaggattactttcccgagcctgtgaccgtgtcctggaatagcggagcactgacaagcggcgtgcacacctttccagccgtgctgcaaagcagcggcctgtactctctgagcagcgtggtcacagtgcctagctctagcctgggcacccagacctacatctgcaatgtgaaccacaagcctagcaacaccaaggtggacaagagagtggaacccaagagctgtgaagtgaaaaccgactccaccgaccacgtgaagcccaaagagacagagaacaccaagcagcccagcaagagctgccacaagcccaaggccatcgtgcacaccgagaaagtgaacatgatgagcctgaccgtgctgggcctgcggatgctgttcgccaaaaccgtggccgtgaacttcctgctgaccgccaagctgttcttcctc

SEQ ID NO: 2927 - DNA, 2334 bp, Artificial Sequence
  Synthetic Polynucloetide
atggccttaccagtgaccgccttgctcctgccgctggccttgctgctccacgccgccaggccggaagtgcagctggttgaatctggcggaggactggttcagcctggcggatctctgagactgtcttgtgccgccagcggcttcagcttcagcgacttttggatgagctgggtccgacaggcccctggcaaaggacttgaatgggtcgccacaatcagccaggccggcagcgagaaggactacgtggactctgtgaagggcagattcaccatcagccgggacaacgccaagaagtccctgtacctccagatgaacagcctgagagccgaggacaccgccgtgtactattgtgcctctggcgtgtacagcttcgactacagaggccagggcaccctggtcacagtctcttctggtaccggcggaggcggatctggcggcggaggtagcggtggcggaggatctgaattcgacatcctgctgacacagagccccgccatcctgtccgtgtctccaggcgagagagtgtcctttagctgccgggccagccagaacatcggcaccagcatccactggtatcagcagcggaccaacggcagccccagactgctgattaagtacgccagcgagtccgtgtccggcatccccagcagattttctggcagcggctccggcaccgacttcaccctgagcatcaacagcgtggaaagcgaggacattgccgactactactgccagcacaccaatagctggcccaccacctttggcggaggcaccaagctggaaatcaagagactcgagggacagcctaaggccaatcctaccgtgacactgttccctccaagcagcgaagaactccaggccaacaaggccacacttgtgtgcctgatctccgacttctaccctggggctgtgacagtggcttggaaggccgatggatctcctgtgaaagccggcgtggaaaccaccaagccatccaagcagagcaacaacaaatacgccgccagctcctacctgagcctgacacctgagcagtggaagtcccacagatcctacagctgccaagtgacccacgaaggcagcaccgtggaaaagacagtggcccctacagagtgcagccccatcaagaccgatgtgattacaatggaccccaaggacaactgctccaaggacgccaacgataccctgctgctccagctgaccaacaccagcgcctactacatgtacttgttgctgctgctgaagtccgtggtgtacttcgccatcatcacatgctgcctgctgcggagaaccgccttctgctgcaacggcgagaagtctagggccaagcgatctggatctggagcaacaaacttctcactactcaaacaagcaggtgacgtggaggagaatcccgggcctactagtatggactggatttggcgcatccttttccttgtcggcgctgctaccggcgcgcattccttcgaacaggtgcaactccagcagtccgacgccgagcttgtgaagcctggcgcttccgtgaagattagctgcaaggccagcggctacaccttcaccgaccacgccattcactgggtcaagcagaagcccgagcagggcctggaatggatcggctacttcagccccggcaacggcgacatcaagtacaacgagaagttcaagggcaaggccaccctgaccgccgacaagagcagcagcacagcctacatgcaactgaacagcctgaccagcgaggactccgccgtgtacttctgcaagcggagctacggcaactacgactactggggccagggcaccacactgaccgtgtctagtacgcgtgcctctacaaagggaccctccgtgtttcctctggctcccagcagcaagtctacaagcggaggaacagccgctctgggctgcctggtcaaggattactttcccgagcctgtgaccgtgtcctggaatagcggagcactgacaagcggcgtgcacacctttccagccgtgctgcaaagcagcggcctgtactctctgagcagcgtggtcacagtgcctagctctagcctgggcacccagacctacatctgcaatgtgaaccacaagcctagcaacaccaaggtggacaagagagtggaacccaagagctgtgaagtgaaaaccgactccaccgaccacgtgaagcccaaagagacagagaacaccaagcagcccagcaagagctgccacaagcccaaggccatcgtgcacaccgagaaagtgaacatgatgagcctgaccgtgctgggcctgcggatgctgttcgccaaaaccgtggccgtgaacttcctgctgaccgccaagctgttcttcctc

SEQ ID NO: 2928 - DNA, 2349 bp, Artificial Sequence
  Synthetic Polynucloetide
atggccttaccagtgaccgccttgctcctgccgctggccttgctgctccacgccgccaggccggaagtgcagctggttgaatctggcggaggactggttcagcctggcggatctctgagactgtcttgtgccgccagcggcttcagcttcagcgacttttggatgagctgggtccgacaggcccctggcaaaggacttgaatgggtcgccacaatcagccaggccggcagcgagaaggactacgtggactctgtgaagggcagattcaccatcagccgggacaacgccaagaagtccctgtacctccagatgaacagcctgagagccgaggacaccgccgtgtactattgtgcctctggcgtgtacagcttcgactacagaggccagggcaccctggtcacagtctcttctggtaccggcggaggcggatctggcggcggaggtagcggtggcggaggatctgaattcgacatcgtgatgacccagagccccgatagcctggccgtgtctctgggagagagagccaccatcaactgcaagagcagccagagcctgctgaacagcggcgaccagaagaactacctgacctggtatcagcagaagcccggccagccccccaagctgctgatctactgggccagcaccagagaaagcggcgtgcccgatagattcagcggcagcggaagtggcaccgacttcaccctgaccatcagttctcttcaggccgaggacgtggccgtgtactactgccagaacgactacagctaccccctgaccttcggccagggcaccaaggtggaaatcaagctcgagggacagcctaaggccaatcctaccgtgacactgttccctccaagcagcgaagaactccaggccaacaaggccacacttgtgtgcctgatctccgacttctaccctggggctgtgacagtggcttggaaggccgatggatctcctgtgaaagccggcgtggaaaccaccaagccatccaagcagagcaacaacaaatacgccgccagctcctacctgagcctgacacctgagcagtggaagtcccacagatcctacagctgccaagtgacccacgaaggcagcaccgtggaaaagacagtggcccctacagagtgcagccccatcaagaccgatgtgattacaatggaccccaaggacaactgctccaaggacgccaacgataccctgctgctccagctgaccaacaccagcgcctactacatgtacttgttgctgctgctgaagtccgtggtgtacttcgccatcatcacatgctgcctgctgcggagaaccgccttctgctgcaacggcgagaagtctagggccaagcgatctggatctggagcaacaaacttctcactactcaaacaagcaggtgacgtggaggagaatcccgggcctactagtatggactggatttggcgcatccttttccttgtcggcgctgctaccggcgcgcattccttcgaacaggtgcagctggtgcagtctggggccgaagtgaagaaaaccggcagcagcgtgaaggtgtcctgcaaggccagcggctacacctttaccgaccacgccattcacgtgtggcggcaggctccaggacaggccctggaatggatgggccacttcagccccggcaacaccgacatcaagtacaacgacaagttcaagggcagagtgaccctgaccgtggaccgcagcatgagcaccgcctacatggaactgagcagcctgcggagcgaggacaccgccatgtactattgcaagaccagcaccttctttttcgactactggggccagggaacaatggtcaccgtgtccagcacgcgtgcctctacaaagggaccctccgtgtttcctctggctcccagcagcaagtctacaagcggaggaacagccgctctgggctgcctggtcaaggattactttcccgagcctgtgaccgtgtcctggaatagcggagcactgacaagcggcgtgcacacctttccagccgtgctgcaaagcagcggcctgtactctctgagcagcgtggtcacagtgcctagctctagcctgggcacccagacctacatctgcaatgtgaaccacaagcctagcaacaccaaggtggacaagagagtggaacccaagagctgtgaagtgaaaaccgactccaccgaccacgtgaagcccaaagagacagagaacaccaagcagcccagcaagagctgccacaagcccaaggccatcgtgcacaccgagaaagtgaacatgatgagcctgaccgtgctgggcctgcggatgctgttcgccaaaaccgtggccgtgaacttcctgctgaccgccaagctgttcttcctc

SEQ ID NO: 2929 - DNA, 2346 bp, Artificial Sequence
  Synthetic Polynucloetide
atggccttaccagtgaccgccttgctcctgccgctggccttgctgctccacgccgccaggccggaagtgcagctggttgaatctggcggaggactggttcagcctggcggatctctgagactgtcttgtgccgccagcggcttcagcttcagcgacttttggatgagctgggtccgacaggcccctggcaaaggacttgaatgggtcgccacaatcagccaggccggcagcgagaaggactacgtggactctgtgaagggcagattcaccatcagccgggacaacgccaagaagtccctgtacctccagatgaacagcctgagagccgaggacaccgccgtgtactattgtgcctctggcgtgtacagcttcgactacagaggccagggcaccctggtcacagtctcttctggtaccggcggaggcggatctggcggcggaggtagcggtggcggaggatctgaattcgacatccagatgacccagagccccagcagcctgtctgccagcgtgggcgacagagtgaccatcacatgcaaggccagccaggacgtgtccattgccgtggcctggtatcagcagaagcccggcaaggcccccaaggtgctgatctacagcgccagctacagatacaccggcgtgcccgacagattcagcggctctggcagcggcaccgacttcaccttcaccatcagctccctccagcccgaggatattgccgtgtactactgccagcagcactacatcacccccctgacctttggcggaggcaccaaggtggaaatcaagctcgagggacagcctaaggccaatcctaccgtgacactgttccctccaagcagcgaagaactccaggccaacaaggccacacttgtgtgcctgatctccgacttctaccctggggctgtgacagtggcttggaaggccgatggatctcctgtgaaagccggcgtggaaaccaccaagccatccaagcagagcaacaacaaatacgccgccagctcctacctgagcctgacacctgagcagtggaagtcccacagatcctacagctgccaagtgacccacgaaggcagcaccgtggaaaagacagtggcccctacagagtgcagccccatcaagaccgatgtgattacaatggaccccaaggacaactgctccaaggacgccaacgataccctgctgctccagctgaccaacaccagcgcctactacatgtacttgttgctgctgctgaagtccgtggtgtacttcgccatcatcacatgctgcctgctgcggagaaccgccttctgctgcaacggcgagaagtctagggccaagcgatctggatctggagcaacaaacttctcactactcaaacaagcaggtgacgtggaggagaatcccgggcctactagtatggactggatttggcgcatccttttccttgtcggcgctgctaccggcgcgcattccttcgaacagatccaactggtgcagagcggccacgaagtgaagaaacctggggccagcgtgaaggtgtcctgcaaagccagcggctacacctttaccaactacggcatgaactgggtgcgccaggcccctggacagggcctggaatggatgggctggatcaacaccaagaccggcgagcccacctacgccgaagagttcaagggcagattcgtgttcagcctggaaaccagcgcctccaccgcctacctccagatcagctctctgaaggccgaggacaccgccatgtacttttgcggcagaggcggctacggcagcagctactggtacttcgatgtgtggggccagggcaccaccgtgaccgtgtcatctacgcgtgcctctacaaagggaccctccgtgtttcctctggctcccagcagcaagtctacaagcggaggaacagccgctctgggctgcctggtcaaggattactttcccgagcctgtgaccgtgtcctggaatagcggagcactgacaagcggcgtgcacacctttccagccgtgctgcaaagcagcggcctgtactctctgagcagcgtggtcacagtgcctagctctagcctgggcacccagacctacatctgcaatgtgaaccacaagcctagcaacaccaaggtggacaagagagtggaacccaagagctgtgaagtgaaaaccgactccaccgaccacgtgaagcccaaagagacagagaacaccaagcagcccagcaagagctgccacaagcccaaggccatcgtgcacaccgagaaagtgaacatgatgagcctgaccgtgctgggcctgcggatgctgttcgccaaaaccgtggccgtgaacttcctgctgaccgccaagctgttcttcctc

SEQ ID NO: 2930 - DNA, 2352 bp, Artificial Sequence
  Synthetic Polynucloetide
atggccttaccagtgaccgccttgctcctgccgctggccttgctgctccacgccgccaggccggaagtgcagctggttgaatctggcggaggactggttcagcctggcggatctctgagactgtcttgtgccgccagcggcttcagcttcagcgacttttggatgagctgggtccgacaggcccctggcaaaggacttgaatgggtcgccacaatcagccaggccggcagcgagaaggactacgtggactctgtgaagggcagattcaccatcagccgggacaacgccaagaagtccctgtacctccagatgaacagcctgagagccgaggacaccgccgtgtactattgtgcctctggcgtgtacagcttcgactacagaggccagggcaccctggtcacagtctcttctggtaccggcggaggcggatctggcggcggaggtagcggtggcggaggatctgaattcgacatcgtgatgacccagagccccgatagcctggccgtgtctctgggagagagagccaccatcaactgccgggccagcaagagcgtgtccaccagcggctacagctacatgcactggtatcagcagaagcccggccagccccccaagctgctgatctacctggcctccaacctggaaagcggcgtgcccgatagattcagcggcagcggctctggcaccgacttcaccctgaccatcagttctcttcaggccgaggacgtggccgtgtactactgccagcacagcagagagctgccctacaccttcggccagggcaccaagctggaaatcaagctcgagggacagcctaaggccaatcctaccgtgacactgttccctccaagcagcgaagaactccaggccaacaaggccacacttgtgtgcctgatctccgacttctaccctggggctgtgacagtggcttggaaggccgatggatctcctgtgaaagccggcgtggaaaccaccaagccatccaagcagagcaacaacaaatacgccgccagctcctacctgagcctgacacctgagcagtggaagtcccacagatcctacagctgccaagtgacccacgaaggcagcaccgtggaaaagacagtggcccctacagagtgcagccccatcaagaccgatgtgattacaatggaccccaaggacaactgctccaaggacgccaacgataccctgctgctccagctgaccaacaccagcgcctactacatgtacttgttgctgctgctgaagtccgtggtgtacttcgccatcatcacatgctgcctgctgcggagaaccgccttctgctgcaacggcgagaagtctagggccaagcgatctggatctggagcaacaaacttctcactactcaaacaagcaggtgacgtggaggagaatcccgggcctactagtatggactggatttggcgcatccttttccttgtcggcgctgctaccggcgcgcattccttcgaacaggtgcaactccaggaatctggccctggccttgtgaagcccagcgagacactgagcctgacctgtaccgtgtccggcggcagcatcagctcttacggcgtgcactggattcggcagcctccaggcaagggcctggaatggatcggcgtgatctggacctccggcgtgaccgactacaacagcgccctgatgggcagagtgaccatctccgtggacaccagcaagaaccagttcagcctgaagctgagcagcgtgacagccgccgataccgccgtgtattattgcgccagagatggcgactacgaccgctacacaatggactactggggccagggaacccttgtgaccgtgtcctctacgcgtgcctctacaaagggaccctccgtgtttcctctggctcccagcagcaagtctacaagcggaggaacagccgctctgggctgcctggtcaaggattactttcccgagcctgtgaccgtgtcctggaatagcggagcactgacaagcggcgtgcacacctttccagccgtgctgcaaagcagcggcctgtactctctgagcagcgtggtcacagtgcctagctctagcctgggcacccagacctacatctgcaatgtgaaccacaagcctagcaacaccaaggtggacaagagagtggaacccaagagctgtgaagtgaaaaccgactccaccgaccacgtgaagcccaaagagacagagaacaccaagcagcccagcaagagctgccacaagcccaaggccatcgtgcacaccgagaaagtgaacatgatgagcctgaccgtgctgggcctgcggatgctgttcgccaaaaccgtggccgtgaacttcctgctgaccgccaagctgttcttcctc

SEQ ID NO: 2931 - DNA, 2352 bp, Artificial Sequence
  Synthetic Polynucloetide
atggccttaccagtgaccgccttgctcctgccgctggccttgctgctccacgccgccaggccggaagtgcagctggttgaatctggcggaggactggttcagcctggcggatctctgagactgtcttgtgccgccagcggcttcagcttcagcgacttttggatgagctgggtccgacaggcccctggcaaaggacttgaatgggtcgccacaatcagccaggccggcagcgagaaggactacgtggactctgtgaagggcagattcaccatcagccgggacaacgccaagaagtccctgtacctccagatgaacagcctgagagccgaggacaccgccgtgtactattgtgcctctggcgtgtacagcttcgactacagaggccagggcaccctggtcacagtctcttctggtaccggcggaggcggatctggcggcggaggtagcggtggcggaggatctgaattcgacatccagatgacccagagccccagcagcctgtctgccagcgtgggcgacagagtgaccatcacctgtagagccagccagagcatcggcaccagcctgcactggtatcagcagaagcctggcaaggcccccaagctgctgattaagttcgccagcagactgcagagcggcgtgcccagcagattttctggcagcggctccggcaccgacttcaccctgacaatcagctccctgcagcccgaggacttcgccacctactactgccagcagagccccggcttccctccaacctttggacagggcaccaagctggaaatcaagcggctcgagggacagcctaaggccaatcctaccgtgacactgttccctccaagcagcgaagaactccaggccaacaaggccacacttgtgtgcctgatctccgacttctaccctggggctgtgacagtggcttggaaggccgatggatctcctgtgaaagccggcgtggaaaccaccaagccatccaagcagagcaacaacaaatacgccgccagctcctacctgagcctgacacctgagcagtggaagtcccacagatcctacagctgccaagtgacccacgaaggcagcaccgtggaaaagacagtggcccctacagagtgcagccccatcaagaccgatgtgattacaatggaccccaaggacaactgctccaaggacgccaacgataccctgctgctccagctgaccaacaccagcgcctactacatgtacttgttgctgctgctgaagtccgtggtgtacttcgccatcatcacatgctgcctgctgcggagaaccgccttctgctgcaacggcgagaagtctagggccaagcgatctggatctggagcaacaaacttctcactactcaaacaagcaggtgacgtggaggagaatcccgggcctactagtatggactggatttggcgcatccttttccttgtcggcgctgctaccggcgcgcattccttcgaacaggtgcaactggtggaatctggcggcggacttgtgaagccaggcggcagcctgagactgagctgtgccgccagcggcttcagcatcaccaccagcggctactactggacctggatcagacagttccccggcaagggcctggaatggatgggctacatcggctacaacagcaagacctactacaaccccgccctgaagtcccggatcaccatcagcagagacaacgccaagaacagcctgtacctgcagatgaactccctgagagccgaggataccgccgtgtactactgcgccagatccctgtacggcggctacaaggacgccttcgatagctggggccagggaacccttgtgaccgtgtctagcacgcgtgcctctacaaagggaccctccgtgtttcctctggctcccagcagcaagtctacaagcggaggaacagccgctctgggctgcctggtcaaggattactttcccgagcctgtgaccgtgtcctggaatagcggagcactgacaagcggcgtgcacacctttccagccgtgctgcaaagcagcggcctgtactctctgagcagcgtggtcacagtgcctagctctagcctgggcacccagacctacatctgcaatgtgaaccacaagcctagcaacaccaaggtggacaagagagtggaacccaagagctgtgaagtgaaaaccgactccaccgaccacgtgaagcccaaagagacagagaacaccaagcagcccagcaagagctgccacaagcccaaggccatcgtgcacaccgagaaagtgaacatgatgagcctgaccgtgctgggcctgcggatgctgttcgccaaaaccgtggccgtgaacttcctgctgaccgccaagctgttcttcctc

SEQ ID NO: 2932 - DNA, 2367 bp, Artificial Sequence
  Synthetic Polynucloetide
atggccttaccagtgaccgccttgctcctgccgctggccttgctgctccacgccgccaggccggaagtgcagctggttgaatctggcggaggactggttcagcctggcggatctctgagactgtcttgtgccgccagcggcttcagcttcagcgacttttggatgagctgggtccgacaggcccctggcaaaggacttgaatgggtcgccacaatcagccaggccggcagcgagaaggactacgtggactctgtgaagggcagattcaccatcagccgggacaacgccaagaagtccctgtacctccagatgaacagcctgagagccgaggacaccgccgtgtactattgtgcctctggcgtgtacagcttcgactacagaggccagggcaccctggtcacagtctcttctggtaccggcggaggcggatctggcggcggaggtagcggtggcggaggatctgaattcgacgagatcgtgctgacccagagccctctgagcctgcctgtgacacctggcgagcctgccagcatctcctgtagaagcagccagagcctgctgcacagcatcggctacaactacctggactggtatctccagaagcccggccagagcccccaactgctgatctacctgggcagcaacagagccagcggcgtgcccgatagattttccggcagcggctccggcaccgacttcaccctgaagatcagccgggtggaagccgaggacgtgggcgtgtactactgtatgcaggccctccagacccccctgacctttggcggaggcaccaaggtggaaatcaagcggctcgagggacagcctaaggccaatcctaccgtgacactgttccctccaagcagcgaagaactccaggccaacaaggccacacttgtgtgcctgatctccgacttctaccctggggctgtgacagtggcttggaaggccgatggatctcctgtgaaagccggcgtggaaaccaccaagccatccaagcagagcaacaacaaatacgccgccagctcctacctgagcctgacacctgagcagtggaagtcccacagatcctacagctgccaagtgacccacgaaggcagcaccgtggaaaagacagtggcccctacagagtgcagccccatcaagaccgatgtgattacaatggaccccaaggacaactgctccaaggacgccaacgataccctgctgctccagctgaccaacaccagcgcctactacatgtacttgttgctgctgctgaagtccgtggtgtacttcgccatcatcacatgctgcctgctgcggagaaccgccttctgctgcaacggcgagaagtctagggccaagcgatctggatctggagcaacaaacttctcactactcaaacaagcaggtgacgtggaggagaatcccgggcctactagtatggactggatttggcgcatccttttccttgtcggcgctgctaccggcgcgcattccttcgaagaagtgcaactggtggaaagcggaggcggcgtggtgcagcctggaagaagcctgagactgagctgtgccgccagcggcttcaccttccggtcctacggaatgcactgggtgcgccaggcccctggcaaaggactggaatgggtggccgtgatctcctacgacggctccaacaagtactacaccgacagcgtgaacggcagattcaccatcagcagagacaacagcaagaacaccctgtacctccagatgaacagcctgcgggccgaggacaccgccgtgtactattgtgctagaggcggaggctactacgagacaagcggccctgattactggggccagggcacactcgtgaccgtgtctagtacgcgtgcctctacaaagggaccctccgtgtttcctctggctcccagcagcaagtctacaagcggaggaacagccgctctgggctgcctggtcaaggattactttcccgagcctgtgaccgtgtcctggaatagcggagcactgacaagcggcgtgcacacctttccagccgtgctgcaaagcagcggcctgtactctctgagcagcgtggtcacagtgcctagctctagcctgggcacccagacctacatctgcaatgtgaaccacaagcctagcaacaccaaggtggacaagagagtggaacccaagagctgtgaagtgaaaaccgactccaccgaccacgtgaagcccaaagagacagagaacaccaagcagcccagcaagagctgccacaagcccaaggccatcgtgcacaccgagaaagtgaacatgatgagcctgaccgtgctgggcctgcggatgctgttcgccaaaaccgtggccgtgaacttcctgctgaccgccaagctgttcttcctc

SEQ ID NO: 2933 - DNA, 2361 bp, Artificial Sequence
  Synthetic Polynucloetide
atggccttaccagtgaccgccttgctcctgccgctggccttgctgctccacgccgccaggccggaagtgcagctggttgaatctggcggaggactggttcagcctggcggatctctgagactgtcttgtgccgccagcggcttcagcttcagcgacttttggatgagctgggtccgacaggcccctggcaaaggacttgaatgggtcgccacaatcagccaggccggcagcgagaaggactacgtggactctgtgaagggcagattcaccatcagccgggacaacgccaagaagtccctgtacctccagatgaacagcctgagagccgaggacaccgccgtgtactattgtgcctctggcgtgtacagcttcgactacagaggccagggcaccctggtcacagtctcttctggtaccggcggaggcggatctggcggcggaggtagcggtggcggaggatctgaattcgacgacgtcgtgatgacccagagccctctgagcctgcctgtgacacctggcgagcctgccagcatctcctgtagaagcagccagagcctgctgcacagcatcggctacaactacctgcactggtttctccagaagcccggccagagcccccaactgctgatctacctgggcagcaacagagccagcggcgtgcccgatagattttccggcagcggctccggcaccgacttcaccctgaagatcagccgggtggaagccgaggacgtgggcgtgtactactgtatgcaggccctccagacccctcccacctttggacagggcaccagactggaaatcaagcggctcgagggacagcctaaggccaatcctaccgtgacactgttccctccaagcagcgaagaactccaggccaacaaggccacacttgtgtgcctgatctccgacttctaccctggggctgtgacagtggcttggaaggccgatggatctcctgtgaaagccggcgtggaaaccaccaagccatccaagcagagcaacaacaaatacgccgccagctcctacctgagcctgacacctgagcagtggaagtcccacagatcctacagctgccaagtgacccacgaaggcagcaccgtggaaaagacagtggcccctacagagtgcagccccatcaagaccgatgtgattacaatggaccccaaggacaactgctccaaggacgccaacgataccctgctgctccagctgaccaacaccagcgcctactacatgtacttgttgctgctgctgaagtccgtggtgtacttcgccatcatcacatgctgcctgctgcggagaaccgccttctgctgcaacggcgagaagtctagggccaagcgatctggatctggagcaacaaacttctcactactcaaacaagcaggtgacgtggaggagaatcccgggcctactagtatggactggatttggcgcatccttttccttgtcggcgctgctaccggcgcgcattccttcgaacaactccaactccaggaaagcggccctggcctcgtgaagcctagcggcacactgagcctgacatgtgccgtgtctggcggcagcatcagcagcagcaactggtggtcttgggtgcgccagcctcctggcaagggcctggaatggatcggcgaaatctaccacagcggcagcaccaactacaaccccagcctgaagtccagagtgaccatcagcgtggacaagagcaagaaccagttctccctgaagctgagcagcgtgacagccgccgataccgccgtgtactattgcgtgggcagcccctacggcgactacgtgctggattattggggccagggcaccctcgtgaccgtgtctagtacgcgtgcctctacaaagggaccctccgtgtttcctctggctcccagcagcaagtctacaagcggaggaacagccgctctgggctgcctggtcaaggattactttcccgagcctgtgaccgtgtcctggaatagcggagcactgacaagcggcgtgcacacctttccagccgtgctgcaaagcagcggcctgtactctctgagcagcgtggtcacagtgcctagctctagcctgggcacccagacctacatctgcaatgtgaaccacaagcctagcaacaccaaggtggacaagagagtggaacccaagagctgtgaagtgaaaaccgactccaccgaccacgtgaagcccaaagagacagagaacaccaagcagcccagcaagagctgccacaagcccaaggccatcgtgcacaccgagaaagtgaacatgatgagcctgaccgtgctgggcctgcggatgctgttcgccaaaaccgtggccgtgaacttcctgctgaccgccaagctgttcttcctc

SEQ ID NO: 2934 - DNA, 2355 bp, Artificial Sequence
  Synthetic Polynucloetide
atggccttaccagtgaccgccttgctcctgccgctggccttgctgctccacgccgccaggccggaagtgcagctggttgaatctggcggaggactggttcagcctggcggatctctgagactgtcttgtgccgccagcggcttcagcttcagcgacttttggatgagctgggtccgacaggcccctggcaaaggacttgaatgggtcgccacaatcagccaggccggcagcgagaaggactacgtggactctgtgaagggcagattcaccatcagccgggacaacgccaagaagtccctgtacctccagatgaacagcctgagagccgaggacaccgccgtgtactattgtgcctctggcgtgtacagcttcgactacagaggccagggcaccctggtcacagtctcttctggtaccggcggaggcggatctggcggcggaggtagcggtggcggaggatctgaattcgacgagatcgtgctgacacagagccctggcaccctgagcctgtctctgggagagagagccacactgagctgtcgggccagccagtctatcagcagcagcttcctggcctggtatcagcagaagcccggccaggcccctaagctgctgatctacgccgccagcacaagagccaccggcatccccgatagattcagcggctctggcagcggcaccgacttcaccctgaccatcagcagactggaacccgaggacttcgccgtgtactactgccagcagtacggcagaagcctgagcttcggcggaggcaccaaggtggaagtgaagctcgagggacagcctaaggccaatcctaccgtgacactgttccctccaagcagcgaagaactccaggccaacaaggccacacttgtgtgcctgatctccgacttctaccctggggctgtgacagtggcttggaaggccgatggatctcctgtgaaagccggcgtggaaaccaccaagccatccaagcagagcaacaacaaatacgccgccagctcctacctgagcctgacacctgagcagtggaagtcccacagatcctacagctgccaagtgacccacgaaggcagcaccgtggaaaagacagtggcccctacagagtgcagccccatcaagaccgatgtgattacaatggaccccaaggacaactgctccaaggacgccaacgataccctgctgctccagctgaccaacaccagcgcctactacatgtacttgttgctgctgctgaagtccgtggtgtacttcgccatcatcacatgctgcctgctgcggagaaccgccttctgctgcaacggcgagaagtctagggccaagcgatctggatctggagcaacaaacttctcactactcaaacaagcaggtgacgtggaggagaatcccgggcctactagtatggactggatttggcgcatccttttccttgtcggcgctgctaccggcgcgcattccttcgaacaggtgcaactccagcagtctggccccggactcgtgaagcctagccagacactgagcctgacctgcgccatcagcggcgatagcgtgtccggcaatagcgccacctggaactggatcagacagagcccatctcggggcctggaatggctgggccggacctactaccgcagcaagtggaaccacgactacgccgagagcgtgaagtcccggatcaccatcaaccccgacaccagcaagaaccagttctccttgcaactgaacagcgtgacccccgaggacacagccgtgtattattgcgccagaggcgacagcagctcttggtacgccttcgactattggggccagggcaccctcgtgaccgtgtctagtacgcgtgcctctacaaagggaccctccgtgtttcctctggctcccagcagcaagtctacaagcggaggaacagccgctctgggctgcctggtcaaggattactttcccgagcctgtgaccgtgtcctggaatagcggagcactgacaagcggcgtgcacacctttccagccgtgctgcaaagcagcggcctgtactctctgagcagcgtggtcacagtgcctagctctagcctgggcacccagacctacatctgcaatgtgaaccacaagcctagcaacaccaaggtggacaagagagtggaacccaagagctgtgaagtgaaaaccgactccaccgaccacgtgaagcccaaagagacagagaacaccaagcagcccagcaagagctgccacaagcccaaggccatcgtgcacaccgagaaagtgaacatgatgagcctgaccgtgctgggcctgcggatgctgttcgccaaaaccgtggccgtgaacttcctgctgaccgccaagctgttcttcctc

SEQ ID NO: 2935 - DNA, 2352 bp, Artificial Sequence
  Synthetic Polynucloetide
atggccttaccagtgaccgccttgctcctgccgctggccttgctgctccacgccgccaggccggaagtgcagctggttgaatctggcggaggactggttcagcctggcggatctctgagactgtcttgtgccgccagcggcttcagcttcagcgacttttggatgagctgggtccgacaggcccctggcaaaggacttgaatgggtcgccacaatcagccaggccggcagcgagaaggactacgtggactctgtgaagggcagattcaccatcagccgggacaacgccaagaagtccctgtacctccagatgaacagcctgagagccgaggacaccgccgtgtactattgtgcctctggcgtgtacagcttcgactacagaggccagggcaccctggtcacagtctcttctggtaccggcggaggcggatctggcggcggaggtagcggtggcggaggatctgaattcgaccagagcgtcgtgacacagcctcctagcgtgtcagtggcccctggcaagaccgccagaatcacctgtggccggaacaacatcggcagcaagagcgtgcactggtatcagcagaagcccggccaggctcctgtgctggtggtgtacgacgacagcgacagacccagcggcatccccgagagattcagcggcagcaactccggcaataccgccaccctgaccatcagcagagtggaagccggcgacgaggccgactactactgccaagtgtgggacagcagcagcgatcacgtggtgtttggcggaggcaccaagctgacagtgctgggtctcgagggacagcctaaggccaatcctaccgtgacactgttccctccaagcagcgaagaactccaggccaacaaggccacacttgtgtgcctgatctccgacttctaccctggggctgtgacagtggcttggaaggccgatggatctcctgtgaaagccggcgtggaaaccaccaagccatccaagcagagcaacaacaaatacgccgccagctcctacctgagcctgacacctgagcagtggaagtcccacagatcctacagctgccaagtgacccacgaaggcagcaccgtggaaaagacagtggcccctacagagtgcagccccatcaagaccgatgtgattacaatggaccccaaggacaactgctccaaggacgccaacgataccctgctgctccagctgaccaacaccagcgcctactacatgtacttgttgctgctgctgaagtccgtggtgtacttcgccatcatcacatgctgcctgctgcggagaaccgccttctgctgcaacggcgagaagtctagggccaagcgatctggatctggagcaacaaacttctcactactcaaacaagcaggtgacgtggaggagaatcccgggcctactagtatggactggatttggcgcatccttttccttgtcggcgctgctaccggcgcgcattccttcgaagtgcaactggtgcagtctggcggaggggtcatgcggcctggcggatctctgagactgtcttgtgccgccagcggcttcaccttcgacgactacggcatgagctgggtgcgccaggcccctggaaaaggcctggaatgggtgtccggcatcaactggaatggcggcagcaccggctacgccgattctgtgcggggcagattcaccatcagccgggacaacgccaagaacagcctgtacctgcagatgaactccctgcgggccgaggacaccgccctgtactattgcgccagagagcggggctacggctaccacgaccctcacgattattggggccagggcacccttgttaccgtgtcctctacgcgtgcctctacaaagggaccctccgtgtttcctctggctcccagcagcaagtctacaagcggaggaacagccgctctgggctgcctggtcaaggattactttcccgagcctgtgaccgtgtcctggaatagcggagcactgacaagcggcgtgcacacctttccagccgtgctgcaaagcagcggcctgtactctctgagcagcgtggtcacagtgcctagctctagcctgggcacccagacctacatctgcaatgtgaaccacaagcctagcaacaccaaggtggacaagagagtggaacccaagagctgtgaagtgaaaaccgactccaccgaccacgtgaagcccaaagagacagagaacaccaagcagcccagcaagagctgccacaagcccaaggccatcgtgcacaccgagaaagtgaacatgatgagcctgaccgtgctgggcctgcggatgctgttcgccaaaaccgtggccgtgaacttcctgctgaccgccaagctgttcttcctc

SEQ ID NO: 2936 - DNA, 2391 bp, Artificial Sequence
  Synthetic Polynucloetide
atggccttaccagtgaccgccttgctcctgccgctggccttgctgctccacgccgccaggccggaagtgcagctggttgaatctggcggaggactggttcagcctggcggatctctgagactgtcttgtgccgccagcggcttcagcttcagcgacttttggatgagctgggtccgacaggcccctggcaaaggacttgaatgggtcgccacaatcagccaggccggcagcgagaaggactacgtggactctgtgaagggcagattcaccatcagccgggacaacgccaagaagtccctgtacctccagatgaacagcctgagagccgaggacaccgccgtgtactattgtgcctctggcgtgtacagcttcgactacagaggccagggcaccctggtcacagtctcttctggtaccggcggaggcggatctggcggcggaggtagcggtggcggaggatctgaattcgaacagaaactcatcagtgaagaagacctggaattccaggctgtcgtgacacagcctcctagcgcctctggcacaccaggccagagagtgaccatctcctgtagcggcagcagcagcaacatcggcagcaacaccgtgaactggtatcagcaggtgcccggcaccgctcccaagctgctgatctacagcaacaaccagcggcccagcggcgtgcccgatagattttctggcagcaagagcggcaccagcgccagcctggctatctctggactccagtccgaggacgaggccgactactattgcgccgcctgggacgatagcctgaacggctgggtgttcggcggaggcaccaagctgacagtgctgctcgagggacagcctaaggccaatcctaccgtgacactgttccctccaagcagcgaagaactccaggccaacaaggccacacttgtgtgcctgatctccgacttctaccctggggctgtgacagtggcttggaaggccgatggatctcctgtgaaagccggcgtggaaaccaccaagccatccaagcagagcaacaacaaatacgccgccagctcctacctgagcctgacacctgagcagtggaagtcccacagatcctacagctgccaagtgacccacgaaggcagcaccgtggaaaagacagtggcccctacagagtgcagccccatcaagaccgatgtgattacaatggaccccaaggacaactgctccaaggacgccaacgataccctgctgctccagctgaccaacaccagcgcctactacatgtacttgttgctgctgctgaagtccgtggtgtacttcgccatcatcacatgctgcctgctgcggagaaccgccttctgctgcaacggcgagaagtctagggccaagcgatctggatctggagcaacaaacttctcactactcaaacaagcaggtgacgtggaggagaatcccgggcctactagtatggactggatttggcgcatccttttccttgtcggcgctgctaccggcgcgcattccttcgaacagatgcaactggtgcagagcggagccgaagtgaaagagcctggcgagagcctgcggatctcctgcaagggcagcggctacagcttcaccaatttctggatctcttgggtgcgccagatgcccggcaagggcctggaatggatgggcagagtggaccccggctactcctacagcacctacagccctagcttccagggccacgtgaccatcagcgccgacaagagcaccagcaccgcctacctccagtggaacagcctgaaggccagcgacaccgccatgtactactgcgccagagtgcagtacagcggctattacgattggttcgacccctggggccagggcacactcgtgacagtgtcaagcacgcgtgcctctacaaagggaccctccgtgtttcctctggctcccagcagcaagtctacaagcggaggaacagccgctctgggctgcctggtcaaggattactttcccgagcctgtgaccgtgtcctggaatagcggagcactgacaagcggcgtgcacacctttccagccgtgctgcaaagcagcggcctgtactctctgagcagcgtggtcacagtgcctagctctagcctgggcacccagacctacatctgcaatgtgaaccacaagcctagcaacaccaaggtggacaagagagtggaacccaagagctgtgaagtgaaaaccgactccaccgaccacgtgaagcccaaagagacagagaacaccaagcagcccagcaagagctgccacaagcccaaggccatcgtgcacaccgagaaagtgaacatgatgagcctgaccgtgctgggcctgcggatgctgttcgccaaaaccgtggccgtgaacttcctgctgaccgccaagctgttcttcctc

SEQ ID NO: 2937 - DNA, 2373 bp, Artificial Sequence
  Synthetic Polynucloetide
atggccttaccagtgaccgccttgctcctgccgctggccttgctgctccacgccgccaggccggaagtgcagctggttgaatctggcggaggactggttcagcctggcggatctctgagactgtcttgtgccgccagcggcttcagcttcagcgacttttggatgagctgggtccgacaggcccctggcaaaggacttgaatgggtcgccacaatcagccaggccggcagcgagaaggactacgtggactctgtgaagggcagattcaccatcagccgggacaacgccaagaagtccctgtacctccagatgaacagcctgagagccgaggacaccgccgtgtactattgtgcctctggcgtgtacagcttcgactacagaggccagggcaccctggtcacagtctcttctggtaccggcggaggcggatctggcggcggaggtagcggtggcggaggatctgaattcgaacagaaactcatcagtgaagaagacctggaattcgacatccagatgacccagagccccagcacactgagcgccagcgtgggcgacagagtgaccatcacctgtcgggccagccagaacatcaacaagtggctggcctggtatcagcagaggcccggaaaagccccccagctgctgatctacaaggccagcagcctggaaagcggcgtgcccagcagattttctggcagcggctctggcaccgagtacaccctgaccatcagctccctccagcccgacgacttcgccacctactactgccagcagtacaacagctacgccaccttcggccagggcaccaaggtggaaatcaagagactcgagggacagcctaaggccaatcctaccgtgacactgttccctccaagcagcgaagaactccaggccaacaaggccacacttgtgtgcctgatctccgacttctaccctggggctgtgacagtggcttggaaggccgatggatctcctgtgaaagccggcgtggaaaccaccaagccatccaagcagagcaacaacaaatacgccgccagctcctacctgagcctgacacctgagcagtggaagtcccacagatcctacagctgccaagtgacccacgaaggcagcaccgtggaaaagacagtggcccctacagagtgcagccccatcaagaccgatgtgattacaatggaccccaaggacaactgctccaaggacgccaacgataccctgctgctccagctgaccaacaccagcgcctactacatgtacttgttgctgctgctgaagtccgtggtgtacttcgccatcatcacatgctgcctgctgcggagaaccgccttctgctgcaacggcgagaagtctagggccaagcgatctggatctggagcaacaaacttctcactactcaaacaagcaggtgacgtggaggagaatcccgggcctactagtatggactggatttggcgcatccttttccttgtcggcgctgctaccggcgcgcattccttcgaacaggtgcagctggtgcagtctggggccgaagtgaagaagcctggcgagagcctgaagatcagctgcaagggctccggctacaacttctctaacaagtggatcggctgggtgcgccagctgcctggcagaggactggaatggatcgccatcatctaccccggctacagcgacatcacctacagccccagcttccagggccgcgtgacaatcagcgccgacaccagcatcaacaccgcctacctgcactggcacagcctgaaggccagcgacaccgccatgtactactgcgtgcggcatacagccctggctggcttcgattattggggcctgggcaccctcgtgaccgtgtctagtacgcgtgcctctacaaagggaccctccgtgtttcctctggctcccagcagcaagtctacaagcggaggaacagccgctctgggctgcctggtcaaggattactttcccgagcctgtgaccgtgtcctggaatagcggagcactgacaagcggcgtgcacacctttccagccgtgctgcaaagcagcggcctgtactctctgagcagcgtggtcacagtgcctagctctagcctgggcacccagacctacatctgcaatgtgaaccacaagcctagcaacaccaaggtggacaagagagtggaacccaagagctgtgaagtgaaaaccgactccaccgaccacgtgaagcccaaagagacagagaacaccaagcagcccagcaagagctgccacaagcccaaggccatcgtgcacaccgagaaagtgaacatgatgagcctgaccgtgctgggcctgcggatgctgttcgccaaaaccgtggccgtgaacttcctgctgaccgccaagctgttcttcctc

SEQ ID NO: 2938 - DNA, 2346 bp, Artificial Sequence
  Synthetic Polynucloetide
atggccttaccagtgaccgccttgctcctgccgctggccttgctgctccacgccgccaggccggaagtgcagctggttgaatctggcggaggactggttcagcctggcggatctctgagactgtcttgtgccgccagcggcttcagcttcagcgacttttggatgagctgggtccgacaggcccctggcaaaggacttgaatgggtcgccacaatcagccaggccggcagcgagaaggactacgtggactctgtgaagggcagattcaccatcagccgggacaacgccaagaagtccctgtacctccagatgaacagcctgagagccgaggacaccgccgtgtactattgtgcctctggcgtgtacagcttcgactacagaggccagggcaccctggtcacagtctcttctggtaccggcggaggcggatctggcggcggaggtagcggtggcggaggatctgaattcatcgtgctgacacagagccctgcttctctggccgtgtctctgggacagagagccaccatcagctgtagagccagcgagagcgtggacaactacggcaacaccttcatgcactggtatcagcagaagcccggccagcctcctaagctgctgatctacagagccagcaacctggaaagcggcatccccgccagattttctggcagcggcagcagaaccgacttcaccctgaccatcaatcccgtggaagccgacgacgtggcaacctactactgccagcagagcaacgaggaccctcctacatttggagccggcaccaagctggaactgaaactcgagggacagcctaaggccaatcctaccgtgacactgttccctccaagcagcgaagaactccaggccaacaaggccacacttgtgtgcctgatctccgacttctaccctggggctgtgacagtggcttggaaggccgatggatctcctgtgaaagccggcgtggaaaccaccaagccatccaagcagagcaacaacaaatacgccgccagctcctacctgagcctgacacctgagcagtggaagtcccacagatcctacagctgccaagtgacccacgaaggcagcaccgtggaaaagacagtggcccctacagagtgcagccccatcaagaccgatgtgattacaatggaccccaaggacaactgctccaaggacgccaacgataccctgctgctccagctgaccaacaccagcgcctactacatgtacttgttgctgctgctgaagtccgtggtgtacttcgccatcatcacatgctgcctgctgcggagaaccgccttctgctgcaacggcgagaagtctagggccaagcgatctggatctggagcaacaaacttctcactactcaaacaagcaggtgacgtggaggagaatcccgggcctactagtatggactggatttggcgcatccttttccttgtcggcgctgctaccggcgcgcattccttcgaacagattcagctggtgcagtctggccccgagctgaagaaacctggcgagacagtgaagatcagctgcaaggccagcggctacatcttcaccaattacggcatgaactgggtcaagcaggcccctggcaagagcttcaagtggatgggctggatcaacacctacaccggcgagagcacatacagcgccgacttcaagggcagattcgccttcagcctggaaaccagcgccagcacagcctacctgcacatcaacgacctgaagaacgaggacaccgccacctacttttgcgccagaagcggcggctacgaccctatggattattggggccagggcaccagcgtgaccgtttcttctacgcgtgcctctacaaagggaccctccgtgtttcctctggctcccagcagcaagtctacaagcggaggaacagccgctctgggctgcctggtcaaggattactttcccgagcctgtgaccgtgtcctggaatagcggagcactgacaagcggcgtgcacacctttccagccgtgctgcaaagcagcggcctgtactctctgagcagcgtggtcacagtgcctagctctagcctgggcacccagacctacatctgcaatgtgaaccacaagcctagcaacaccaaggtggacaagagagtggaacccaagagctgtgaagtgaaaaccgactccaccgaccacgtgaagcccaaagagacagagaacaccaagcagcccagcaagagctgccacaagcccaaggccatcgtgcacaccgagaaagtgaacatgatgagcctgaccgtgctgggcctgcggatgctgttcgccaaaaccgtggccgtgaacttcctgctgaccgccaagctgttcttcctc

SEQ ID NO: 2939 - DNA, 2343 bp, Artificial Sequence
  Synthetic Polynucloetide
atggccttaccagtgaccgccttgctcctgccgctggccttgctgctccacgccgccaggccggaagtgcagctggttgaatctggcggaggactggttcagcctggcggatctctgagactgtcttgtgccgccagcggcttcagcttcagcgacttttggatgagctgggtccgacaggcccctggcaaaggacttgaatgggtcgccacaatcagccaggccggcagcgagaaggactacgtggactctgtgaagggcagattcaccatcagccgggacaacgccaagaagtccctgtacctccagatgaacagcctgagagccgaggacaccgccgtgtactattgtgcctctggcgtgtacagcttcgactacagaggccagggcaccctggtcacagtctcttctggtaccggcggaggcggatctggcggcggaggtagcggtggcggaggatctgaattcgagatcgtgctgacacagagccctggcaccctgagcctgtctccaggcgaaagagccacactgagctgtcgggccagccagagcgtgtccaatacctacctggcctggtatcaccagaggcccggacaggctccccggctgctgatctatggcgcttctagcagagccaccggcatccccgatagattcagcggctctggcagcggcaccgacttcgccctgacaatcagctccctggaacccgaggacttcgccgtgtactactgccagcagtacagcaactcctggaccttcggccagggcaccaaggtggaaatcaagagactcgagggacagcctaaggccaatcctaccgtgacactgttccctccaagcagcgaagaactccaggccaacaaggccacacttgtgtgcctgatctccgacttctaccctggggctgtgacagtggcttggaaggccgatggatctcctgtgaaagccggcgtggaaaccaccaagccatccaagcagagcaacaacaaatacgccgccagctcctacctgagcctgacacctgagcagtggaagtcccacagatcctacagctgccaagtgacccacgaaggcagcaccgtggaaaagacagtggcccctacagagtgcagccccatcaagaccgatgtgattacaatggaccccaaggacaactgctccaaggacgccaacgataccctgctgctccagctgaccaacaccagcgcctactacatgtacttgttgctgctgctgaagtccgtggtgtacttcgccatcatcacatgctgcctgctgcggagaaccgccttctgctgcaacggcgagaagtctagggccaagcgatctggatctggagcaacaaacttctcactactcaaacaagcaggtgacgtggaggagaatcccgggcctactagtatggactggatttggcgcatccttttccttgtcggcgctgctaccggcgcgcattccttcgaacaggtgcaactggtggaatctggcgggggagtggtgcagcctggcagaagcctgagactgtcttgtgccgccagcggcttcaccttcagcagctacgacatgcactgggtgcgccaggcccctggcaaaggactggaatgggtggccgtgatctcctacgacggcaccaacgagtattacgccgacagcgtgaagggccggttcaccatctccagagacaccagcaagaacaccctgtacctccagatgaacagcctgcgggccgaggacacagccgtgtattattgcgccagagagcggtacttcgactggtccttcgactactggggccagggaaccctggtgtccgtgtctagtacgcgtgcctctacaaagggaccctccgtgtttcctctggctcccagcagcaagtctacaagcggaggaacagccgctctgggctgcctggtcaaggattactttcccgagcctgtgaccgtgtcctggaatagcggagcactgacaagcggcgtgcacacctttccagccgtgctgcaaagcagcggcctgtactctctgagcagcgtggtcacagtgcctagctctagcctgggcacccagacctacatctgcaatgtgaaccacaagcctagcaacaccaaggtggacaagagagtggaacccaagagctgtgaagtgaaaaccgactccaccgaccacgtgaagcccaaagagacagagaacaccaagcagcccagcaagagctgccacaagcccaaggccatcgtgcacaccgagaaagtgaacatgatgagcctgaccgtgctgggcctgcggatgctgttcgccaaaaccgtggccgtgaacttcctgctgaccgccaagctgttcttcctc

SEQ ID NO: 2940 - DNA, 2340 bp, Artificial Sequence
  Synthetic Polynucloetide
atggccttaccagtgaccgccttgctcctgccgctggccttgctgctccacgccgccaggccggaagtgcagctggttgaatctggcggaggactggttcagcctggcggatctctgagactgtcttgtgccgccagcggcttcagcttcagcgacttttggatgagctgggtccgacaggcccctggcaaaggacttgaatgggtcgccacaatcagccaggccggcagcgagaaggactacgtggactctgtgaagggcagattcaccatcagccgggacaacgccaagaagtccctgtacctccagatgaacagcctgagagccgaggacaccgccgtgtactattgtgcctctggcgtgtacagcttcgactacagaggccagggcaccctggtcacagtctcttctggtaccggcggaggcggatctggcggcggaggtagcggtggcggaggatctgaattcgagctgacacaggaccctgctgtgtctgttgccctgggccagacagtgcggattacctgtcaaggcgacagcctgagaagcaactacgccaactggtatcagcagaagcccggacaggctcccgtgctggttatctacggccagaacaacagacccagcggcatccccgatagattcagcggctctagctctggcaataccgccagcctgacaatcactggcgctcaggctgccgatgaggccgactactactgcgatagcagagtgtccaccggcaatcacgtggtgtttggcggcggaacaaagctgacagtgctcggacaactcgagggacagcctaaggccaatcctaccgtgacactgttccctccaagcagcgaagaactccaggccaacaaggccacacttgtgtgcctgatctccgacttctaccctggggctgtgacagtggcttggaaggccgatggatctcctgtgaaagccggcgtggaaaccaccaagccatccaagcagagcaacaacaaatacgccgccagctcctacctgagcctgacacctgagcagtggaagtcccacagatcctacagctgccaagtgacccacgaaggcagcaccgtggaaaagacagtggcccctacagagtgcagccccatcaagaccgatgtgattacaatggaccccaaggacaactgctccaaggacgccaacgataccctgctgctccagctgaccaacaccagcgcctactacatgtacttgttgctgctgctgaagtccgtggtgtacttcgccatcatcacatgctgcctgctgcggagaaccgccttctgctgcaacggcgagaagtctagggccaagcgatctggatctggagcaacaaacttctcactactcaaacaagcaggtgacgtggaggagaatcccgggcctactagtatggactggatttggcgcatccttttccttgtcggcgctgctaccggcgcgcattccttcgaagaagttcagctggtgcagagcggagccgaagtgaagaaacctggggcctctgtgaaggtgtcctgcaaggcttccggctacacctttaccagctacgccatgcactgggtccgacaggcacctggacaacggcttgaatggatgggctggatcaacgccggcaacggcaacaccaagtacagccagaaattccagggccgcgtgaccatcaccagagatacaagcgccagcaccgcctacatggaactgtctagcctgagatccgaggacaccgccgtgtactactgtgccagagacatcagctacggcagcttcgactattggggccagggcacactggtcaccgttagctctacgcgtgcctctacaaagggaccctccgtgtttcctctggctcccagcagcaagtctacaagcggaggaacagccgctctgggctgcctggtcaaggattactttcccgagcctgtgaccgtgtcctggaatagcggagcactgacaagcggcgtgcacacctttccagccgtgctgcaaagcagcggcctgtactctctgagcagcgtggtcacagtgcctagctctagcctgggcacccagacctacatctgcaatgtgaaccacaagcctagcaacaccaaggtggacaagagagtggaacccaagagctgtgaagtgaaaaccgactccaccgaccacgtgaagcccaaagagacagagaacaccaagcagcccagcaagagctgccacaagcccaaggccatcgtgcacaccgagaaagtgaacatgatgagcctgaccgtgctgggcctgcggatgctgttcgccaaaaccgtggccgtgaacttcctgctgaccgccaagctgttcttcctc

SEQ ID NO: 2941 - DNA, 2346 bp, Artificial Sequence
  Synthetic Polynucloetide
atggccttaccagtgaccgccttgctcctgccgctggccttgctgctccacgccgccaggccggaagtgcagctggttgaatctggcggaggactggttcagcctggcggatctctgagactgtcttgtgccgccagcggcttcagcttcagcgacttttggatgagctgggtccgacaggcccctggcaaaggacttgaatgggtcgccacaatcagccaggccggcagcgagaaggactacgtggactctgtgaagggcagattcaccatcagccgggacaacgccaagaagtccctgtacctccagatgaacagcctgagagccgaggacaccgccgtgtactattgtgcctctggcgtgtacagcttcgactacagaggccagggcaccctggtcacagtctcttctggtaccggcggaggcggatctggcggcggaggtagcggtggcggaggatctgaattcgacatcgtgctgacacagacaccagccacactgagcgtgacacctggcgattctgtgtccctgagctgtagagccagccagagcatcagcaacaacctgcactggtatcagcagaagtcccacgagagccccagactgctgattaagaacgccagccagtctatcagcggcatccccagcaagtttagcggctctggcagcggcaccgacttcaccctgagaatcaacagcgtggaaaccgaggacttcgggatgtacttctgccagcagagcaatagctggccctacacatttggctccggcaccaagctggaaatcaaactcgagggacagcctaaggccaatcctaccgtgacactgttccctccaagcagcgaagaactccaggccaacaaggccacacttgtgtgcctgatctccgacttctaccctggggctgtgacagtggcttggaaggccgatggatctcctgtgaaagccggcgtggaaaccaccaagccatccaagcagagcaacaacaaatacgccgccagctcctacctgagcctgacacctgagcagtggaagtcccacagatcctacagctgccaagtgacccacgaaggcagcaccgtggaaaagacagtggcccctacagagtgcagccccatcaagaccgatgtgattacaatggaccccaaggacaactgctccaaggacgccaacgataccctgctgctccagctgaccaacaccagcgcctactacatgtacttgttgctgctgctgaagtccgtggtgtacttcgccatcatcacatgctgcctgctgcggagaaccgccttctgctgcaacggcgagaagtctagggccaagcgatctggatctggagcaacaaacttctcactactcaaacaagcaggtgacgtggaggagaatcccgggcctactagtatggactggatttggcgcatccttttccttgtcggcgctgctaccggcgcgcattccttcgaacaagtgaagctgcaacagagcggacccgagctggttaagccaggcgcttccgtgaagattagctgcaaggccagcggctacagcttcaccggctactacatgcactgggtcaagcagagccacggcaacatcctggactggatcggctacatctacccctacaacggcgtgtccagctacaaccagaagttcaagggcaaagccactctgaccgtggacaagagcagcagcaccgcctacatggaactgagaagcctgaccagcgaggacagcgccgtgtactattgtgccagagagcggggcctgtaccagctcagagcaatggattattggggccagggcaccagcgtgaccgtttcttctacgcgtgcctctacaaagggaccctccgtgtttcctctggctcccagcagcaagtctacaagcggaggaacagccgctctgggctgcctggtcaaggattactttcccgagcctgtgaccgtgtcctggaatagcggagcactgacaagcggcgtgcacacctttccagccgtgctgcaaagcagcggcctgtactctctgagcagcgtggtcacagtgcctagctctagcctgggcacccagacctacatctgcaatgtgaaccacaagcctagcaacaccaaggtggacaagagagtggaacccaagagctgtgaagtgaaaaccgactccaccgaccacgtgaagcccaaagagacagagaacaccaagcagcccagcaagagctgccacaagcccaaggccatcgtgcacaccgagaaagtgaacatgatgagcctgaccgtgctgggcctgcggatgctgttcgccaaaaccgtggccgtgaacttcctgctgaccgccaagctgttcttcctc

SEQ ID NO: 2942 - DNA, 2319 bp, Artificial Sequence
  Synthetic Polynucloetide
atggccttaccagtgaccgccttgctcctgccgctggccttgctgctccacgccgccaggccggaagtgcagctggttgaatctggcggaggactggttcagcctggcggatctctgagactgtcttgtgccgccagcggcttcagcttcagcgacttttggatgagctgggtccgacaggcccctggcaaaggacttgaatgggtcgccacaatcagccaggccggcagcgagaaggactacgtggactctgtgaagggcagattcaccatcagccgggacaacgccaagaagtccctgtacctccagatgaacagcctgagagccgaggacaccgccgtgtactattgtgcctctggcgtgtacagcttcgactacagaggccagggcaccctggtcacagtctcttctggtaccggcggaggcggatctggcggcggaggtagcggtggcggaggatctgaattcgacatcgtgatgacacagacccctgccatcatgagcgcctctccaggccagaaagtgaccatcacatgtagcgccagcagcagcgtgaactacatgcactggtatcagcagaagctgggcagcagccccaagctgtggatctacgataccagcaaactggcccctggcgtgccagccagattttctggttctggcagcggcaccagctacagcctgacaatcagcagcatggaagccgaggatgccgccagctacttctgccatcagtggtctagctacccctacacctttggctccggcaccaagctggaaatcaaactcgagggacagcctaaggccaatcctaccgtgacactgttccctccaagcagcgaagaactccaggccaacaaggccacacttgtgtgcctgatctccgacttctaccctggggctgtgacagtggcttggaaggccgatggatctcctgtgaaagccggcgtggaaaccaccaagccatccaagcagagcaacaacaaatacgccgccagctcctacctgagcctgacacctgagcagtggaagtcccacagatcctacagctgccaagtgacccacgaaggcagcaccgtggaaaagacagtggcccctacagagtgcagccccatcaagaccgatgtgattacaatggaccccaaggacaactgctccaaggacgccaacgataccctgctgctccagctgaccaacaccagcgcctactacatgtacttgttgctgctgctgaagtccgtggtgtacttcgccatcatcacatgctgcctgctgcggagaaccgccttctgctgcaacggcgagaagtctagggccaagcgatctggatctggagcaacaaacttctcactactcaaacaagcaggtgacgtggaggagaatcccgggcctactagtatggactggatttggcgcatccttttccttgtcggcgctgctaccggcgcgcattccttcgaagaagttcagctccaagagtctggccccgacctggtcaagcctagccaaagcctgagcctgacctgtaccgtgaccggctacagcatcacaagcggctatggatggcactggatcagacagttccccggcaacaaactggaatggatgggctacatccactacagcggcagcaccacctacaatcccagcctgaagtcccggatcagcatcagcagagacaccagcaagaaccagttcttcctgcaactgaacagcgtgaccaccgaggacaccgccacctactattgtgctcggagcctgagatattggggccagggcacaaccctgaccgtgtcatctacgcgtgcctctacaaagggaccctccgtgtttcctctggctcccagcagcaagtctacaagcggaggaacagccgctctgggctgcctggtcaaggattactttcccgagcctgtgaccgtgtcctggaatagcggagcactgacaagcggcgtgcacacctttccagccgtgctgcaaagcagcggcctgtactctctgagcagcgtggtcacagtgcctagctctagcctgggcacccagacctacatctgcaatgtgaaccacaagcctagcaacaccaaggtggacaagagagtggaacccaagagctgtgaagtgaaaaccgactccaccgaccacgtgaagcccaaagagacagagaacaccaagcagcccagcaagagctgccacaagcccaaggccatcgtgcacaccgagaaagtgaacatgatgagcctgaccgtgctgggcctgcggatgctgttcgccaaaaccgtggccgtgaacttcctgctgaccgccaagctgttcttcctc

SEQ ID NO: 2943 - DNA, 2328 bp, Artificial Sequence
  Synthetic Polynucloetide
atggccttaccagtgaccgccttgctcctgccgctggccttgctgctccacgccgccaggccggaagtgcagctggttgaatctggcggaggactggttcagcctggcggatctctgagactgtcttgtgccgccagcggcttcagcttcagcgacttttggatgagctgggtccgacaggcccctggcaaaggacttgaatgggtcgccacaatcagccaggccggcagcgagaaggactacgtggactctgtgaagggcagattcaccatcagccgggacaacgccaagaagtccctgtacctccagatgaacagcctgagagccgaggacaccgccgtgtactattgtgcctctggcgtgtacagcttcgactacagaggccagggcaccctggtcacagtctcttctggtaccggcggaggcggatctggcggcggaggtagcggtggcggaggatctgaattcgacatccagatgacacagagccctagcagcctgtctgccagcgtgggagacagagtgaccatcacctgtagcgccaccagcagcatcagctacatgcactggtatcagcagaagcccggcaaggcccctaaaggctggatctacgataccagcaaactggcccacggcgtgcccagcagattttctggttctggcagcggcaccgacttcaccctgacaatatctagcctccagcctgaggacttcgccacctactactgccaccagagaagaagctaccccttcaccttcggccagggcaccaaggtggaaatcaaactcgagggacagcctaaggccaatcctaccgtgacactgttccctccaagcagcgaagaactccaggccaacaaggccacacttgtgtgcctgatctccgacttctaccctggggctgtgacagtggcttggaaggccgatggatctcctgtgaaagccggcgtggaaaccaccaagccatccaagcagagcaacaacaaatacgccgccagctcctacctgagcctgacacctgagcagtggaagtcccacagatcctacagctgccaagtgacccacgaaggcagcaccgtggaaaagacagtggcccctacagagtgcagccccatcaagaccgatgtgattacaatggaccccaaggacaactgctccaaggacgccaacgataccctgctgctccagctgaccaacaccagcgcctactacatgtacttgttgctgctgctgaagtccgtggtgtacttcgccatcatcacatgctgcctgctgcggagaaccgccttctgctgcaacggcgagaagtctagggccaagcgatctggatctggagcaacaaacttctcactactcaaacaagcaggtgacgtggaggagaatcccgggcctactagtatggactggatttggcgcatccttttccttgtcggcgctgctaccggcgcgcattccttcgaagaagtgcaactggttcagagcggagccgaagtgaagaaacctggggcctctgtgaaggtgtcctgcaaggcttccggctacacctttaccaatttctggattcactgggtccgacaggctccaggccaaggactggaatggatcggagagatcgaccccagcgacagctacaccaactacaaccagaaattcaaaggccgggtcaccatcaccagagacaccagcacaagcaccgcctacctggaactgagcagcctgagaagcgaggacaccgccgtgtactactgcgccagggaaatcaccaccgtggattattggggccagggaaccctggtcaccgtgtcatctacgcgtgcctctacaaagggaccctccgtgtttcctctggctcccagcagcaagtctacaagcggaggaacagccgctctgggctgcctggtcaaggattactttcccgagcctgtgaccgtgtcctggaatagcggagcactgacaagcggcgtgcacacctttccagccgtgctgcaaagcagcggcctgtactctctgagcagcgtggtcacagtgcctagctctagcctgggcacccagacctacatctgcaatgtgaaccacaagcctagcaacaccaaggtggacaagagagtggaacccaagagctgtgaagtgaaaaccgactccaccgaccacgtgaagcccaaagagacagagaacaccaagcagcccagcaagagctgccacaagcccaaggccatcgtgcacaccgagaaagtgaacatgatgagcctgaccgtgctgggcctgcggatgctgttcgccaaaaccgtggccgtgaacttcctgctgaccgccaagctgttcttcctc

SEQ ID NO: 2944 - DNA, 2349 bp, Artificial Sequence
  Synthetic Polynucloetide
atggccttaccagtgaccgccttgctcctgccgctggccttgctgctccacgccgccaggccggaagtgcagctggttgaatctggcggaggactggttcagcctggcggatctctgagactgtcttgtgccgccagcggcttcagcttcagcgacttttggatgagctgggtccgacaggcccctggcaaaggacttgaatgggtcgccacaatcagccaggccggcagcgagaaggactacgtggactctgtgaagggcagattcaccatcagccgggacaacgccaagaagtccctgtacctccagatgaacagcctgagagccgaggacaccgccgtgtactattgtgcctctggcgtgtacagcttcgactacagaggccagggcaccctggtcacagtctcttctggtaccggcggaggcggatctggcggcggaggtagcggtggcggaggatctgaattcgacatccagatgacacagagccctagcagcctgtctgccagcgtgggagacagagtgaccatcacatgcaaggccagccagggcttcaacaaatacgtggcctggtatcagcagaagcccggcaaggctcctaagctgctgatctactacaccagcacactccagcctggcgtgcccagcagattttctggctctggcagcggcagagactacaccctgacaatatccagcctccagccagaggacttcgccacctactactgtctccagtacggcaacctgctgtacgcctttggacagggcaccaaggtggaaatcaagagactcgagggacagcctaaggccaatcctaccgtgacactgttccctccaagcagcgaagaactccaggccaacaaggccacacttgtgtgcctgatctccgacttctaccctggggctgtgacagtggcttggaaggccgatggatctcctgtgaaagccggcgtggaaaccaccaagccatccaagcagagcaacaacaaatacgccgccagctcctacctgagcctgacacctgagcagtggaagtcccacagatcctacagctgccaagtgacccacgaaggcagcaccgtggaaaagacagtggcccctacagagtgcagccccatcaagaccgatgtgattacaatggaccccaaggacaactgctccaaggacgccaacgataccctgctgctccagctgaccaacaccagcgcctactacatgtacttgttgctgctgctgaagtccgtggtgtacttcgccatcatcacatgctgcctgctgcggagaaccgccttctgctgcaacggcgagaagtctagggccaagcgatctggatctggagcaacaaacttctcactactcaaacaagcaggtgacgtggaggagaatcccgggcctactagtatggactggatttggcgcatccttttccttgtcggcgctgctaccggcgcgcattccttcgaagaagttcagcttgtgcagagcggagccgaagtgaagaaacctggggcctctgtgaaggtgtcctgcaaagccagcggctacacctttaccagctactggatcggctgggtccgacaggctcctggacaaggactggaatggatcggcgacatctatcccggcggaggctacaccaactacaacgagaagttcaagggccgcgtgacaatcaccagagacacctctacaagcaccgcctacctggaactgagcagcctgagaagcgaggacaccgccgtgtactactgcgccagactggatggcagcagctacagaggcgctatggattcttggggccagggcacactggtcaccgtttcttctacgcgtgcctctacaaagggaccctccgtgtttcctctggctcccagcagcaagtctacaagcggaggaacagccgctctgggctgcctggtcaaggattactttcccgagcctgtgaccgtgtcctggaatagcggagcactgacaagcggcgtgcacacctttccagccgtgctgcaaagcagcggcctgtactctctgagcagcgtggtcacagtgcctagctctagcctgggcacccagacctacatctgcaatgtgaaccacaagcctagcaacaccaaggtggacaagagagtggaacccaagagctgtgaagtgaaaaccgactccaccgaccacgtgaagcccaaagagacagagaacaccaagcagcccagcaagagctgccacaagcccaaggccatcgtgcacaccgagaaagtgaacatgatgagcctgaccgtgctgggcctgcggatgctgttcgccaaaaccgtggccgtgaacttcctgctgaccgccaagctgttcttcctc

SEQ ID NO: 2945 - DNA, 2337 bp, Artificial Sequence
  Synthetic Polynucloetide
atggccttaccagtgaccgccttgctcctgccgctggccttgctgctccacgccgccaggccggaagtgcagctggttgaatctggcggaggactggttcagcctggcggatctctgagactgtcttgtgccgccagcggcttcagcttcagcgacttttggatgagctgggtccgacaggcccctggcaaaggacttgaatgggtcgccacaatcagccaggccggcagcgagaaggactacgtggactctgtgaagggcagattcaccatcagccgggacaacgccaagaagtccctgtacctccagatgaacagcctgagagccgaggacaccgccgtgtactattgtgcctctggcgtgtacagcttcgactacagaggccagggcaccctggtcacagtctcttctggtaccggcggaggcggatctggcggcggaggtagcggtggcggaggatctgaattcgacatccagatgacacagagccctagcagcctgtctgccagcgtgggagacagagtgaccatcacctgtagagccagccaggacatccggtactacctgaactggtatcagcagaagcccggcaaggcccctaagctgctgatctatgtggcctccagcctccagagcggagtgccttctagattttctggcagcggctccggcaccgagtttaccctgacagtgtctagcttgcagcccgaggacttcgccacctactactgcctgcaagtgtacagcacccctcggacctttggacagggcaccaaggtggaaatcaaactcgagggacagcctaaggccaatcctaccgtgacactgttccctccaagcagcgaagaactccaggccaacaaggccacacttgtgtgcctgatctccgacttctaccctggggctgtgacagtggcttggaaggccgatggatctcctgtgaaagccggcgtggaaaccaccaagccatccaagcagagcaacaacaaatacgccgccagctcctacctgagcctgacacctgagcagtggaagtcccacagatcctacagctgccaagtgacccacgaaggcagcaccgtggaaaagacagtggcccctacagagtgcagccccatcaagaccgatgtgattacaatggaccccaaggacaactgctccaaggacgccaacgataccctgctgctccagctgaccaacaccagcgcctactacatgtacttgttgctgctgctgaagtccgtggtgtacttcgccatcatcacatgctgcctgctgcggagaaccgccttctgctgcaacggcgagaagtctagggccaagcgatctggatctggagcaacaaacttctcactactcaaacaagcaggtgacgtggaggagaatcccgggcctactagtatggactggatttggcgcatccttttccttgtcggcgctgctaccggcgcgcattccttcgaagaagtgcagcttgttgaatctggcggcggactggctaagcctggcggatctctgagactgtcttgtgccgccagcggcttccggttcaccttcaacaactactacatggactgggtccgacaggcccctggacaaggacttgaatgggtgtccagaatcagcagcagcggcgaccctacttggtacgccgattctgtgaagggcagattcaccatcagcagagagaacgccaagaacaccctgttcctccagatgaactccctgagagccgaggacaccgccgtgtactattgtgcctctctgaccaccggcagcgattcttggggacagggcgtgctggttaccgtgtcatctacgcgtgcctctacaaagggaccctccgtgtttcctctggctcccagcagcaagtctacaagcggaggaacagccgctctgggctgcctggtcaaggattactttcccgagcctgtgaccgtgtcctggaatagcggagcactgacaagcggcgtgcacacctttccagccgtgctgcaaagcagcggcctgtactctctgagcagcgtggtcacagtgcctagctctagcctgggcacccagacctacatctgcaatgtgaaccacaagcctagcaacaccaaggtggacaagagagtggaacccaagagctgtgaagtgaaaaccgactccaccgaccacgtgaagcccaaagagacagagaacaccaagcagcccagcaagagctgccacaagcccaaggccatcgtgcacaccgagaaagtgaacatgatgagcctgaccgtgctgggcctgcggatgctgttcgccaaaaccgtggccgtgaacttcctgctgaccgccaagctgttcttcctc

SEQ ID NO: 2946 - DNA, 2340 bp, Artificial Sequence
  Synthetic Polynucloetide
atggccttaccagtgaccgccttgctcctgccgctggccttgctgctccacgccgccaggccggaagtgcagctggttgaatctggcggaggactggttcagcctggcggatctctgagactgtcttgtgccgccagcggcttcagcttcagcgacttttggatgagctgggtccgacaggcccctggcaaaggacttgaatgggtcgccacaatcagccaggccggcagcgagaaggactacgtggactctgtgaagggcagattcaccatcagccgggacaacgccaagaagtccctgtacctccagatgaacagcctgagagccgaggacaccgccgtgtactattgtgcctctggcgtgtacagcttcgactacagaggccagggcaccctggtcacagtctcttctggtaccggcggaggcggatctggcggcggaggtagcggtggcggaggatctgaattcgagatcgtgatgacacagagccccgccacactgagtgtgtctccaggcgaaagagccacactgtcctgtagagccagccagagcgtgtccagaaacctggcctggtatcagcagaagcctggacaggctccccggctgttgatctacggcgcttctacaagagccaccggcattcccgccagattttctggctctggcagcggcaccgagttcaccctgacaatcggaagcctccagagcgaggacttcgccgtgtactactgccagcagtacaagacctggcctcggacctttggacagggcaccaacgtggaaatcaaactcgagggacagcctaaggccaatcctaccgtgacactgttccctccaagcagcgaagaactccaggccaacaaggccacacttgtgtgcctgatctccgacttctaccctggggctgtgacagtggcttggaaggccgatggatctcctgtgaaagccggcgtggaaaccaccaagccatccaagcagagcaacaacaaatacgccgccagctcctacctgagcctgacacctgagcagtggaagtcccacagatcctacagctgccaagtgacccacgaaggcagcaccgtggaaaagacagtggcccctacagagtgcagccccatcaagaccgatgtgattacaatggaccccaaggacaactgctccaaggacgccaacgataccctgctgctccagctgaccaacaccagcgcctactacatgtacttgttgctgctgctgaagtccgtggtgtacttcgccatcatcacatgctgcctgctgcggagaaccgccttctgctgcaacggcgagaagtctagggccaagcgatctggatctggagcaacaaacttctcactactcaaacaagcaggtgacgtggaggagaatcccgggcctactagtatggactggatttggcgcatccttttccttgtcggcgctgctaccggcgcgcattccttcgaacaagttcagctgcaacaatggggagccggcctgctgaagcctagcgaaacactgtctctgacctgcgccgtgttcggcggctctttcagcggctactactggtcctggatcagacagcctcctggcaaaggactggaatggatcggcgagatcaaccaccggggcaacaccaacgacaaccccagcctgaaaagcagagtgaccatcagcgtggacaccagcaagaaccagttcgccctgaagctgagcagcgtgacagccgctgataccgccgtgtattattgcgccagagagcggggctacacctacggcaatttcgatcactggggccagggcaccctggtcacagtttcttctacgcgtgcctctacaaagggaccctccgtgtttcctctggctcccagcagcaagtctacaagcggaggaacagccgctctgggctgcctggtcaaggattactttcccgagcctgtgaccgtgtcctggaatagcggagcactgacaagcggcgtgcacacctttccagccgtgctgcaaagcagcggcctgtactctctgagcagcgtggtcacagtgcctagctctagcctgggcacccagacctacatctgcaatgtgaaccacaagcctagcaacaccaaggtggacaagagagtggaacccaagagctgtgaagtgaaaaccgactccaccgaccacgtgaagcccaaagagacagagaacaccaagcagcccagcaagagctgccacaagcccaaggccatcgtgcacaccgagaaagtgaacatgatgagcctgaccgtgctgggcctgcggatgctgttcgccaaaaccgtggccgtgaacttcctgctgaccgccaagctgttcttcctc

SEQ ID NO: 2947 - DNA, 2343 bp, Artificial Sequence
  Synthetic Polynucloetide
atggccttaccagtgaccgccttgctcctgccgctggccttgctgctccacgccgccaggccggaagtgcagctggttgaatctggcggaggactggttcagcctggcggatctctgagactgtcttgtgccgccagcggcttcagcttcagcgacttttggatgagctgggtccgacaggcccctggcaaaggacttgaatgggtcgccacaatcagccaggccggcagcgagaaggactacgtggactctgtgaagggcagattcaccatcagccgggacaacgccaagaagtccctgtacctccagatgaacagcctgagagccgaggacaccgccgtgtactattgtgcctctggcgtgtacagcttcgactacagaggccagggcaccctggtcacagtctcttctggtaccggcggaggcggatctggcggcggaggtagcggtggcggaggatctgaattcgagatcgtgatgacccctagcagcgccacactgagtgtgtctccaggcgaaagagccacactgtcctgtagagccagccagagcgtgtccagaaacctggcctggtatcagcagaagcctggacaggctccccggctgttgatctacggcgcttctacaagagccaccggcattcccgccagattttctggctctggcagcggcaccgagttcaccctgacaatctctagcctccagagcgaggacttcgccgtgtactactgccaccagtacagcaactggatgtgcagcttcggccagggcaccaagctggaaatcaaactcgagggacagcctaaggccaatcctaccgtgacactgttccctccaagcagcgaagaactccaggccaacaaggccacacttgtgtgcctgatctccgacttctaccctggggctgtgacagtggcttggaaggccgatggatctcctgtgaaagccggcgtggaaaccaccaagccatccaagcagagcaacaacaaatacgccgccagctcctacctgagcctgacacctgagcagtggaagtcccacagatcctacagctgccaagtgacccacgaaggcagcaccgtggaaaagacagtggcccctacagagtgcagccccatcaagaccgatgtgattacaatggaccccaaggacaactgctccaaggacgccaacgataccctgctgctccagctgaccaacaccagcgcctactacatgtacttgttgctgctgctgaagtccgtggtgtacttcgccatcatcacatgctgcctgctgcggagaaccgccttctgctgcaacggcgagaagtctagggccaagcgatctggatctggagcaacaaacttctcactactcaaacaagcaggtgacgtggaggagaatcccgggcctactagtatggactggatttggcgcatccttttccttgtcggcgctgctaccggcgcgcattccttcgaagaagttcagctccttgagtcaggtggcggcctggttcaacctggcggatctctgagactgagctgtgccgccagcggcttcacctttagcagatacgccatgaactgggtccgacaggcccctggcaaaggactggaatgggtgtccggcatctctggaagcggcggcagaacctactacgccgattctgtgaagggcagattcaccatcagccgggacaacagcaagaacaccctgtacctccagatgaacagcctgagagccgaggacacagccgtgtattattgcgccaaggaccgggacttttggagcggcccttttgactattggggccagggaaccctggtcaccgttagctctacgcgtgcctctacaaagggaccctccgtgtttcctctggctcccagcagcaagtctacaagcggaggaacagccgctctgggctgcctggtcaaggattactttcccgagcctgtgaccgtgtcctggaatagcggagcactgacaagcggcgtgcacacctttccagccgtgctgcaaagcagcggcctgtactctctgagcagcgtggtcacagtgcctagctctagcctgggcacccagacctacatctgcaatgtgaaccacaagcctagcaacaccaaggtggacaagagagtggaacccaagagctgtgaagtgaaaaccgactccaccgaccacgtgaagcccaaagagacagagaacaccaagcagcccagcaagagctgccacaagcccaaggccatcgtgcacaccgagaaagtgaacatgatgagcctgaccgtgctgggcctgcggatgctgttcgccaaaaccgtggccgtgaacttcctgctgaccgccaagctgttcttcctc

SEQ ID NO: 2948 - DNA, 2358 bp, Artificial Sequence
  Synthetic Polynucloetide
atggccttaccagtgaccgccttgctcctgccgctggccttgctgctccacgccgccaggccggaagtgcagctggttgaatctggcggaggactggttcagcctggcggatctctgagactgtcttgtgccgccagcggcttcagcttcagcgacttttggatgagctgggtccgacaggcccctggcaaaggacttgaatgggtcgccacaatcagccaggccggcagcgagaaggactacgtggactctgtgaagggcagattcaccatcagccgggacaacgccaagaagtccctgtacctccagatgaacagcctgagagccgaggacaccgccgtgtactattgtgcctctggcgtgtacagcttcgactacagaggccagggcaccctggtcacagtctcttctggtaccggcggaggcggatctggcggcggaggtagcggtggcggaggatctgaattcgacatccagatgacccagagccccagcagcctgtctgccagcgtgggcgacagagtgaccatcacatgcaaggccagcaagaacatcagaagctacctggcctggtatcagcagaagcccggcaaggcccccaagctgctgatctacagcggcagcacactgcacagcggcgtgcccagcagattttccggctctggcagcggcaccgacttcaccctgaccatctctagcctccagcccgaggacttcgccacctactactgccagcagcaccacgagtaccccctgacattcggccagggcaccaaggtggaaatcaagagactcgagggacagcctaaggccaatcctaccgtgacactgttccctccaagcagcgaagaactccaggccaacaaggccacacttgtgtgcctgatctccgacttctaccctggggctgtgacagtggcttggaaggccgatggatctcctgtgaaagccggcgtggaaaccaccaagccatccaagcagagcaacaacaaatacgccgccagctcctacctgagcctgacacctgagcagtggaagtcccacagatcctacagctgccaagtgacccacgaaggcagcaccgtggaaaagacagtggcccctacagagtgcagccccatcaagaccgatgtgattacaatggaccccaaggacaactgctccaaggacgccaacgataccctgctgctccagctgaccaacaccagcgcctactacatgtacttgttgctgctgctgaagtccgtggtgtacttcgccatcatcacatgctgcctgctgcggagaaccgccttctgctgcaacggcgagaagtctagggccaagcgatctggatctggagcaacaaacttctcactactcaaacaagcaggtgacgtggaggagaatcccgggcctactagtatggactggatttggcgcatccttttccttgtcggcgctgctaccggcgcgcattccttcgaacaggtgcaactccaggaatctggccccggactcgtgaagcccagcgagacactgagcctgacctgtaccgtgtccggctacaccatcaccagcggctacgactggtcctggatcagacagcctcctggcaagggcctggaatggatcggctacatcaactacggcggctccaccaactacaagcccagcctgggaagccgcgtgacaatcagcgtggacacctccaagaaccagttcagcctgaagctgagcagcgtgacagccgccgataccgccgtgtactactgcgcccggtacaacgagtacaagagctacatctacgattggtacttcgacttctggggccagggaaccctcgtgaccgtgtctagtacgcgtgcctctacaaagggaccctccgtgtttcctctggctcccagcagcaagtctacaagcggaggaacagccgctctgggctgcctggtcaaggattactttcccgagcctgtgaccgtgtcctggaatagcggagcactgacaagcggcgtgcacacctttccagccgtgctgcaaagcagcggcctgtactctctgagcagcgtggtcacagtgcctagctctagcctgggcacccagacctacatctgcaatgtgaaccacaagcctagcaacaccaaggtggacaagagagtggaacccaagagctgtgaagtgaaaaccgactccaccgaccacgtgaagcccaaagagacagagaacaccaagcagcccagcaagagctgccacaagcccaaggccatcgtgcacaccgagaaagtgaacatgatgagcctgaccgtgctgggcctgcggatgctgttcgccaaaaccgtggccgtgaacttcctgctgaccgccaagctgttcttcctc

SEQ ID NO: 2949 - DNA, 2364 bp, Artificial Sequence
  Synthetic Polynucloetide
atggccttaccagtgaccgccttgctcctgccgctggccttgctgctccacgccgccaggccggaagtgcagctggttgaatctggcggaggactggttcagcctggcggatctctgagactgtcttgtgccgccagcggcttcagcttcagcgacttttggatgagctgggtccgacaggcccctggcaaaggacttgaatgggtcgccacaatcagccaggccggcagcgagaaggactacgtggactctgtgaagggcagattcaccatcagccgggacaacgccaagaagtccctgtacctccagatgaacagcctgagagccgaggacaccgccgtgtactattgtgcctctggcgtgtacagcttcgactacagaggccagggcaccctggtcacagtctcttctggtaccggcggaggcggatctggcggcggaggtagcggtggcggaggatctgaattccagtctgtggtcacacagcctccatccgtgtctgctgcccctggacagaaagtgaccatctcctgtagcggcagcagcagcaacatcggcaacaactacgtgtcctggtatcagcagctccccggcacagctcccaaactgctgatctacgacaacaacaagcggcccagcggcatccccgatagattttctggcagcaagagcggcaccagcgccacactgggaattaccggacttcagacaggcgacgaggccgactactactgtggcacatgggatggcagcctgtacaccatgcttttcggcggaggcaccaagctgacagtgcttctcgagggacagcctaaggccaatcctaccgtgacactgttccctccaagcagcgaagaactccaggccaacaaggccacacttgtgtgcctgatctccgacttctaccctggggctgtgacagtggcttggaaggccgatggatctcctgtgaaagccggcgtggaaaccaccaagccatccaagcagagcaacaacaaatacgccgccagctcctacctgagcctgacacctgagcagtggaagtcccacagatcctacagctgccaagtgacccacgaaggcagcaccgtggaaaagacagtggcccctacagagtgcagccccatcaagaccgatgtgattacaatggaccccaaggacaactgctccaaggacgccaacgataccctgctgctccagctgaccaacaccagcgcctactacatgtacttgttgctgctgctgaagtccgtggtgtacttcgccatcatcacatgctgcctgctgcggagaaccgccttctgctgcaacggcgagaagtctagggccaagcgatctggatctggagcaacaaacttctcactactcaaacaagcaggtgacgtggaggagaatcccgggcctactagtatggactggatttggcgcatccttttccttgtcggcgctgctaccggcgcgcattccttcgaagaagtgcaactggtggaatctggcggcggactggttaagcctggcggatctctgagactgtcttgtgccgccagcggcttcaccttcagcaatgcctggatgagctgggttcgacaggcccctggaaaaggactggaatgggtcggattcatccggtccaaagcctacggcggcaccacagaatatgccgcctctgtgaagggcagattcaccatcagccgggacgacagcaagtctatcgcctacctccagatgaacaacctgaaaaccgaggacaccgccgtgtactactgcgccagagatggcctgtacagcagctcttggtacgacagcgattactggggccagggcacactggtcacagtgtcatctacgcgtgcctctacaaagggaccctccgtgtttcctctggctcccagcagcaagtctacaagcggaggaacagccgctctgggctgcctggtcaaggattactttcccgagcctgtgaccgtgtcctggaatagcggagcactgacaagcggcgtgcacacctttccagccgtgctgcaaagcagcggcctgtactctctgagcagcgtggtcacagtgcctagctctagcctgggcacccagacctacatctgcaatgtgaaccacaagcctagcaacaccaaggtggacaagagagtggaacccaagagctgtgaagtgaaaaccgactccaccgaccacgtgaagcccaaagagacagagaacaccaagcagcccagcaagagctgccacaagcccaaggccatcgtgcacaccgagaaagtgaacatgatgagcctgaccgtgctgggcctgcggatgctgttcgccaaaaccgtggccgtgaacttcctgctgaccgccaagctgttcttcctc

SEQ ID NO: 2950 - DNA, 2379 bp, Artificial Sequence
  Synthetic Polynucloetide
atggccttaccagtgaccgccttgctcctgccgctggccttgctgctccacgccgccaggccggaagtgcagctggttgaatctggcggaggactggttcagcctggcggatctctgagactgtcttgtgccgccagcggcttcagcttcagcgacttttggatgagctgggtccgacaggcccctggcaaaggacttgaatgggtcgccacaatcagccaggccggcagcgagaaggactacgtggactctgtgaagggcagattcaccatcagccgggacaacgccaagaagtccctgtacctccagatgaacagcctgagagccgaggacaccgccgtgtactattgtgcctctggcgtgtacagcttcgactacagaggccagggcaccctggtcacagtctcttctggtaccggcggaggcggatctggcggcggaggtagcggtggcggaggatctgaattccagtctgtgctgacacagcctcctagtgtgtctggcgctcctggacagagagtgaccatctcttgtaccggcagcagcagcaatatcggagccggctatgacgtgcactggtatcagcagctccctggcacagcccctaaactgctgatcttcggcaacagcaacagacccagcggcgtgcccgatagattcagcggctttaagagcggcacaagcgccagcctggctatcactggactgcaagccgaggacgaggccgactacttctgccagagctacgatagcagcctgagcggcagcggagtgtttggcacaggcaccaaagtgacagtgcttggcctcgagggacagcctaaggccaatcctaccgtgacactgttccctccaagcagcgaagaactccaggccaacaaggccacacttgtgtgcctgatctccgacttctaccctggggctgtgacagtggcttggaaggccgatggatctcctgtgaaagccggcgtggaaaccaccaagccatccaagcagagcaacaacaaatacgccgccagctcctacctgagcctgacacctgagcagtggaagtcccacagatcctacagctgccaagtgacccacgaaggcagcaccgtggaaaagacagtggcccctacagagtgcagccccatcaagaccgatgtgattacaatggaccccaaggacaactgctccaaggacgccaacgataccctgctgctccagctgaccaacaccagcgcctactacatgtacttgttgctgctgctgaagtccgtggtgtacttcgccatcatcacatgctgcctgctgcggagaaccgccttctgctgcaacggcgagaagtctagggccaagcgatctggatctggagcaacaaacttctcactactcaaacaagcaggtgacgtggaggagaatcccgggcctactagtatggactggatttggcgcatccttttccttgtcggcgctgctaccggcgcgcattccttcgaacaaatgcaactggttcaaagcggcggtggcctggtgcaacctggaagaagtctgagactgagctgtgccgccagcggcttcaccttcgatgattacgccatgcactgggtccgacaggcccctggaaaaggactggaatgggtgtccggcatctcctggaatagcggctctatcggctacgccgacagcgtgaagggcagattcaccatcagccgggacaacgccaagaacagcctgtacctccagatgaactccctgagagccgaggatacagccctgtactactgcgccaaggacatccacagcggcagctactacggcctgctgtactacgctatggacgtgtggggccagggcacaaccgtgacagtttcttctacgcgtgcctctacaaagggaccctccgtgtttcctctggctcccagcagcaagtctacaagcggaggaacagccgctctgggctgcctggtcaaggattactttcccgagcctgtgaccgtgtcctggaatagcggagcactgacaagcggcgtgcacacctttccagccgtgctgcaaagcagcggcctgtactctctgagcagcgtggtcacagtgcctagctctagcctgggcacccagacctacatctgcaatgtgaaccacaagcctagcaacaccaaggtggacaagagagtggaacccaagagctgtgaagtgaaaaccgactccaccgaccacgtgaagcccaaagagacagagaacaccaagcagcccagcaagagctgccacaagcccaaggccatcgtgcacaccgagaaagtgaacatgatgagcctgaccgtgctgggcctgcggatgctgttcgccaaaaccgtggccgtgaacttcctgctgaccgccaagctgttcttcctc

SEQ ID NO: 2951 - DNA, 2379 bp, Artificial Sequence
  Synthetic Polynucloetide
atggccttaccagtgaccgccttgctcctgccgctggccttgctgctccacgccgccaggccggaagtgcagctggttgaatctggcggaggactggttcagcctggcggatctctgagactgtcttgtgccgccagcggcttcagcttcagcgacttttggatgagctgggtccgacaggcccctggcaaaggacttgaatgggtcgccacaatcagccaggccggcagcgagaaggactacgtggactctgtgaagggcagattcaccatcagccgggacaacgccaagaagtccctgtacctccagatgaacagcctgagagccgaggacaccgccgtgtactattgtgcctctggcgtgtacagcttcgactacagaggccagggcaccctggtcacagtctcttctggtaccggcggaggcggatctggcggcggaggtagcggtggcggaggatctgaattcctgcctgttctgacacagcctccatctgcctctggcacacctggacagagagtgaccatcagctgtagcggcagaagcagcaacatcggcagcaacagcgtgaactggtacagacagcttcctggcgctgcccctaagctgctgatctacagcaacaaccagcggcctcctggcgtgccagtcagattttctggcagcaagagcggcacaagcgccagcctggctatttctggactccagtctgaggacgaggccacctactactgtgccacctgggacgacaacctgaacgtgcactacgtgttcggcaccggcaccaaagtgacagtgcttggaagtagactcgagggacagcctaaggccaatcctaccgtgacactgttccctccaagcagcgaagaactccaggccaacaaggccacacttgtgtgcctgatctccgacttctaccctggggctgtgacagtggcttggaaggccgatggatctcctgtgaaagccggcgtggaaaccaccaagccatccaagcagagcaacaacaaatacgccgccagctcctacctgagcctgacacctgagcagtggaagtcccacagatcctacagctgccaagtgacccacgaaggcagcaccgtggaaaagacagtggcccctacagagtgcagccccatcaagaccgatgtgattacaatggaccccaaggacaactgctccaaggacgccaacgataccctgctgctccagctgaccaacaccagcgcctactacatgtacttgttgctgctgctgaagtccgtggtgtacttcgccatcatcacatgctgcctgctgcggagaaccgccttctgctgcaacggcgagaagtctagggccaagcgatctggatctggagcaacaaacttctcactactcaaacaagcaggtgacgtggaggagaatcccgggcctactagtatggactggatttggcgcatccttttccttgtcggcgctgctaccggcgcgcattccttcgaacttgaaatggctcaggtgcagctggtgcagagcggagccgaagtgaagaaacctggcagcagcgtgaaggtgtcctgcaaagcttctggcggcaccttcagcagctacgccatctcttgggttcgacaggcccctggacaaggactggaatggatgggcagaatcatccccatcctgggaatcgccaactacgcccagaaattccagggcagagtgacaatcaccgccgacaagagcaccagcaccgcctacatggaactgagcagcctgagaagcgaggacaccgccgtgtactattgtgcaagaggcggctactacagccacgacatgtggagcgaagattggggccagggcacactggtcacagtgtcatctacgcgtgcctctacaaagggaccctccgtgtttcctctggctcccagcagcaagtctacaagcggaggaacagccgctctgggctgcctggtcaaggattactttcccgagcctgtgaccgtgtcctggaatagcggagcactgacaagcggcgtgcacacctttccagccgtgctgcaaagcagcggcctgtactctctgagcagcgtggtcacagtgcctagctctagcctgggcacccagacctacatctgcaatgtgaaccacaagcctagcaacaccaaggtggacaagagagtggaacccaagagctgtgaagtgaaaaccgactccaccgaccacgtgaagcccaaagagacagagaacaccaagcagcccagcaagagctgccacaagcccaaggccatcgtgcacaccgagaaagtgaacatgatgagcctgaccgtgctgggcctgcggatgctgttcgccaaaaccgtggccgtgaacttcctgctgaccgccaagctgttcttcctc

SEQ ID NO: 2952 - DNA, 2361 bp, Artificial Sequence
  Synthetic Polynucloetide
atggccttaccagtgaccgccttgctcctgccgctggccttgctgctccacgccgccaggccggaagtgcagctggttgaatctggcggaggactggttcagcctggcggatctctgagactgtcttgtgccgccagcggcttcagcttcagcgacttttggatgagctgggtccgacaggcccctggcaaaggacttgaatgggtcgccacaatcagccaggccggcagcgagaaggactacgtggactctgtgaagggcagattcaccatcagccgggacaacgccaagaagtccctgtacctccagatgaacagcctgagagccgaggacaccgccgtgtactattgtgcctctggcgtgtacagcttcgactacagaggccagggcaccctggtcacagtctcttctggtaccggcggaggcggatctggcggcggaggtagcggtggcggaggatctgaattcgacttcgtgatgacacagagccctgatagcctggccgtgtctctcggcgagcgagtgaccatgagctgcaagtctagccagagcctgctgaacagcggcaaccagaagaactacctgacctggtatcagcagaagcccggccagcctcctaagctgctgatctactgggccagcaccagagaaagcggcgtgcccgatagattttctggctctggcagcggcaccgacttcaccctgacaatttctagcctgcaagccgaggacgtggccgtgtactactgccagaacgactacagctacccctacaccttcggccagggcaccaagctggaaatcaaactcgagggacagcctaaggccaatcctaccgtgacactgttccctccaagcagcgaagaactccaggccaacaaggccacacttgtgtgcctgatctccgacttctaccctggggctgtgacagtggcttggaaggccgatggatctcctgtgaaagccggcgtggaaaccaccaagccatccaagcagagcaacaacaaatacgccgccagctcctacctgagcctgacacctgagcagtggaagtcccacagatcctacagctgccaagtgacccacgaaggcagcaccgtggaaaagacagtggcccctacagagtgcagccccatcaagaccgatgtgattacaatggaccccaaggacaactgctccaaggacgccaacgataccctgctgctccagctgaccaacaccagcgcctactacatgtacttgttgctgctgctgaagtccgtggtgtacttcgccatcatcacatgctgcctgctgcggagaaccgccttctgctgcaacggcgagaagtctagggccaagcgatctggatctggagcaacaaacttctcactactcaaacaagcaggtgacgtggaggagaatcccgggcctactagtatggactggatttggcgcatccttttccttgtcggcgctgctaccggcgcgcattccttcgaagaagtgcaactggttcagagcggagccgagctgaagaaacctggggccagcgtgaaggtgtcctgtaaagccagcggctacacctttaccgactactacatgaaatgggtccgacaggccccaggccagggactcgaatggatcggcgatattatccccagcaacggggccaccttctacaaccagaaattcaagggccgcgtgaccatcaccgtggacaagagcacaagcaccgcctacatggaactgagcagcctgagaagcgaggacaccgccgtgtattattgcgccagaagccatctgctgcgggccagttggttcgcctattggggacagggaaccctggtcaccgttagctctacgcgtgcctctacaaagggaccctccgtgtttcctctggctcccagcagcaagtctacaagcggaggaacagccgctctgggctgcctggtcaaggattactttcccgagcctgtgaccgtgtcctggaatagcggagcactgacaagcggcgtgcacacctttccagccgtgctgcaaagcagcggcctgtactctctgagcagcgtggtcacagtgcctagctctagcctgggcacccagacctacatctgcaatgtgaaccacaagcctagcaacaccaaggtggacaagagagtggaacccaagagctgtgaagtgaaaaccgactccaccgaccacgtgaagcccaaagagacagagaacaccaagcagcccagcaagagctgccacaagcccaaggccatcgtgcacaccgagaaagtgaacatgatgagcctgaccgtgctgggcctgcggatgctgttcgccaaaaccgtggccgtgaacttcctgctgaccgccaagctgttcttcctc

SEQ ID NO: 2953 - DNA, 2361 bp, Artificial Sequence
  Synthetic Polynucloetide
atggccttaccagtgaccgccttgctcctgccgctggccttgctgctccacgccgccaggccggaagtgcagctggttgaatctggcggaggactggttcagcctggcggatctctgagactgtcttgtgccgccagcggcttcagcttcagcgacttttggatgagctgggtccgacaggcccctggcaaaggacttgaatgggtcgccacaatcagccaggccggcagcgagaaggactacgtggactctgtgaagggcagattcaccatcagccgggacaacgccaagaagtccctgtacctccagatgaacagcctgagagccgaggacaccgccgtgtactattgtgcctctggcgtgtacagcttcgactacagaggccagggcaccctggtcacagtctcttctggtaccggcggaggcggatctggcggcggaggtagcggtggcggaggatctgaattcgacttcgtgatgacacagagccctgatagcctggccgtgtctctcggcgagcgagtgaccatgagctgcaagtctagccagagcctgctgaacagcggcaaccagaagaactacctgacctggtatcagcagaagcccggccagcctcctaagctgctgatctactgggccagcaccagagaaagcggcgtgcccgatagattttctggctctggcagcggcaccgacttcaccctgacaatttctagcctgcaagccgaggacgtggccgtgtactactgccagaacgactacagctacccctacaccttcggccagggcaccaagctggaaatcaaactcgagggacagcctaaggccaatcctaccgtgacactgttccctccaagcagcgaagaactccaggccaacaaggccacacttgtgtgcctgatctccgacttctaccctggggctgtgacagtggcttggaaggccgatggatctcctgtgaaagccggcgtggaaaccaccaagccatccaagcagagcaacaacaaatacgccgccagctcctacctgagcctgacacctgagcagtggaagtcccacagatcctacagctgccaagtgacccacgaaggcagcaccgtggaaaagacagtggcccctacagagtgcagccccatcaagaccgatgtgattacaatggaccccaaggacaactgctccaaggacgccaacgataccctgctgctccagctgaccaacaccagcgcctactacatgtacttgttgctgctgctgaagtccgtggtgtacttcgccatcatcacatgctgcctgctgcggagaaccgccttctgctgcaacggcgagaagtctagggccaagcgatctggatctggagcaacaaacttctcactactcaaacaagcaggtgacgtggaggagaatcccgggcctactagtatggactggatttggcgcatccttttccttgtcggcgctgctaccggcgcgcattccttcgaacaagtgcaactggttcagagcggagccgagctgaagaaacctggggccagcgtgaaggtgtcctgtaaagccagcggctacacctttaccgactactacatgaaatgggtccgacaggccccaggccagggactcgaatggatcggcgatattatccccagcaacggggccaccttctacaaccagaaattcaagggccgcgtgaccatcaccgtggacaagagcacaagcaccgcctacatggaactgagcagcctgagaagcgaggacaccgccgtgtattattgcgccagaagccatctgctgcgggccagttggttcgcctattggggacagggaaccctggtcaccgttagctctacgcgtgcctctacaaagggaccctccgtgtttcctctggctcccagcagcaagtctacaagcggaggaacagccgctctgggctgcctggtcaaggattactttcccgagcctgtgaccgtgtcctggaatagcggagcactgacaagcggcgtgcacacctttccagccgtgctgcaaagcagcggcctgtactctctgagcagcgtggtcacagtgcctagctctagcctgggcacccagacctacatctgcaatgtgaaccacaagcctagcaacaccaaggtggacaagagagtggaacccaagagctgtgaagtgaaaaccgactccaccgaccacgtgaagcccaaagagacagagaacaccaagcagcccagcaagagctgccacaagcccaaggccatcgtgcacaccgagaaagtgaacatgatgagcctgaccgtgctgggcctgcggatgctgttcgccaaaaccgtggccgtgaacttcctgctgaccgccaagctgttcttcctc

SEQ ID NO: 2954 - DNA, 2331 bp, Artificial Sequence
  Synthetic Polynucloetide
atggccttaccagtgaccgccttgctcctgccgctggccttgctgctccacgccgccaggccggaagtgcagctggttgaatctggcggaggactggttcagcctggcggatctctgagactgtcttgtgccgccagcggcttcagcttcagcgacttttggatgagctgggtccgacaggcccctggcaaaggacttgaatgggtcgccacaatcagccaggccggcagcgagaaggactacgtggactctgtgaagggcagattcaccatcagccgggacaacgccaagaagtccctgtacctccagatgaacagcctgagagccgaggacaccgccgtgtactattgtgcctctggcgtgtacagcttcgactacagaggccagggcaccctggtcacagtctcttctggtaccggcggaggcggatctggcggcggaggtagcggtggcggaggatctgaattcgacgtgcagatcacacagagccctagctacctggctgcctctcctggcgagacaatcaccatcaactgtcgggccagcaagagcatcagcaaggacctggcctggtatcaagagaagcccggcaagaccaacaagctgctgatctacagcggcagcacactccagtctggcatccccagcagattttccggctctggcagcggcaccgatttcaccctgaccataagcagcctggaacctgaggacttcgccatgtactactgccagcagcacaacaagtacccctacacctttggcggaggcaccaagctggaaatcaagagactcgagggacagcctaaggccaatcctaccgtgacactgttccctccaagcagcgaagaactccaggccaacaaggccacacttgtgtgcctgatctccgacttctaccctggggctgtgacagtggcttggaaggccgatggatctcctgtgaaagccggcgtggaaaccaccaagccatccaagcagagcaacaacaaatacgccgccagctcctacctgagcctgacacctgagcagtggaagtcccacagatcctacagctgccaagtgacccacgaaggcagcaccgtggaaaagacagtggcccctacagagtgcagccccatcaagaccgatgtgattacaatggaccccaaggacaactgctccaaggacgccaacgataccctgctgctccagctgaccaacaccagcgcctactacatgtacttgttgctgctgctgaagtccgtggtgtacttcgccatcatcacatgctgcctgctgcggagaaccgccttctgctgcaacggcgagaagtctagggccaagcgatctggatctggagcaacaaacttctcactactcaaacaagcaggtgacgtggaggagaatcccgggcctactagtatggactggatttggcgcatccttttccttgtcggcgctgctaccggcgcgcattccttcgaacaagttcaactgcaacagcctggggccgagcttgttagacctggcgcttctgtgaagctgagctgcaaggccagcggctacaccttcaccagctactggatgaactgggtcaagcagcggcctgaccagggcctcgaatggatcggcagaatcgacccctacgacagcgagacacactacaaccagaagttcaaggacaaggccatcctgaccgtggacaagagcagctccaccgcctacatgcaactgagcagcctgacctctgaggatagcgccgtgtactattgcgccagaggcaactgggacgactattggggccagggcacaaccctgacagtgtctagtacgcgtgcctctacaaagggaccctccgtgtttcctctggctcccagcagcaagtctacaagcggaggaacagccgctctgggctgcctggtcaaggattactttcccgagcctgtgaccgtgtcctggaatagcggagcactgacaagcggcgtgcacacctttccagccgtgctgcaaagcagcggcctgtactctctgagcagcgtggtcacagtgcctagctctagcctgggcacccagacctacatctgcaatgtgaaccacaagcctagcaacaccaaggtggacaagagagtggaacccaagagctgtgaagtgaaaaccgactccaccgaccacgtgaagcccaaagagacagagaacaccaagcagcccagcaagagctgccacaagcccaaggccatcgtgcacaccgagaaagtgaacatgatgagcctgaccgtgctgggcctgcggatgctgttcgccaaaaccgtggccgtgaacttcctgctgaccgccaagctgttcttcctc

SEQ ID NO: 2955 - DNA, 2337 bp, Artificial Sequence
  Synthetic Polynucloetide
atggccttaccagtgaccgccttgctcctgccgctggccttgctgctccacgccgccaggccggaagtgcagctggttgaatctggcggaggactggttcagcctggcggatctctgagactgtcttgtgccgccagcggcttcagcttcagcgacttttggatgagctgggtccgacaggcccctggcaaaggacttgaatgggtcgccacaatcagccaggccggcagcgagaaggactacgtggactctgtgaagggcagattcaccatcagccgggacaacgccaagaagtccctgtacctccagatgaacagcctgagagccgaggacaccgccgtgtactattgtgcctctggcgtgtacagcttcgactacagaggccagggcaccctggtcacagtctcttctggtaccggcggaggcggatctggcggcggaggtagcggtggcggaggatctgaattcgagatcgtgctgacacagagccctaccagcatgacagcctctccaggcgagcaagtgaccatcacctgtagagccagcagcagcatcaactacatgcactggtatcagcagaagcctggcgcaagccccagaccttggatctacgagacaagcaagctggcctccggcgtgcccgatagattttctggatctgccagcggcaccagctacagcctgaccatcaacaacatggaagccgaggacgccgccacctactactgccagcagtggaattacccctcctggacctttggcggaggcaccaagctggaacttaaactcgagggacagcctaaggccaatcctaccgtgacactgttccctccaagcagcgaagaactccaggccaacaaggccacacttgtgtgcctgatctccgacttctaccctggggctgtgacagtggcttggaaggccgatggatctcctgtgaaagccggcgtggaaaccaccaagccatccaagcagagcaacaacaaatacgccgccagctcctacctgagcctgacacctgagcagtggaagtcccacagatcctacagctgccaagtgacccacgaaggcagcaccgtggaaaagacagtggcccctacagagtgcagccccatcaagaccgatgtgattacaatggaccccaaggacaactgctccaaggacgccaacgataccctgctgctccagctgaccaacaccagcgcctactacatgtacttgttgctgctgctgaagtccgtggtgtacttcgccatcatcacatgctgcctgctgcggagaaccgccttctgctgcaacggcgagaagtctagggccaagcgatctggatctggagcaacaaacttctcactactcaaacaagcaggtgacgtggaggagaatcccgggcctactagtatggactggatttggcgcatccttttccttgtcggcgctgctaccggcgcgcattccttcgaagaagtgcagctcgttgagtctggtggcggactggttcagcctggaagaagcctgaagctgagctgtgccgccagcggcttcaccttcagcgactacaatatggcctgggtccgacaggcccctaagaaaggactggaatgggtcgccaccatcctgtacgatggcggcagaacctactaccggggcagcgtgaagggcagattcaccatcagcagagacaacgccaagagcaccctgtacctgcggatggactctctgagaagcgaggataccgccacatattactgtgccacacacagccggggcaccgactactttgattattggggccagggcgtgatggttaccgtgtctagtacgcgtgcctctacaaagggaccctccgtgtttcctctggctcccagcagcaagtctacaagcggaggaacagccgctctgggctgcctggtcaaggattactttcccgagcctgtgaccgtgtcctggaatagcggagcactgacaagcggcgtgcacacctttccagccgtgctgcaaagcagcggcctgtactctctgagcagcgtggtcacagtgcctagctctagcctgggcacccagacctacatctgcaatgtgaaccacaagcctagcaacaccaaggtggacaagagagtggaacccaagagctgtgaagtgaaaaccgactccaccgaccacgtgaagcccaaagagacagagaacaccaagcagcccagcaagagctgccacaagcccaaggccatcgtgcacaccgagaaagtgaacatgatgagcctgaccgtgctgggcctgcggatgctgttcgccaaaaccgtggccgtgaacttcctgctgaccgccaagctgttcttcctc

SEQ ID NO: 2956 - DNA, 2364 bp, Artificial Sequence
  Synthetic Polynucloetide
atggccttaccagtgaccgccttgctcctgccgctggccttgctgctccacgccgccaggccggaagtgcagctggttgaatctggcggaggactggttcagcctggcggatctctgagactgtcttgtgccgccagcggcttcagcttcagcgacttttggatgagctgggtccgacaggcccctggcaaaggacttgaatgggtcgccacaatcagccaggccggcagcgagaaggactacgtggactctgtgaagggcagattcaccatcagccgggacaacgccaagaagtccctgtacctccagatgaacagcctgagagccgaggacaccgccgtgtactattgtgcctctggcgtgtacagcttcgactacagaggccagggcaccctggtcacagtctcttctggtaccggcggaggcggatctggcggcggaggtagcggtggcggaggatctgaattcgacatcgtgatgacacagagcccttctagcctggccgtgtctgagggcgagacagtgaccatcaactgcaagagcagccagagcttcctgtctagcggcgacggcaagaattacgtggcctggtatcagtacaagcccggacagagccccaagctgctgatctactgggccagcacaagacagagcggcgtgcccgatagattcatcggctctggcagcggcaccgacttcaccctgacaatctctacagtgcaggccgaggacctggctatctactactgccagcagtattacgacacccctctgacctttggctccggcaccaagctggaaatcaaactcgagggacagcctaaggccaatcctaccgtgacactgttccctccaagcagcgaagaactccaggccaacaaggccacacttgtgtgcctgatctccgacttctaccctggggctgtgacagtggcttggaaggccgatggatctcctgtgaaagccggcgtggaaaccaccaagccatccaagcagagcaacaacaaatacgccgccagctcctacctgagcctgacacctgagcagtggaagtcccacagatcctacagctgccaagtgacccacgaaggcagcaccgtggaaaagacagtggcccctacagagtgcagccccatcaagaccgatgtgattacaatggaccccaaggacaactgctccaaggacgccaacgataccctgctgctccagctgaccaacaccagcgcctactacatgtacttgttgctgctgctgaagtccgtggtgtacttcgccatcatcacatgctgcctgctgcggagaaccgccttctgctgcaacggcgagaagtctagggccaagcgatctggatctggagcaacaaacttctcactactcaaacaagcaggtgacgtggaggagaatcccgggcctactagtatggactggatttggcgcatccttttccttgtcggcgctgctaccggcgcgcattccttcgaagaagtgaagctgcaagagtctggccccagcctggtgcagagtagccaaacactgagcctgacctgtaccgtgtccggctttagcctgaccagctaccacatccactgggtccgacagacccctggcaaaggactggaatggatgggcgtgatgtggagcgacggcgacaccagctataacagcgccctgaagtcccggctgagcatcagcagagatacaagccagagccaggtgttcctgaagatgaacagcctccagaccgaggacaccgccacctactattgtgccagaggctactacagcagctacctgtacctttggttcgcctattggggccagggcaccctggttacagtcagctctacgcgtgcctctacaaagggaccctccgtgtttcctctggctcccagcagcaagtctacaagcggaggaacagccgctctgggctgcctggtcaaggattactttcccgagcctgtgaccgtgtcctggaatagcggagcactgacaagcggcgtgcacacctttccagccgtgctgcaaagcagcggcctgtactctctgagcagcgtggtcacagtgcctagctctagcctgggcacccagacctacatctgcaatgtgaaccacaagcctagcaacaccaaggtggacaagagagtggaacccaagagctgtgaagtgaaaaccgactccaccgaccacgtgaagcccaaagagacagagaacaccaagcagcccagcaagagctgccacaagcccaaggccatcgtgcacaccgagaaagtgaacatgatgagcctgaccgtgctgggcctgcggatgctgttcgccaaaaccgtggccgtgaacttcctgctgaccgccaagctgttcttcctc

SEQ ID NO: 2957 - DNA, 2376 bp, Artificial Sequence
  Synthetic Polynucloetide
atggccttaccagtgaccgccttgctcctgccgctggccttgctgctccacgccgccaggccggaagtgcagctggttgaatctggcggaggactggttcagcctggcggatctctgagactgtcttgtgccgccagcggcttcagcttcagcgacttttggatgagctgggtccgacaggcccctggcaaaggacttgaatgggtcgccacaatcagccaggccggcagcgagaaggactacgtggactctgtgaagggcagattcaccatcagccgggacaacgccaagaagtccctgtacctccagatgaacagcctgagagccgaggacaccgccgtgtactattgtgcctctggcgtgtacagcttcgactacagaggccagggcaccctggtcacagtctcttctggtaccggcggaggcggatctggcggcggaggtagcggtggcggaggatctgaattcgacgtgctgatgacccagacacctgtgtctctgccagtgtctctcggaggccaggtgtccatctcctgtagaagcagccagagcctggtgcactccgacggcgatacctacctgcactggtatctccagaagcctggacagagccctcagctcctgatctaccgggtgtccaacagattcagcggcgtgcccgatagattttccggcagcggctctggcaccgacttcaccctgaagatcagcagagtggaacccgaggacctgggcctgtactactgtctccagaccacacacttcccaccttggacctttggcggaggcaccaagctggaaatgaaactcgagggacagcctaaggccaatcctaccgtgacactgttccctccaagcagcgaagaactccaggccaacaaggccacacttgtgtgcctgatctccgacttctaccctggggctgtgacagtggcttggaaggccgatggatctcctgtgaaagccggcgtggaaaccaccaagccatccaagcagagcaacaacaaatacgccgccagctcctacctgagcctgacacctgagcagtggaagtcccacagatcctacagctgccaagtgacccacgaaggcagcaccgtggaaaagacagtggcccctacagagtgcagccccatcaagaccgatgtgattacaatggaccccaaggacaactgctccaaggacgccaacgataccctgctgctccagctgaccaacaccagcgcctactacatgtacttgttgctgctgctgaagtccgtggtgtacttcgccatcatcacatgctgcctgctgcggagaaccgccttctgctgcaacggcgagaagtctagggccaagcgatctggatctggagcaacaaacttctcactactcaaacaagcaggtgacgtggaggagaatcccgggcctactagtatggactggatttggcgcatccttttccttgtcggcgctgctaccggcgcgcattccttcgaacaggttcagctccagcagtctggacccgagcttagaaggccaggatctagcgtcagactgagctgcaaggccagcggctaccggatcaaggacttcctgatccactggattaagaacagacccgagcacggcctggaatggatcggatggattgaccctgaggacggcgagactaagtacgcccagaagttccagaccaaggccacactgaccgccgacacctctagcaacaccgcctacatgcaactgagcagcctgaccagcgaggacaccgccacctacttttgtgctagatggggcgacgtgtactacggcctgatgagaggccatgtgatggatgcctggggccagggaacaagcgtgacagtctcttctacgcgtgcctctacaaagggaccctccgtgtttcctctggctcccagcagcaagtctacaagcggaggaacagccgctctgggctgcctggtcaaggattactttcccgagcctgtgaccgtgtcctggaatagcggagcactgacaagcggcgtgcacacctttccagccgtgctgcaaagcagcggcctgtactctctgagcagcgtggtcacagtgcctagctctagcctgggcacccagacctacatctgcaatgtgaaccacaagcctagcaacaccaaggtggacaagagagtggaacccaagagctgtgaagtgaaaaccgactccaccgaccacgtgaagcccaaagagacagagaacaccaagcagcccagcaagagctgccacaagcccaaggccatcgtgcacaccgagaaagtgaacatgatgagcctgaccgtgctgggcctgcggatgctgttcgccaaaaccgtggccgtgaacttcctgctgaccgccaagctgttcttcctc

SEQ ID NO: 2958 - DNA, 2361 bp, Artificial Sequence
  Synthetic Polynucloetide
atggccttaccagtgaccgccttgctcctgccgctggccttgctgctccacgccgccaggccggaagtgcagctggttgaatctggcggaggactggttcagcctggcggatctctgagactgtcttgtgccgccagcggcttcagcttcagcgacttttggatgagctgggtccgacaggcccctggcaaaggacttgaatgggtcgccacaatcagccaggccggcagcgagaaggactacgtggactctgtgaagggcagattcaccatcagccgggacaacgccaagaagtccctgtacctccagatgaacagcctgagagccgaggacaccgccgtgtactattgtgcctctggcgtgtacagcttcgactacagaggccagggcaccctggtcacagtctcttctggtaccggcggaggcggatctggcggcggaggtagcggtggcggaggatctgaattcgacatcgtgatgacacagagccccgccacactgtcactgtctccaggcgaaagagccacactgagctgtcggagcagcaagagcctccagaacgtgaacggcaacacctacctgtactggttccagcagaagcccggccagtctcctcagctcctgatctacagaatgagcaacctgaacagcggcgtgcccgacagattttctggcagcggaagcggcaccgagttcaccctgaccataagcagcctggaacctgaggacttcgccgtgtactactgtatgcagcacctggaataccccatcaccttcggagccggcaccaagctggaaatcaaactcgagggacagcctaaggccaatcctaccgtgacactgttccctccaagcagcgaagaactccaggccaacaaggccacacttgtgtgcctgatctccgacttctaccctggggctgtgacagtggcttggaaggccgatggatctcctgtgaaagccggcgtggaaaccaccaagccatccaagcagagcaacaacaaatacgccgccagctcctacctgagcctgacacctgagcagtggaagtcccacagatcctacagctgccaagtgacccacgaaggcagcaccgtggaaaagacagtggcccctacagagtgcagccccatcaagaccgatgtgattacaatggaccccaaggacaactgctccaaggacgccaacgataccctgctgctccagctgaccaacaccagcgcctactacatgtacttgttgctgctgctgaagtccgtggtgtacttcgccatcatcacatgctgcctgctgcggagaaccgccttctgctgcaacggcgagaagtctagggccaagcgatctggatctggagcaacaaacttctcactactcaaacaagcaggtgacgtggaggagaatcccgggcctactagtatggactggatttggcgcatccttttccttgtcggcgctgctaccggcgcgcattccttcgaagaagtgcaactggttgaatctggcggcggactggttaagcctggcggatctctgaagctgagctgtgccgccagcggctacacctttaccagctacgtgatgcactgggtccgacaggcccctggcaaaggacttgagtggatcggctacatcaacccctacaacgatggcaccaagtacaacgagaagttccagggcagagtgaccatcagctccgacaagagcatcagcaccgcctacatggaactgagcagcctgagaagcgaggataccgccatgtactattgcgccagaggcacctactactacggcaccagagtgttcgactactggggccagggaaccctggtcacagtctcttctacgcgtgcctctacaaagggaccctccgtgtttcctctggctcccagcagcaagtctacaagcggaggaacagccgctctgggctgcctggtcaaggattactttcccgagcctgtgaccgtgtcctggaatagcggagcactgacaagcggcgtgcacacctttccagccgtgctgcaaagcagcggcctgtactctctgagcagcgtggtcacagtgcctagctctagcctgggcacccagacctacatctgcaatgtgaaccacaagcctagcaacaccaaggtggacaagagagtggaacccaagagctgtgaagtgaaaaccgactccaccgaccacgtgaagcccaaagagacagagaacaccaagcagcccagcaagagctgccacaagcccaaggccatcgtgcacaccgagaaagtgaacatgatgagcctgaccgtgctgggcctgcggatgctgttcgccaaaaccgtggccgtgaacttcctgctgaccgccaagctgttcttcctc

SEQ ID NO: 2959 - DNA, 2349 bp, Artificial Sequence
  Synthetic Polynucloetide
atggccttaccagtgaccgccttgctcctgccgctggccttgctgctccacgccgccaggccggaagtgcagctggttgaatctggcggaggactggttcagcctggcggatctctgagactgtcttgtgccgccagcggcttcagcttcagcgacttttggatgagctgggtccgacaggcccctggcaaaggacttgaatgggtcgccacaatcagccaggccggcagcgagaaggactacgtggactctgtgaagggcagattcaccatcagccgggacaacgccaagaagtccctgtacctccagatgaacagcctgagagccgaggacaccgccgtgtactattgtgcctctggcgtgtacagcttcgactacagaggccagggcaccctggtcacagtctcttctggtaccggcggaggcggatctggcggcggaggtagcggtggcggaggatctgaattcgacatccagatgacacagagccctagcagcctgtctgccagcgtgggagacagagtgaccatcacatgcaaggccagcgaccacatcaacaactggctggcctggtatcagcagaagcctggacaggcccctaagctgctgatctacggcgctaccacactggaaacaggcgtgcccagcagattttctggcagcggctctggcaccgactacaccctgacaatatccagcctccagcctgaggacttcgccacctactactgtcagcagagctggaacaccccttggacattcggccagggcaccaagctggaaatcaagagactcgagggacagcctaaggccaatcctaccgtgacactgttccctccaagcagcgaagaactccaggccaacaaggccacacttgtgtgcctgatctccgacttctaccctggggctgtgacagtggcttggaaggccgatggatctcctgtgaaagccggcgtggaaaccaccaagccatccaagcagagcaacaacaaatacgccgccagctcctacctgagcctgacacctgagcagtggaagtcccacagatcctacagctgccaagtgacccacgaaggcagcaccgtggaaaagacagtggcccctacagagtgcagccccatcaagaccgatgtgattacaatggaccccaaggacaactgctccaaggacgccaacgataccctgctgctccagctgaccaacaccagcgcctactacatgtacttgttgctgctgctgaagtccgtggtgtacttcgccatcatcacatgctgcctgctgcggagaaccgccttctgctgcaacggcgagaagtctagggccaagcgatctggatctggagcaacaaacttctcactactcaaacaagcaggtgacgtggaggagaatcccgggcctactagtatggactggatttggcgcatccttttccttgtcggcgctgctaccggcgcgcattccttcgaacaagttcagcttcaacagcctggcgctgagctggtcaaacctggcgcttctgtgaagatgagctgcaaagccagcggctacgccttcagcagctactggatcaactggatgaagcagaaacccggccagggactcgaatggatcggccaaatctatcccggcgacggcgacaccaactacaacggcaagttcaagggcagagccacactgaccgccgatacctctagcagcacagcctacatgcagctgagcagcctgaccagcgaagatagcgccgtgtacttctgtgcccggtccatcacaacagtcgtgggctgcgctatggactattggggccagggaacaagcgtgaccgtgtctagtacgcgtgcctctacaaagggaccctccgtgtttcctctggctcccagcagcaagtctacaagcggaggaacagccgctctgggctgcctggtcaaggattactttcccgagcctgtgaccgtgtcctggaatagcggagcactgacaagcggcgtgcacacctttccagccgtgctgcaaagcagcggcctgtactctctgagcagcgtggtcacagtgcctagctctagcctgggcacccagacctacatctgcaatgtgaaccacaagcctagcaacaccaaggtggacaagagagtggaacccaagagctgtgaagtgaaaaccgactccaccgaccacgtgaagcccaaagagacagagaacaccaagcagcccagcaagagctgccacaagcccaaggccatcgtgcacaccgagaaagtgaacatgatgagcctgaccgtgctgggcctgcggatgctgttcgccaaaaccgtggccgtgaacttcctgctgaccgccaagctgttcttcctc

SEQ ID NO: 2960 - DNA, 2355 bp, Artificial Sequence
  Synthetic Polynucloetide
atggccttaccagtgaccgccttgctcctgccgctggccttgctgctccacgccgccaggccggaagtgcagctggttgaatctggcggaggactggttcagcctggcggatctctgagactgtcttgtgccgccagcggcttcagcttcagcgacttttggatgagctgggtccgacaggcccctggcaaaggacttgaatgggtcgccacaatcagccaggccggcagcgagaaggactacgtggactctgtgaagggcagattcaccatcagccgggacaacgccaagaagtccctgtacctccagatgaacagcctgagagccgaggacaccgccgtgtactattgtgcctctggcgtgtacagcttcgactacagaggccagggcaccctggtcacagtctcttctggtaccggcggaggcggatctggcggcggaggtagcggtggcggaggatctgaattccagatcgtgctgtctcagtctcctgccatcctgagcgcttccccaggcgagaaagtgaccatgacctgtagagccagcagcagcgtgtcctacatgcactggtatcagcagaagcccggcagcagccctaagccttggatctacgccaccagcaatctggcctctggcgtgccagccagattttctggctctggcagcggcaccagctacagcttcacaatcagcagagtggaagccgaggacgccgccacctactattgtcagcagtggaccttcaatcctcctaccttcggcggaggcacccggctggaaatcaaaagaacagtggctgctctcgagggacagcctaaggccaatcctaccgtgacactgttccctccaagcagcgaagaactccaggccaacaaggccacacttgtgtgcctgatctccgacttctaccctggggctgtgacagtggcttggaaggccgatggatctcctgtgaaagccggcgtggaaaccaccaagccatccaagcagagcaacaacaaatacgccgccagctcctacctgagcctgacacctgagcagtggaagtcccacagatcctacagctgccaagtgacccacgaaggcagcaccgtggaaaagacagtggcccctacagagtgcagccccatcaagaccgatgtgattacaatggaccccaaggacaactgctccaaggacgccaacgataccctgctgctccagctgaccaacaccagcgcctactacatgtacttgttgctgctgctgaagtccgtggtgtacttcgccatcatcacatgctgcctgctgcggagaaccgccttctgctgcaacggcgagaagtctagggccaagcgatctggatctggagcaacaaacttctcactactcaaacaagcaggtgacgtggaggagaatcccgggcctactagtatggactggatttggcgcatccttttccttgtcggcgctgctaccggcgcgcattccttcgaacaggcttatctgcaacagagcggagccgaactcgtcagacctggcgcttctgtgaagatgagctgcaaggccagcggctacaccttcaccagctataatatgcactgggtcaagcagacccctcggcagggactcgaatggatcggcggaatctatcccggcaacggcgacacctcctacaaccagaagttcaagggcaaagccacactgaccgtgggcaagagcagcagcaccgcctatatgcagctcagcagcctgaccagcgaggacagcgccgtgtacttctgcgccagatacgactacaactacgctatggactactggggccagggcaccagcgtgacagttagctctgccagcacgcgtgcctctacaaagggaccctccgtgtttcctctggctcccagcagcaagtctacaagcggaggaacagccgctctgggctgcctggtcaaggattactttcccgagcctgtgaccgtgtcctggaatagcggagcactgacaagcggcgtgcacacctttccagccgtgctgcaaagcagcggcctgtactctctgagcagcgtggtcacagtgcctagctctagcctgggcacccagacctacatctgcaatgtgaaccacaagcctagcaacaccaaggtggacaagagagtggaacccaagagctgtgaagtgaaaaccgactccaccgaccacgtgaagcccaaagagacagagaacaccaagcagcccagcaagagctgccacaagcccaaggccatcgtgcacaccgagaaagtgaacatgatgagcctgaccgtgctgggcctgcggatgctgttcgccaaaaccgtggccgtgaacttcctgctgaccgccaagctgttcttcctc

SEQ ID NO: 2961 - DNA, 2349 bp, Artificial Sequence
  Synthetic Polynucloetide
atggccttaccagtgaccgccttgctcctgccgctggccttgctgctccacgccgccaggccggaagtgcagctggttgaatctggcggaggactggttcagcctggcggatctctgagactgtcttgtgccgccagcggcttcagcttcagcgacttttggatgagctgggtccgacaggcccctggcaaaggacttgaatgggtcgccacaatcagccaggccggcagcgagaaggactacgtggactctgtgaagggcagattcaccatcagccgggacaacgccaagaagtccctgtacctccagatgaacagcctgagagccgaggacaccgccgtgtactattgtgcctctggcgtgtacagcttcgactacagaggccagggcaccctggtcacagtctcttctggtaccggcggaggcggatctggcggcggaggtagcggtggcggaggatctgaattcgagatcgtgctgacacagagccctgccaccctgtctctgagccctggcgaaagagccaccctgagctgtagagccagccagagcgtgtccagctacctggcctggtatcagcagaagcccggccaggctccccggctgctgatctacgatgccagcaatagagccaccggcatccccgccagattttccggctctggcagcggcaccgacttcaccctgaccatcagctccctggaacccgaggacttcgccgtgtactactgccagcagcggagcaactggcccatcacattcggccagggcacccggctggaaatcaaactcgagggacagcctaaggccaatcctaccgtgacactgttccctccaagcagcgaagaactccaggccaacaaggccacacttgtgtgcctgatctccgacttctaccctggggctgtgacagtggcttggaaggccgatggatctcctgtgaaagccggcgtggaaaccaccaagccatccaagcagagcaacaacaaatacgccgccagctcctacctgagcctgacacctgagcagtggaagtcccacagatcctacagctgccaagtgacccacgaaggcagcaccgtggaaaagacagtggcccctacagagtgcagccccatcaagaccgatgtgattacaatggaccccaaggacaactgctccaaggacgccaacgataccctgctgctccagctgaccaacaccagcgcctactacatgtacttgttgctgctgctgaagtccgtggtgtacttcgccatcatcacatgctgcctgctgcggagaaccgccttctgctgcaacggcgagaagtctagggccaagcgatctggatctggagcaacaaacttctcactactcaaacaagcaggtgacgtggaggagaatcccgggcctactagtatggactggatttggcgcatccttttccttgtcggcgctgctaccggcgcgcattccttcgaagaggtgcagcttgttgagtctggcggaggactggtgcagcccgatagaagcctgagactgtcttgtgccgccagcggcttcaccttccacgattatgccatgcactgggtccgacaggcccctggcaaaggacttgaatgggtgtccaccatctcttggaacagcggcacaatcggctacgccgactctgtgaagggcagattcaccatcagccgggacaacgccaagaacagcctgtacctccagatgaactccctgagagccgaggacacagccctgtactactgcgccaaggacatccagtacggcaactactactacggcatggacgtgtggggccagggcacaacagtgacagtctcttctacgcgtgcctctacaaagggaccctccgtgtttcctctggctcccagcagcaagtctacaagcggaggaacagccgctctgggctgcctggtcaaggattactttcccgagcctgtgaccgtgtcctggaatagcggagcactgacaagcggcgtgcacacctttccagccgtgctgcaaagcagcggcctgtactctctgagcagcgtggtcacagtgcctagctctagcctgggcacccagacctacatctgcaatgtgaaccacaagcctagcaacaccaaggtggacaagagagtggaacccaagagctgtgaagtgaaaaccgactccaccgaccacgtgaagcccaaagagacagagaacaccaagcagcccagcaagagctgccacaagcccaaggccatcgtgcacaccgagaaagtgaacatgatgagcctgaccgtgctgggcctgcggatgctgttcgccaaaaccgtggccgtgaacttcctgctgaccgccaagctgttcttcctc

SEQ ID NO: 2962 - DNA, 2334 bp, Artificial Sequence
  Synthetic Polynucloetide
atggccttaccagtgaccgccttgctcctgccgctggccttgctgctccacgccgccaggccggaagtgcagctggttgaatctggcggaggactggttcagcctggcggatctctgagactgtcttgtgccgccagcggcttcagcttcagcgacttttggatgagctgggtccgacaggcccctggcaaaggacttgaatgggtcgccacaatcagccaggccggcagcgagaaggactacgtggactctgtgaagggcagattcaccatcagccgggacaacgccaagaagtccctgtacctccagatgaacagcctgagagccgaggacaccgccgtgtactattgtgcctctggcgtgtacagcttcgactacagaggccagggcaccctggtcacagtctcttctggtaccggcggaggcggatctggcggcggaggtagcggtggcggaggatctgaattcgacatccagatgacacagagccctagcagcctgtctgccagcgtgggagatagagtgaccatcaactgcaaggccagccaggacatcaacagctacctgagctggttccagcagaagcctggcaaggcccctaagacactgatctaccgggccaacagactggtggatggcgtgccaagcagattttctggcagcggcagcggccaggattacaccctgacaatatccagcctccagcctgaggacttcgccacctactactgcctccagtacgacgagttccctctgacctttggcggaggcaccaaggtggaaatcaaactcgagggacagcctaaggccaatcctaccgtgacactgttccctccaagcagcgaagaactccaggccaacaaggccacacttgtgtgcctgatctccgacttctaccctggggctgtgacagtggcttggaaggccgatggatctcctgtgaaagccggcgtggaaaccaccaagccatccaagcagagcaacaacaaatacgccgccagctcctacctgagcctgacacctgagcagtggaagtcccacagatcctacagctgccaagtgacccacgaaggcagcaccgtggaaaagacagtggcccctacagagtgcagccccatcaagaccgatgtgattacaatggaccccaaggacaactgctccaaggacgccaacgataccctgctgctccagctgaccaacaccagcgcctactacatgtacttgttgctgctgctgaagtccgtggtgtacttcgccatcatcacatgctgcctgctgcggagaaccgccttctgctgcaacggcgagaagtctagggccaagcgatctggatctggagcaacaaacttctcactactcaaacaagcaggtgacgtggaggagaatcccgggcctactagtatggactggatttggcgcatccttttccttgtcggcgctgctaccggcgcgcattccttcgaacaggtgcaactggtgcagtctggggccgaagtgaagaaacctggggcctctgtgaaggtgtcctgcaaagccagcggctacacctttaccaactacgacatcaactgggtccgacaggctccaggccaaggactggaatggatcggctggatctatcctggcgacggcagcaccaagtacaacgagaagttcaaggccaaggccacactgaccgccgataccagcacaagcaccgcctacatggaactgcggagcctgagaagcgacgacaccgccgtgtactattgtgcctccggctacgaggacgctatggactattggggccagggcaccaccgtgacagtgtctagtacgcgtgcctctacaaagggaccctccgtgtttcctctggctcccagcagcaagtctacaagcggaggaacagccgctctgggctgcctggtcaaggattactttcccgagcctgtgaccgtgtcctggaatagcggagcactgacaagcggcgtgcacacctttccagccgtgctgcaaagcagcggcctgtactctctgagcagcgtggtcacagtgcctagctctagcctgggcacccagacctacatctgcaatgtgaaccacaagcctagcaacaccaaggtggacaagagagtggaacccaagagctgtgaagtgaaaaccgactccaccgaccacgtgaagcccaaagagacagagaacaccaagcagcccagcaagagctgccacaagcccaaggccatcgtgcacaccgagaaagtgaacatgatgagcctgaccgtgctgggcctgcggatgctgttcgccaaaaccgtggccgtgaacttcctgctgaccgccaagctgttcttcctc

SEQ ID NO: 2963 - DNA, 2340 bp, Artificial Sequence
  Synthetic Polynucloetide
atggccttaccagtgaccgccttgctcctgccgctggccttgctgctccacgccgccaggccggaagtgcagctggttgaatctggcggaggactggttcagcctggcggatctctgagactgtcttgtgccgccagcggcttcagcttcagcgacttttggatgagctgggtccgacaggcccctggcaaaggacttgaatgggtcgccacaatcagccaggccggcagcgagaaggactacgtggactctgtgaagggcagattcaccatcagccgggacaacgccaagaagtccctgtacctccagatgaacagcctgagagccgaggacaccgccgtgtactattgtgcctctggcgtgtacagcttcgactacagaggccagggcaccctggtcacagtctcttctggtaccggcggaggcggatctggcggcggaggtagcggtggcggaggatctgaattcgacatcgtgatgacccagacacctctgagcctgagcgtgacacctggacagcctgccagcattagctgcaagagcagccagtctctgctggacggcgacggcaagacctacctgaattggctgctccagaagcctggacagagccctcagcggctgatctacctggtgtccaagctggatagcggcgtgcccgatagattttctggcagcggctctggcaccgacttcaccctgaagatcagcagagtggaagccgaggacgtgggcgtgtactactgttggcagggcacacacttccccagaacattcggccagggcacaaagctggaaatcaaactcgagggacagcctaaggccaatcctaccgtgacactgttccctccaagcagcgaagaactccaggccaacaaggccacacttgtgtgcctgatctccgacttctaccctggggctgtgacagtggcttggaaggccgatggatctcctgtgaaagccggcgtggaaaccaccaagccatccaagcagagcaacaacaaatacgccgccagctcctacctgagcctgacacctgagcagtggaagtcccacagatcctacagctgccaagtgacccacgaaggcagcaccgtggaaaagacagtggcccctacagagtgcagccccatcaagaccgatgtgattacaatggaccccaaggacaactgctccaaggacgccaacgataccctgctgctccagctgaccaacaccagcgcctactacatgtacttgttgctgctgctgaagtccgtggtgtacttcgccatcatcacatgctgcctgctgcggagaaccgccttctgctgcaacggcgagaagtctagggccaagcgatctggatctggagcaacaaacttctcactactcaaacaagcaggtgacgtggaggagaatcccgggcctactagtatggactggatttggcgcatccttttccttgtcggcgctgctaccggcgcgcattccttcgaacaagtgcaactggttcagagcggagccgaagtgaagaaacctggggcctctgtgaaggtgtcctgcaaggccagcggctacaccttcaaggacacctacatccactgggtccgacaggcccctggacaaggacttgagtggatgggcagaatcgaccccgccaacggcaacaccaaatacgaccccaagttccagggcagagtgaccatgaccagagacaccagcatcagcaccgcctacatggaactgagccggctgagatccgatgacaccgccgtgtactattgcgctagaagaggcggagtggattggggccagggaacactggttaccgtgtctagtacgcgtgcctctacaaagggaccctccgtgtttcctctggctcccagcagcaagtctacaagcggaggaacagccgctctgggctgcctggtcaaggattactttcccgagcctgtgaccgtgtcctggaatagcggagcactgacaagcggcgtgcacacctttccagccgtgctgcaaagcagcggcctgtactctctgagcagcgtggtcacagtgcctagctctagcctgggcacccagacctacatctgcaatgtgaaccacaagcctagcaacaccaaggtggacaagagagtggaacccaagagctgtgaagtgaaaaccgactccaccgaccacgtgaagcccaaagagacagagaacaccaagcagcccagcaagagctgccacaagcccaaggccatcgtgcacaccgagaaagtgaacatgatgagcctgaccgtgctgggcctgcggatgctgttcgccaaaaccgtggccgtgaacttcctgctgaccgccaagctgttcttcctc

SEQ ID NO: 2964 - DNA, 2343 bp, Artificial Sequence
  Synthetic Polynucloetide
atggccttaccagtgaccgccttgctcctgccgctggccttgctgctccacgccgccaggccggaagtgcagctggttgaatctggcggaggactggttcagcctggcggatctctgagactgtcttgtgccgccagcggcttcagcttcagcgacttttggatgagctgggtccgacaggcccctggcaaaggacttgaatgggtcgccacaatcagccaggccggcagcgagaaggactacgtggactctgtgaagggcagattcaccatcagccgggacaacgccaagaagtccctgtacctccagatgaacagcctgagagccgaggacaccgccgtgtactattgtgcctctggcgtgtacagcttcgactacagaggccagggcaccctggtcacagtctcttctggtaccggcggaggcggatctggcggcggaggtagcggtggcggaggatctgaattcgacatccagatgacacagagccctagcagcctgtctgccagcgtgggagacagagtgaccatcacatgcaaggccagccaggatgtgtctacagccgtggcctggttccagcagaagcctggaaaagcccctaagctgctgatctacagccccagctacagatacaccggcgtgcccagcagattttctggcagcggctctggcaccgacttcaccctgacaatatccagcctccagcctgaggacttcacctactactgccagcagctctacagcaccccttacacattcggccagggcaccaaggtggaaatcaaactcgagggacagcctaaggccaatcctaccgtgacactgttccctccaagcagcgaagaactccaggccaacaaggccacacttgtgtgcctgatctccgacttctaccctggggctgtgacagtggcttggaaggccgatggatctcctgtgaaagccggcgtggaaaccaccaagccatccaagcagagcaacaacaaatacgccgccagctcctacctgagcctgacacctgagcagtggaagtcccacagatcctacagctgccaagtgacccacgaaggcagcaccgtggaaaagacagtggcccctacagagtgcagccccatcaagaccgatgtgattacaatggaccccaaggacaactgctccaaggacgccaacgataccctgctgctccagctgaccaacaccagcgcctactacatgtacttgttgctgctgctgaagtccgtggtgtacttcgccatcatcacatgctgcctgctgcggagaaccgccttctgctgcaacggcgagaagtctagggccaagcgatctggatctggagcaacaaacttctcactactcaaacaagcaggtgacgtggaggagaatcccgggcctactagtatggactggatttggcgcatccttttccttgtcggcgctgctaccggcgcgcattccttcgaagaagtgcaactggttcagagcggagccgaagtgaagaaacctggggcctctgtgaaggtgtcctgcaaagccagcggctacacctttaccgactactacctggacgtggtcgtgcggcaagctcctggacaaggactggaatggatcggcagagtgaacccctacaacggcggcaccatctacaaccagaaattcaagggaagagtgaccctgaccagagacaccagcacctccacagcctacctggaactgagcagcctgagaagcgaagataccgccgtgtactactgcgccagggaccactacagatatgaccctctgctggactactggggccagggaaccctggttacagtgtctagtacgcgtgcctctacaaagggaccctccgtgtttcctctggctcccagcagcaagtctacaagcggaggaacagccgctctgggctgcctggtcaaggattactttcccgagcctgtgaccgtgtcctggaatagcggagcactgacaagcggcgtgcacacctttccagccgtgctgcaaagcagcggcctgtactctctgagcagcgtggtcacagtgcctagctctagcctgggcacccagacctacatctgcaatgtgaaccacaagcctagcaacaccaaggtggacaagagagtggaacccaagagctgtgaagtgaaaaccgactccaccgaccacgtgaagcccaaagagacagagaacaccaagcagcccagcaagagctgccacaagcccaaggccatcgtgcacaccgagaaagtgaacatgatgagcctgaccgtgctgggcctgcggatgctgttcgccaaaaccgtggccgtgaacttcctgctgaccgccaagctgttcttcctc

SEQ ID NO: 2965 - DNA, 2361 bp, Artificial Sequence
  Synthetic Polynucloetide
atggccttaccagtgaccgccttgctcctgccgctggccttgctgctccacgccgccaggccggaagtgcagctggttgaatctggcggaggactggttcagcctggcggatctctgagactgtcttgtgccgccagcggcttcagcttcagcgacttttggatgagctgggtccgacaggcccctggcaaaggacttgaatgggtcgccacaatcagccaggccggcagcgagaaggactacgtggactctgtgaagggcagattcaccatcagccgggacaacgccaagaagtccctgtacctccagatgaacagcctgagagccgaggacaccgccgtgtactattgtgcctctggcgtgtacagcttcgactacagaggccagggcaccctggtcacagtctcttctggtaccggcggaggcggatctggcggcggaggtagcggtggcggaggatctgaattcgacatccagatgacacagagccctagcagcctgtctgccagcgtgggagacagagtgaccatcacctgtagagccagccagagcgtgtccaccagcagctacaactacatgcactggtatcagcagaagcccggcaagcctcctaagctgctgattaagtacgccagcaacctggaaagcggcgtgcccagcagattttctggcagcggctctggcaccgacttcaccctgacaatatccagcctccagcctgaggacttcgccacctactactgtcagcactcctgggagatccctctgacattcggccagggcaccaaggtggaaatcaaactcgagggacagcctaaggccaatcctaccgtgacactgttccctccaagcagcgaagaactccaggccaacaaggccacacttgtgtgcctgatctccgacttctaccctggggctgtgacagtggcttggaaggccgatggatctcctgtgaaagccggcgtggaaaccaccaagccatccaagcagagcaacaacaaatacgccgccagctcctacctgagcctgacacctgagcagtggaagtcccacagatcctacagctgccaagtgacccacgaaggcagcaccgtggaaaagacagtggcccctacagagtgcagccccatcaagaccgatgtgattacaatggaccccaaggacaactgctccaaggacgccaacgataccctgctgctccagctgaccaacaccagcgcctactacatgtacttgttgctgctgctgaagtccgtggtgtacttcgccatcatcacatgctgcctgctgcggagaaccgccttctgctgcaacggcgagaagtctagggccaagcgatctggatctggagcaacaaacttctcactactcaaacaagcaggtgacgtggaggagaatcccgggcctactagtatggactggatttggcgcatccttttccttgtcggcgctgctaccggcgcgcattccttcgaagaagtgcaactggttcagagcggagccgaagtgaagaaacctggggcctctgtgaaggtgtcctgcaaggccagcggctacagcttcaccgactattatatgcactgggtccgacaggctccaggccagggacttgagtggatcggcagaatcaacccctacaacggcgctgccttctacagccagaacttcaaggatagagtgaccctgaccgtggacaccagcaccagcacagcctacctggaactgagcagcctgagaagcgaggacaccgccgtgtactactgcgccattgagagaggcgctgacctggaaggctacgctatggattattggggccagggaaccctggtcaccgtgtcatctacgcgtgcctctacaaagggaccctccgtgtttcctctggctcccagcagcaagtctacaagcggaggaacagccgctctgggctgcctggtcaaggattactttcccgagcctgtgaccgtgtcctggaatagcggagcactgacaagcggcgtgcacacctttccagccgtgctgcaaagcagcggcctgtactctctgagcagcgtggtcacagtgcctagctctagcctgggcacccagacctacatctgcaatgtgaaccacaagcctagcaacaccaaggtggacaagagagtggaacccaagagctgtgaagtgaaaaccgactccaccgaccacgtgaagcccaaagagacagagaacaccaagcagcccagcaagagctgccacaagcccaaggccatcgtgcacaccgagaaagtgaacatgatgagcctgaccgtgctgggcctgcggatgctgttcgccaaaaccgtggccgtgaacttcctgctgaccgccaagctgttcttcctc

SEQ ID NO: 2966 - DNA, 2355 bp, Artificial Sequence
  Synthetic Polynucloetide
atggccttaccagtgaccgccttgctcctgccgctggccttgctgctccacgccgccaggccggaagtgcagctggttgaatctggcggaggactggttcagcctggcggatctctgagactgtcttgtgccgccagcggcttcagcttcagcgacttttggatgagctgggtccgacaggcccctggcaaaggacttgaatgggtcgccacaatcagccaggccggcagcgagaaggactacgtggactctgtgaagggcagattcaccatcagccgggacaacgccaagaagtccctgtacctccagatgaacagcctgagagccgaggacaccgccgtgtactattgtgcctctggcgtgtacagcttcgactacagaggccagggcaccctggtcacagtctcttctggtaccggcggaggcggatctggcggcggaggtagcggtggcggaggatctgaattcgagatcgtgctgacacagtctccagccacactgagcgcttctccaggcgagagagtgaccctgacctgtagagccagcagcaacgtgatctccagctacgtgcactggtatcagcagaagcctggcagcagccccagactgtttctgtacagcaccagcaatctggcctccggcgtgccaagcagattttctggctctggcagcggcaccgacttcacctttaccatctctagcctggaagccgaggacgccgccacctactactgtcagcagtacagcggctaccctctgaccttcggccagggcacaagactggaaatcaaactcgagggacagcctaaggccaatcctaccgtgacactgttccctccaagcagcgaagaactccaggccaacaaggccacacttgtgtgcctgatctccgacttctaccctggggctgtgacagtggcttggaaggccgatggatctcctgtgaaagccggcgtggaaaccaccaagccatccaagcagagcaacaacaaatacgccgccagctcctacctgagcctgacacctgagcagtggaagtcccacagatcctacagctgccaagtgacccacgaaggcagcaccgtggaaaagacagtggcccctacagagtgcagccccatcaagaccgatgtgattacaatggaccccaaggacaactgctccaaggacgccaacgataccctgctgctccagctgaccaacaccagcgcctactacatgtacttgttgctgctgctgaagtccgtggtgtacttcgccatcatcacatgctgcctgctgcggagaaccgccttctgctgcaacggcgagaagtctagggccaagcgatctggatctggagcaacaaacttctcactactcaaacaagcaggtgacgtggaggagaatcccgggcctactagtatggactggatttggcgcatccttttccttgtcggcgctgctaccggcgcgcattccttcgaacaagttcagctgcaagagtctggccctggcctggtcaagcctagcgaaacactgagcctgacctgcgccgtgtctggctactctatcaccagcgcctactattggaactggatcagacagcctcctggcaaaggactggaatggatcggctacatcagctacgacggcagaaacaactacaaccccagcctgaagaaccggatcaccatcaatcccgacaccagcaagaaccagttcagcctccagctgaacagcgtgacccctgaggataccgccgtgtactactgtgccagagaaggcgactacgacgtgggcaactactacgctatggactactggggccagggaaccctggtcacagtctcttctacgcgtgcctctacaaagggaccctccgtgtttcctctggctcccagcagcaagtctacaagcggaggaacagccgctctgggctgcctggtcaaggattactttcccgagcctgtgaccgtgtcctggaatagcggagcactgacaagcggcgtgcacacctttccagccgtgctgcaaagcagcggcctgtactctctgagcagcgtggtcacagtgcctagctctagcctgggcacccagacctacatctgcaatgtgaaccacaagcctagcaacaccaaggtggacaagagagtggaacccaagagctgtgaagtgaaaaccgactccaccgaccacgtgaagcccaaagagacagagaacaccaagcagcccagcaagagctgccacaagcccaaggccatcgtgcacaccgagaaagtgaacatgatgagcctgaccgtgctgggcctgcggatgctgttcgccaaaaccgtggccgtgaacttcctgctgaccgccaagctgttcttcctc

SEQ ID NO: 2967 - DNA, 2355 bp, Artificial Sequence
  Synthetic Polynucloetide
atggccttaccagtgaccgccttgctcctgccgctggccttgctgctccacgccgccaggccggaagtgcagctggttgaatctggcggaggactggttcagcctggcggatctctgagactgtcttgtgccgccagcggcttcagcttcagcgacttttggatgagctgggtccgacaggcccctggcaaaggacttgaatgggtcgccacaatcagccaggccggcagcgagaaggactacgtggactctgtgaagggcagattcaccatcagccgggacaacgccaagaagtccctgtacctccagatgaacagcctgagagccgaggacaccgccgtgtactattgtgcctctggcgtgtacagcttcgactacagaggccagggcaccctggtcacagtctcttctggtaccggcggaggcggatctggcggcggaggtagcggtggcggaggatctgaattcgagatcgtgctgacacagtctcccgccacactgtcactgtctccaggcgaaagagccacactgagctgtagagccagcagcaacgtgatctccagctacgtgcactggtatcagcagaagcctggacaggcccctcggctgctgatctacagcacaagcaatctggcctctggcatccccgccagattttctggctctggaagcggcaccgacttcaccctgaccataagcagcctggaacctgaggacttcgccgtgtactactgccagcagtatagcggctaccctctgaccttcggccagggcacaagactggaaatcaaactcgagggacagcctaaggccaatcctaccgtgacactgttccctccaagcagcgaagaactccaggccaacaaggccacacttgtgtgcctgatctccgacttctaccctggggctgtgacagtggcttggaaggccgatggatctcctgtgaaagccggcgtggaaaccaccaagccatccaagcagagcaacaacaaatacgccgccagctcctacctgagcctgacacctgagcagtggaagtcccacagatcctacagctgccaagtgacccacgaaggcagcaccgtggaaaagacagtggcccctacagagtgcagccccatcaagaccgatgtgattacaatggaccccaaggacaactgctccaaggacgccaacgataccctgctgctccagctgaccaacaccagcgcctactacatgtacttgttgctgctgctgaagtccgtggtgtacttcgccatcatcacatgctgcctgctgcggagaaccgccttctgctgcaacggcgagaagtctagggccaagcgatctggatctggagcaacaaacttctcactactcaaacaagcaggtgacgtggaggagaatcccgggcctactagtatggactggatttggcgcatccttttccttgtcggcgctgctaccggcgcgcattccttcgaagaagtgcaactggtggaaagtggcggcggactggtgcaacctggaagaagcctgagactgtcctgtgccgccagcggctactctatcacaagcgcctactactggaactgggtccgacaggctcctggcaaaggactggaatgggtgtcctacatcagctacgacggcagaaacaactacaaccccagcctgaagaaccgcttcaccatcagccgggacaacgccaagaagtccctgtacctccagatgaacagcctgagagccgaggacacagccctgtactattgcgccaaagagggcgactacgacgtcggcaactactacgctatggactactggggccagggaaccaccgtgactgtctcttctacgcgtgcctctacaaagggaccctccgtgtttcctctggctcccagcagcaagtctacaagcggaggaacagccgctctgggctgcctggtcaaggattactttcccgagcctgtgaccgtgtcctggaatagcggagcactgacaagcggcgtgcacacctttccagccgtgctgcaaagcagcggcctgtactctctgagcagcgtggtcacagtgcctagctctagcctgggcacccagacctacatctgcaatgtgaaccacaagcctagcaacaccaaggtggacaagagagtggaacccaagagctgtgaagtgaaaaccgactccaccgaccacgtgaagcccaaagagacagagaacaccaagcagcccagcaagagctgccacaagcccaaggccatcgtgcacaccgagaaagtgaacatgatgagcctgaccgtgctgggcctgcggatgctgttcgccaaaaccgtggccgtgaacttcctgctgaccgccaagctgttcttcctc

SEQ ID NO: 2968 - DNA, 2352 bp, Artificial Sequence
  Synthetic Polynucloetide
atggccttaccagtgaccgccttgctcctgccgctggccttgctgctccacgccgccaggccggaagtgcagctggttgaatctggcggaggactggttcagcctggcggatctctgagactgtcttgtgccgccagcggcttcagcttcagcgacttttggatgagctgggtccgacaggcccctggcaaaggacttgaatgggtcgccacaatcagccaggccggcagcgagaaggactacgtggactctgtgaagggcagattcaccatcagccgggacaacgccaagaagtccctgtacctccagatgaacagcctgagagccgaggacaccgccgtgtactattgtgcctctggcgtgtacagcttcgactacagaggccagggcaccctggtcacagtctcttctggtaccggcggaggcggatctggcggcggaggtagcggtggcggaggatctgaattcgacgtggtcatgacacagaccccactgagcctgcctgtgtctctgggagatcaggccagcatctcctgtagaagcagccagagcctggtgcacagcaacggcaacacctacctgcggtggtatctccagaagcctggacagagccccaaggtgctgatctacaaggtgtccaacagagtgtccggcgtgcccgatagattttctggcagcggctctggcaccgacttcaccctgaagatcaatagagtggaagccgaggacctgggcgtgtacttctgtagccagagcacccatgtgccttggacctttggcggaggcaccaagctggaaatcaagctcgagggacagcctaaggccaatcctaccgtgacactgttccctccaagcagcgaagaactccaggccaacaaggccacacttgtgtgcctgatctccgacttctaccctggggctgtgacagtggcttggaaggccgatggatctcctgtgaaagccggcgtggaaaccaccaagccatccaagcagagcaacaacaaatacgccgccagctcctacctgagcctgacacctgagcagtggaagtcccacagatcctacagctgccaagtgacccacgaaggcagcaccgtggaaaagacagtggcccctacagagtgcagccccatcaagaccgatgtgattacaatggaccccaaggacaactgctccaaggacgccaacgataccctgctgctccagctgaccaacaccagcgcctactacatgtacttgttgctgctgctgaagtccgtggtgtacttcgccatcatcacatgctgcctgctgcggagaaccgccttctgctgcaacggcgagaagtctagggccaagcgatctggatctggagcaacaaacttctcactactcaaacaagcaggtgacgtggaggagaatcccgggcctactagtatggactggatttggcgcatccttttccttgtcggcgctgctaccggcgcgcattccttcgaaggcgtgaagctggacgagacaggcggaggacttgttcaacctggcggagccatgaagctgagctgtgtgaccagcggctttaccttcggccactactggatgaactgggtccgacagtcccctgagaaaggactggaatgggtcgcccagttcagaaacaagccctacaactacgaaacctactacagcgacagcgtgaagggcagattcaccatcagccgggacgacagcaagtccagcgtgtacctccagatgaacaacctgcgcgtggaagataccggcatctactactgtaccggggccagctacggcatggaatatctcggccagggcaccagcgtgaccgtgtctacaacgcgtgcctctacaaagggaccctccgtgtttcctctggctcccagcagcaagtctacaagcggaggaacagccgctctgggctgcctggtcaaggattactttcccgagcctgtgaccgtgtcctggaatagcggagcactgacaagcggcgtgcacacctttccagccgtgctgcaaagcagcggcctgtactctctgagcagcgtggtcacagtgcctagctctagcctgggcacccagacctacatctgcaatgtgaaccacaagcctagcaacaccaaggtggacaagagagtggaacccaagagctgtgaagtgaaaaccgactccaccgaccacgtgaagcccaaagagacagagaacaccaagcagcccagcaagagctgccacaagcccaaggccatcgtgcacaccgagaaagtgaacatgatgagcctgaccgtgctgggcctgcggatgctgttcgccaaaaccgtggccgtgaacttcctgctgaccgccaagctgttcttcctc

SEQ ID NO: 2969 - DNA, 2370 bp, Artificial Sequence
  Synthetic Polynucloetide
atggccttaccagtgaccgccttgctcctgccgctggccttgctgctccacgccgccaggccggaagtgcagctggttgaatctggcggaggactggttcagcctggcggatctctgagactgtcttgtgccgccagcggcttcagcttcagcgacttttggatgagctgggtccgacaggcccctggcaaaggacttgaatgggtcgccacaatcagccaggccggcagcgagaaggactacgtggactctgtgaagggcagattcaccatcagccgggacaacgccaagaagtccctgtacctccagatgaacagcctgagagccgaggacaccgccgtgtactattgtgcctctggcgtgtacagcttcgactacagaggccagggcaccctggtcacagtctcttctggtaccggcggaggcggatctggcggcggaggtagcggtggcggaggatctgaattccaggtgcaactggtggaatctggcggcaatctggttcagcctggcggctctctgagactgtcttgtgccgccagcggcttcaccttcggcagcttttctatgagctgggtccgacaagctcctggcggaggacttgaatgggtggcaggactgtctgccagaagcagcctgacacactacgccgactctgtgaagggcagattcaccatcagccgggacaacgccaagaacagcgtgtacctccagatgaacagcctgagagtggaagataccgccgtgtactactgcgccagaagaagctacgacagcagcggctactggggccacttctacagctacatggatgtgtggggccagggcaccctggttacagtttctctcgagggacagcctaaggccaatcctaccgtgacactgttccctccaagcagcgaagaactccaggccaacaaggccacacttgtgtgcctgatctccgacttctaccctggggctgtgacagtggcttggaaggccgatggatctcctgtgaaagccggcgtggaaaccaccaagccatccaagcagagcaacaacaaatacgccgccagctcctacctgagcctgacacctgagcagtggaagtcccacagatcctacagctgccaagtgacccacgaaggcagcaccgtggaaaagacagtggcccctacagagtgcagccccatcaagaccgatgtgattacaatggaccccaaggacaactgctccaaggacgccaacgataccctgctgctccagctgaccaacaccagcgcctactacatgtacttgttgctgctgctgaagtccgtggtgtacttcgccatcatcacatgctgcctgctgcggagaaccgccttctgctgcaacggcgagaagtctagggccaagcgatctggatctggagcaacaaacttctcactactcaaacaagcaggtgacgtggaggagaatcccgggcctactagtatggactggatttggcgcatccttttccttgtcggcgctgctaccggcgcgcattccttcgaatctgtgctgacccagcctagctccgtgtctgctgctcctggacagaaagtgaccatctcctgtagcggcagcaccagcaacatcggcaacaactacgtgtcctggtatcagcagcaccccggcaaggcccctaagctgatgatctacgacgtgtccaagaggcccagcggcgtgccagatagattttccggcagcaagagcggcaacagcgccagcctggatattagcggactccagtctgaggacgaggccgactactattgcgccgcctgggatgatagcctgagcgagtttctgtttggcaccggcaccaagctgacagtgcttggaacgcgtgcctctacaaagggaccctccgtgtttcctctggctcccagcagcaagtctacaagcggaggaacagccgctctgggctgcctggtcaaggattactttcccgagcctgtgaccgtgtcctggaatagcggagcactgacaagcggcgtgcacacctttccagccgtgctgcaaagcagcggcctgtactctctgagcagcgtggtcacagtgcctagctctagcctgggcacccagacctacatctgcaatgtgaaccacaagcctagcaacaccaaggtggacaagagagtggaacccaagagctgtgaagtgaaaaccgactccaccgaccacgtgaagcccaaagagacagagaacaccaagcagcccagcaagagctgccacaagcccaaggccatcgtgcacaccgagaaagtgaacatgatgagcctgaccgtgctgggcctgcggatgctgttcgccaaaaccgtggccgtgaacttcctgctgaccgccaagctgttcttcctc

SEQ ID NO: 2970 - DNA, 2355 bp, Artificial Sequence
  Synthetic Polynucloetide
atggccttaccagtgaccgccttgctcctgccgctggccttgctgctccacgccgccaggccggaagtgcagctggttgaatctggcggaggactggttcagcctggcggatctctgagactgtcttgtgccgccagcggcttcagcttcagcgacttttggatgagctgggtccgacaggcccctggcaaaggacttgaatgggtcgccacaatcagccaggccggcagcgagaaggactacgtggactctgtgaagggcagattcaccatcagccgggacaacgccaagaagtccctgtacctccagatgaacagcctgagagccgaggacaccgccgtgtactattgtgcctctggcgtgtacagcttcgactacagaggccagggcaccctggtcacagtctcttctggtaccggcggaggcggatctggcggcggaggtagcggtggcggaggatctgaattcgacgtggtcatgacacagagcccttctagcctgtctgccagcgtgggcgacagagtgacaatcacctgtcagagcagcctggacatcagccactacctgaactggtatcagcagaagcccggcaaggcccctaagctgctgatctacgacgccagcaatctggaaaccggcgtgcccagcagattttctggcagcggaagcggcacccacttcaccttcacaatatccagcctccagcctgaggacttcgccacctactactgccagcagtacgacaacctgcctctgacctttggcggaggcaccaagctggaaatcaagagactcgagggacagcctaaggccaatcctaccgtgacactgttccctccaagcagcgaagaactccaggccaacaaggccacacttgtgtgcctgatctccgacttctaccctggggctgtgacagtggcttggaaggccgatggatctcctgtgaaagccggcgtggaaaccaccaagccatccaagcagagcaacaacaaatacgccgccagctcctacctgagcctgacacctgagcagtggaagtcccacagatcctacagctgccaagtgacccacgaaggcagcaccgtggaaaagacagtggcccctacagagtgcagccccatcaagaccgatgtgattacaatggaccccaaggacaactgctccaaggacgccaacgataccctgctgctccagctgaccaacaccagcgcctactacatgtacttgttgctgctgctgaagtccgtggtgtacttcgccatcatcacatgctgcctgctgcggagaaccgccttctgctgcaacggcgagaagtctagggccaagcgatctggatctggagcaacaaacttctcactactcaaacaagcaggtgacgtggaggagaatcccgggcctactagtatggactggatttggcgcatccttttccttgtcggcgctgctaccggcgcgcattccttcgaacaagttcaactggttcaatcaggcggaggcgtggtgcaacctggtggctctctgagagtgtcttgtgctgcctctggcgtgaccctgagcgactatggaatgcactgggtccgacaggcccctggcaaaggacttgagtgggtcgccttcatcagaaacgacggcagcgacaagtattacgccgacagcgtgaagggcagattcaccatcagccgggacaacagcgagaaaaccgtgtctctccagatgtctagcctgagagccgaggacaccgccgtgtactactgtgccaagaatggcgagagcggccctctggactactggtatctggatctgtggggcagaggcaccctggtcacagtctcttctacgcgtgcctctacaaagggaccctccgtgtttcctctggctcccagcagcaagtctacaagcggaggaacagccgctctgggctgcctggtcaaggattactttcccgagcctgtgaccgtgtcctggaatagcggagcactgacaagcggcgtgcacacctttccagccgtgctgcaaagcagcggcctgtactctctgagcagcgtggtcacagtgcctagctctagcctgggcacccagacctacatctgcaatgtgaaccacaagcctagcaacaccaaggtggacaagagagtggaacccaagagctgtgaagtgaaaaccgactccaccgaccacgtgaagcccaaagagacagagaacaccaagcagcccagcaagagctgccacaagcccaaggccatcgtgcacaccgagaaagtgaacatgatgagcctgaccgtgctgggcctgcggatgctgttcgccaaaaccgtggccgtgaacttcctgctgaccgccaagctgttcttcctc

SEQ ID NO: 2971 - DNA, 2367 bp, Artificial Sequence
  Synthetic Polynucloetide
atggccttaccagtgaccgccttgctcctgccgctggccttgctgctccacgccgccaggccggaagtgcagctggttgaatctggcggaggactggttcagcctggcggatctctgagactgtcttgtgccgccagcggcttcagcttcagcgacttttggatgagctgggtccgacaggcccctggcaaaggacttgaatgggtcgccacaatcagccaggccggcagcgagaaggactacgtggactctgtgaagggcagattcaccatcagccgggacaacgccaagaagtccctgtacctccagatgaacagcctgagagccgaggacaccgccgtgtactattgtgcctctggcgtgtacagcttcgactacagaggccagggcaccctggtcacagtctcttctggtaccggcggaggcggatctggcggcggaggtagcggtggcggaggatctgaattcagctacgagctgacacagcctccatccgtgtctggcacacctggacagagagtggctatctcctgtagcggcagcagcagcaacatcggcaccagaatggtcacctggtatcagcacgtgccaggcacagcccctaagctgctgatcttcaacaacaaccagcggcctagcggcgtgcccgatagattttctgccagcaagagcggcacaagcgccagcctggctatcatcggactccagtctgacgacgaggccgactactactgtgccacctgggacgacaacgtgaagtcctacgtgttcggcaccggcaccaaagtgacagtgcttggaagtagactcgagggacagcctaaggccaatcctaccgtgacactgttccctccaagcagcgaagaactccaggccaacaaggccacacttgtgtgcctgatctccgacttctaccctggggctgtgacagtggcttggaaggccgatggatctcctgtgaaagccggcgtggaaaccaccaagccatccaagcagagcaacaacaaatacgccgccagctcctacctgagcctgacacctgagcagtggaagtcccacagatcctacagctgccaagtgacccacgaaggcagcaccgtggaaaagacagtggcccctacagagtgcagccccatcaagaccgatgtgattacaatggaccccaaggacaactgctccaaggacgccaacgataccctgctgctccagctgaccaacaccagcgcctactacatgtacttgttgctgctgctgaagtccgtggtgtacttcgccatcatcacatgctgcctgctgcggagaaccgccttctgctgcaacggcgagaagtctagggccaagcgatctggatctggagcaacaaacttctcactactcaaacaagcaggtgacgtggaggagaatcccgggcctactagtatggactggatttggcgcatccttttccttgtcggcgctgctaccggcgcgcattccttcgaacttgaaatggcccaggttcagctccagcagtggggagctggactgctgaagcctagcgagacactgagcctgacctgtgctgtgtacggcggcagcttcagcggctactactggtcctggatcagacagcctcctggcaaaggactggaatggatcggcgagatcaaccacagcggctccaccaactacaaccccagcctgaagtccagagtgaccatcagcgtggacaccagcaagaaccagttctccctgaagctgagcagcgtgacagccgctgataccgccgtgtactattgcgctagagcccctcagtcttggtacgtgggagatgtgtggggccagggcacactggttacagtgtcatctacgcgtgcctctacaaagggaccctccgtgtttcctctggctcccagcagcaagtctacaagcggaggaacagccgctctgggctgcctggtcaaggattactttcccgagcctgtgaccgtgtcctggaatagcggagcactgacaagcggcgtgcacacctttccagccgtgctgcaaagcagcggcctgtactctctgagcagcgtggtcacagtgcctagctctagcctgggcacccagacctacatctgcaatgtgaaccacaagcctagcaacaccaaggtggacaagagagtggaacccaagagctgtgaagtgaaaaccgactccaccgaccacgtgaagcccaaagagacagagaacaccaagcagcccagcaagagctgccacaagcccaaggccatcgtgcacaccgagaaagtgaacatgatgagcctgaccgtgctgggcctgcggatgctgttcgccaaaaccgtggccgtgaacttcctgctgaccgccaagctgttcttcctc

SEQ ID NO: 2972 - DNA, 2358 bp, Artificial Sequence
  Synthetic Polynucloetide
atggccttaccagtgaccgccttgctcctgccgctggccttgctgctccacgccgccaggccggaagtgcagctggttgaatctggcggaggactggttcagcctggcggatctctgagactgtcttgtgccgccagcggcttcagcttcagcgacttttggatgagctgggtccgacaggcccctggcaaaggacttgaatgggtcgccacaatcagccaggccggcagcgagaaggactacgtggactctgtgaagggcagattcaccatcagccgggacaacgccaagaagtccctgtacctccagatgaacagcctgagagccgaggacaccgccgtgtactattgtgcctctggcgtgtacagcttcgactacagaggccagggcaccctggtcacagtctcttctggtaccggcggaggcggatctggcggcggaggtagcggtggcggaggatctgaattccagtctgtgctgacacagcctcctagcctgtctgtggcccctggaaagacagccagcatcacatgcggcggcaacaacatcggcatgaagtccgtgcactggtatcagcagaggccaggacaggctcctgtgctggtcatctactacgacagcgacagaccctctggcatccccggcagattttccggcagcaactctggcaataccgccacactgaccatctccagagtggaagctggcgacgaggccgactactactgccaagtgtgggataccaccggcgatcaccctggctatgtgtttggcaccggcaccaaagtgacagtgcttctcgagggacagcctaaggccaatcctaccgtgacactgttccctccaagcagcgaagaactccaggccaacaaggccacacttgtgtgcctgatctccgacttctaccctggggctgtgacagtggcttggaaggccgatggatctcctgtgaaagccggcgtggaaaccaccaagccatccaagcagagcaacaacaaatacgccgccagctcctacctgagcctgacacctgagcagtggaagtcccacagatcctacagctgccaagtgacccacgaaggcagcaccgtggaaaagacagtggcccctacagagtgcagccccatcaagaccgatgtgattacaatggaccccaaggacaactgctccaaggacgccaacgataccctgctgctccagctgaccaacaccagcgcctactacatgtacttgttgctgctgctgaagtccgtggtgtacttcgccatcatcacatgctgcctgctgcggagaaccgccttctgctgcaacggcgagaagtctagggccaagcgatctggatctggagcaacaaacttctcactactcaaacaagcaggtgacgtggaggagaatcccgggcctactagtatggactggatttggcgcatccttttccttgtcggcgctgctaccggcgcgcattccttcgaacaagttcaactggttcagagcggagccgaagtgaagaaacctggcagcagcgtgaaggtgtcctgcaaagcaagcggcggcacctttagcagctacgccatctcttgggtccgacaggcacctggacaaggactggaatggatgggcggcatcatccccatcttcggcacagccaattacgcccagaaattccagggcagagtgaccatcaccgccgacgagtctacaagcaccgcctacatggaactgagcagcctgagaagcgaggacaccgccgtgtactattgtgccagaggcgtgtacggctacagcggctctgccccttatgatgagtggggccagggaaccctggtcaccgtttcttctacgcgtgcctctacaaagggaccctccgtgtttcctctggctcccagcagcaagtctacaagcggaggaacagccgctctgggctgcctggtcaaggattactttcccgagcctgtgaccgtgtcctggaatagcggagcactgacaagcggcgtgcacacctttccagccgtgctgcaaagcagcggcctgtactctctgagcagcgtggtcacagtgcctagctctagcctgggcacccagacctacatctgcaatgtgaaccacaagcctagcaacaccaaggtggacaagagagtggaacccaagagctgtgaagtgaaaaccgactccaccgaccacgtgaagcccaaagagacagagaacaccaagcagcccagcaagagctgccacaagcccaaggccatcgtgcacaccgagaaagtgaacatgatgagcctgaccgtgctgggcctgcggatgctgttcgccaaaaccgtggccgtgaacttcctgctgaccgccaagctgttcttcctc

SEQ ID NO: 2973 - DNA, 2352 bp, Artificial Sequence
  Synthetic Polynucloetide
atggccttaccagtgaccgccttgctcctgccgctggccttgctgctccacgccgccaggccggaagtgcagctggttgaatctggcggaggactggttcagcctggcggatctctgagactgtcttgtgccgccagcggcttcagcttcagcgacttttggatgagctgggtccgacaggcccctggcaaaggacttgaatgggtcgccacaatcagccaggccggcagcgagaaggactacgtggactctgtgaagggcagattcaccatcagccgggacaacgccaagaagtccctgtacctccagatgaacagcctgagagccgaggacaccgccgtgtactattgtgcctctggcgtgtacagcttcgactacagaggccagggcaccctggtcacagtctcttctggtaccggcggaggcggatctggcggcggaggtagcggtggcggaggatctgaattcgaggtgcaactggttgagtctggcggaggactggtgcagcctggaagaagcctgagactgtcttgtgccgccagcggcttcaccttcgacgattatgccatgcactgggtccgacaggcccctggcaaaggacttgaatgggtgtccggcatctcctggaacagcggctctatcggctacgccgattccgtgaagggcagattcaccatcagccgggacaacgccaagaacagcctgtacctccagatgaactccctgagagccgaggacacagccctgtactactgcgccaaagacaaaggcggaggctactacgacttttggagcggcagcgattattggggccagggcacactggtcacagtgtctagcctcgagggacagcctaaggccaatcctaccgtgacactgttccctccaagcagcgaagaactccaggccaacaaggccacacttgtgtgcctgatctccgacttctaccctggggctgtgacagtggcttggaaggccgatggatctcctgtgaaagccggcgtggaaaccaccaagccatccaagcagagcaacaacaaatacgccgccagctcctacctgagcctgacacctgagcagtggaagtcccacagatcctacagctgccaagtgacccacgaaggcagcaccgtggaaaagacagtggcccctacagagtgcagccccatcaagaccgatgtgattacaatggaccccaaggacaactgctccaaggacgccaacgataccctgctgctccagctgaccaacaccagcgcctactacatgtacttgttgctgctgctgaagtccgtggtgtacttcgccatcatcacatgctgcctgctgcggagaaccgccttctgctgcaacggcgagaagtctagggccaagcgatctggatctggagcaacaaacttctcactactcaaacaagcaggtgacgtggaggagaatcccgggcctactagtatggactggatttggcgcatccttttccttgtcggcgctgctaccggcgcgcattccttcgaatcttctgagctgacacaggaccctgccgtgtctgttgctctgggccagacagtgcggattacctgtcagggcgatagcctgagaagctactacgcctcctggtatcagcagaagccaggccaggctcctgtgctggtcatctacggcaagaacaacagacccagcggcatccccgatagattcagcggaagcagctctggcaataccgccagcctgacaattactggcgctcaggccgaggacgaggccgactactactgcaacagcagagatagcagcggctgggttttcggcggaggcacaaaactgacagtgctgacgcgtgcctctacaaagggaccctccgtgtttcctctggctcccagcagcaagtctacaagcggaggaacagccgctctgggctgcctggtcaaggattactttcccgagcctgtgaccgtgtcctggaatagcggagcactgacaagcggcgtgcacacctttccagccgtgctgcaaagcagcggcctgtactctctgagcagcgtggtcacagtgcctagctctagcctgggcacccagacctacatctgcaatgtgaaccacaagcctagcaacaccaaggtggacaagagagtggaacccaagagctgtgaagtgaaaaccgactccaccgaccacgtgaagcccaaagagacagagaacaccaagcagcccagcaagagctgccacaagcccaaggccatcgtgcacaccgagaaagtgaacatgatgagcctgaccgtgctgggcctgcggatgctgttcgccaaaaccgtggccgtgaacttcctgctgaccgccaagctgttcttcctc

SEQ ID NO: 2974 - DNA, 2379 bp, Artificial Sequence
  Synthetic Polynucloetide
atggccttaccagtgaccgccttgctcctgccgctggccttgctgctccacgccgccaggccggaagtgcagctggttgaatctggcggaggactggttcagcctggcggatctctgagactgtcttgtgccgccagcggcttcagcttcagcgacttttggatgagctgggtccgacaggcccctggcaaaggacttgaatgggtcgccacaatcagccaggccggcagcgagaaggactacgtggactctgtgaagggcagattcaccatcagccgggacaacgccaagaagtccctgtacctccagatgaacagcctgagagccgaggacaccgccgtgtactattgtgcctctggcgtgtacagcttcgactacagaggccagggcaccctggtcacagtctcttctggtaccggcggaggcggatctggcggcggaggtagcggtggcggaggatctgaattcgaagtgcagctccagcagtctggacctggcctggttaagcctagccagacactgagcctgacctgtgccatcagcggcgatagcgtgctgagcaacagcgacacctggaactggatcagacagagccctagcagaggactggaatggctgggcagaacctaccacagaagcacttggtacgacgactacgccagctctgtgcggggcagagtgtccatcaatgtggacaccagcaagaaccagtacagcctgcaactgaacgccgtgacacctgaggataccggcgtgtactactgcgccagagacagactccaggacggcaactcttggagcgacgcctttgatgtgtggggccagggcacaatggtcaccgtttctagcctcgagggacagcctaaggccaatcctaccgtgacactgttccctccaagcagcgaagaactccaggccaacaaggccacacttgtgtgcctgatctccgacttctaccctggggctgtgacagtggcttggaaggccgatggatctcctgtgaaagccggcgtggaaaccaccaagccatccaagcagagcaacaacaaatacgccgccagctcctacctgagcctgacacctgagcagtggaagtcccacagatcctacagctgccaagtgacccacgaaggcagcaccgtggaaaagacagtggcccctacagagtgcagccccatcaagaccgatgtgattacaatggaccccaaggacaactgctccaaggacgccaacgataccctgctgctccagctgaccaacaccagcgcctactacatgtacttgttgctgctgctgaagtccgtggtgtacttcgccatcatcacatgctgcctgctgcggagaaccgccttctgctgcaacggcgagaagtctagggccaagcgatctggatctggagcaacaaacttctcactactcaaacaagcaggtgacgtggaggagaatcccgggcctactagtatggactggatttggcgcatccttttccttgtcggcgctgctaccggcgcgcattccttcgaacaatctgctctgacacagcctgccagcgtgtcaggatctcctggacagagcatcaccatctcttgcaccggcaccagctctgatgtcggcggctacaattacgtgtcctggtatcagcagcaccccggcaaggcccctaagctgatgatctacgacgtgtccaacagacccagcggcgtgtccaatagattctccggcagcaagagcggcaacaccgccagcctgacaatttctggactgcaagccgaggacgaggccgactactactgtagcagctacaccagcagcagcacactggtgtacgtgttcggcacaggcaccaaagtgaccgtgcttacgcgtgcctctacaaagggaccctccgtgtttcctctggctcccagcagcaagtctacaagcggaggaacagccgctctgggctgcctggtcaaggattactttcccgagcctgtgaccgtgtcctggaatagcggagcactgacaagcggcgtgcacacctttccagccgtgctgcaaagcagcggcctgtactctctgagcagcgtggtcacagtgcctagctctagcctgggcacccagacctacatctgcaatgtgaaccacaagcctagcaacaccaaggtggacaagagagtggaacccaagagctgtgaagtgaaaaccgactccaccgaccacgtgaagcccaaagagacagagaacaccaagcagcccagcaagagctgccacaagcccaaggccatcgtgcacaccgagaaagtgaacatgatgagcctgaccgtgctgggcctgcggatgctgttcgccaaaaccgtggccgtgaacttcctgctgaccgccaagctgttcttcctc

SEQ ID NO: 2975 - DNA, 2313 bp, Artificial Sequence
  Synthetic Polynucloetide
atggccttaccagtgaccgccttgctcctgccgctggccttgctgctccacgccgccaggccggaagtgcagctggttgaatctggcggaggactggttcagcctggcggatctctgagactgtcttgtgccgccagcggcttcagcttcagcgacttttggatgagctgggtccgacaggcccctggcaaaggacttgaatgggtcgccacaatcagccaggccggcagcgagaaggactacgtggactctgtgaagggcagattcaccatcagccgggacaacgccaagaagtccctgtacctccagatgaacagcctgagagccgaggacaccgccgtgtactattgtgcctctggcgtgtacagcttcgactacagaggccagggcaccctggtcacagtctcttctggtaccggcggaggcggatctggcggcggaggtagcggtggcggaggatctgaattccaggtgcaactggttcagtctggggccgaagtgaagaaacctggggcctctgtgaaggtgtcctgcaaggcttccggctacacctttaccagctacgacatcaactgggtccgacaggccacaggccaaggactggaatggatgggctggatgaaccccaacagcggcaataccggctacgcccagaaattccagggcagagtgaccatgaccagaaacaccagcatcagcaccgcctacatggaactgagcagcctgagaagcgaggacaccgccgtgtactattgcgccagaggcgacagcaccaaggtggaaatcaaactcgagggacagcctaaggccaatcctaccgtgacactgttccctccaagcagcgaagaactccaggccaacaaggccacacttgtgtgcctgatctccgacttctaccctggggctgtgacagtggcttggaaggccgatggatctcctgtgaaagccggcgtggaaaccaccaagccatccaagcagagcaacaacaaatacgccgccagctcctacctgagcctgacacctgagcagtggaagtcccacagatcctacagctgccaagtgacccacgaaggcagcaccgtggaaaagacagtggcccctacagagtgcagccccatcaagaccgatgtgattacaatggaccccaaggacaactgctccaaggacgccaacgataccctgctgctccagctgaccaacaccagcgcctactacatgtacttgttgctgctgctgaagtccgtggtgtacttcgccatcatcacatgctgcctgctgcggagaaccgccttctgctgcaacggcgagaagtctagggccaagcgatctggatctggagcaacaaacttctcactactcaaacaagcaggtgacgtggaggagaatcccgggcctactagtatggactggatttggcgcatccttttccttgtcggcgctgctaccggcgcgcattccttcgaacaatctgtgctgacccagcctagatccgtgtctggctctcctggacagagcgtgaccatctcttgtaccggcaccagctctgatgtcggcggctacaattacgtgtcctggtatcagcagcaccccggcgaagcccctaagctgattatctacgacgccgacaagcggcccagcggcatcagcaatagattcagctctggcaagagcggcaacaccgccagcctgacaatcagcggactccaggtggaagatgaggccgactactactgctgctcctatgccggcggaagcacctgggttttcggaggcggtacaaaagtgaccgtgctgacgcgtgcctctacaaagggaccctccgtgtttcctctggctcccagcagcaagtctacaagcggaggaacagccgctctgggctgcctggtcaaggattactttcccgagcctgtgaccgtgtcctggaatagcggagcactgacaagcggcgtgcacacctttccagccgtgctgcaaagcagcggcctgtactctctgagcagcgtggtcacagtgcctagctctagcctgggcacccagacctacatctgcaatgtgaaccacaagcctagcaacaccaaggtggacaagagagtggaacccaagagctgtgaagtgaaaaccgactccaccgaccacgtgaagcccaaagagacagagaacaccaagcagcccagcaagagctgccacaagcccaaggccatcgtgcacaccgagaaagtgaacatgatgagcctgaccgtgctgggcctgcggatgctgttcgccaaaaccgtggccgtgaacttcctgctgaccgccaagctgttcttcctc

SEQ ID NO: 2976 - DNA, 2379 bp, Artificial Sequence
  Synthetic Polynucloetide
atggccttaccagtgaccgccttgctcctgccgctggccttgctgctccacgccgccaggccggaagtgcagctggttgaatctggcggaggactggttcagcctggcggatctctgagactgtcttgtgccgccagcggcttcagcttcagcgacttttggatgagctgggtccgacaggcccctggcaaaggacttgaatgggtcgccacaatcagccaggccggcagcgagaaggactacgtggactctgtgaagggcagattcaccatcagccgggacaacgccaagaagtccctgtacctccagatgaacagcctgagagccgaggacaccgccgtgtactattgtgcctctggcgtgtacagcttcgactacagaggccagggcaccctggtcacagtctcttctggtaccggcggaggcggatctggcggcggaggtagcggtggcggaggatctgaattcgaagtgcagctccagcagtctggacctggcctggttaagcctagccagacactgagcctgacctgtgccatcagcggcgatagcgtgtcctctaatagcgccgcctggaactggatcagacagagccctagcagaggactggaatggctgggcagaacctactaccgcagcaagtggtacagcgactacgccgtgtccgtgaagtcccggatcaccatcaatcccgacaccagcaagaaccagttcagcctgcaactgaacagcgtgacccctgaggataccgccgtgtactactgcgccagagatccctacgacttttggagcggctaccccgacgcctttgacatctggggacagggcacaatggtcaccgtttctagcctcgagggacagcctaaggccaatcctaccgtgacactgttccctccaagcagcgaagaactccaggccaacaaggccacacttgtgtgcctgatctccgacttctaccctggggctgtgacagtggcttggaaggccgatggatctcctgtgaaagccggcgtggaaaccaccaagccatccaagcagagcaacaacaaatacgccgccagctcctacctgagcctgacacctgagcagtggaagtcccacagatcctacagctgccaagtgacccacgaaggcagcaccgtggaaaagacagtggcccctacagagtgcagccccatcaagaccgatgtgattacaatggaccccaaggacaactgctccaaggacgccaacgataccctgctgctccagctgaccaacaccagcgcctactacatgtacttgttgctgctgctgaagtccgtggtgtacttcgccatcatcacatgctgcctgctgcggagaaccgccttctgctgcaacggcgagaagtctagggccaagcgatctggatctggagcaacaaacttctcactactcaaacaagcaggtgacgtggaggagaatcccgggcctactagtatggactggatttggcgcatccttttccttgtcggcgctgctaccggcgcgcattccttcgaacaatctgctctgacacagcctgccagcgtgtcaggatctcctggacagagcatcaccatctcttgcaccggcaccagctctgatgtcggcggctacaattacgtgtcctggtatcagcagcaccccggcaaggcccctaaagtgattatcagcgaagtgaacaacagacccagcggcgtgtcccacagattcagcggctctaagtctggcaacaccgccagcctgacaatctctggactgcaagccgaggacgaggccgactacttctgtagcagctacaccagcggcagaaccctgtacgtgttcggcacaggcagcaaagtgacagtgctgggaacgcgtgcctctacaaagggaccctccgtgtttcctctggctcccagcagcaagtctacaagcggaggaacagccgctctgggctgcctggtcaaggattactttcccgagcctgtgaccgtgtcctggaatagcggagcactgacaagcggcgtgcacacctttccagccgtgctgcaaagcagcggcctgtactctctgagcagcgtggtcacagtgcctagctctagcctgggcacccagacctacatctgcaatgtgaaccacaagcctagcaacaccaaggtggacaagagagtggaacccaagagctgtgaagtgaaaaccgactccaccgaccacgtgaagcccaaagagacagagaacaccaagcagcccagcaagagctgccacaagcccaaggccatcgtgcacaccgagaaagtgaacatgatgagcctgaccgtgctgggcctgcggatgctgttcgccaaaaccgtggccgtgaacttcctgctgaccgccaagctgttcttcctc

SEQ ID NO: 2977 - DNA, 2376 bp, Artificial Sequence
  Synthetic Polynucloetide
atggccttaccagtgaccgccttgctcctgccgctggccttgctgctccacgccgccaggccggaagtgcagctggttgaatctggcggaggactggttcagcctggcggatctctgagactgtcttgtgccgccagcggcttcagcttcagcgacttttggatgagctgggtccgacaggcccctggcaaaggacttgaatgggtcgccacaatcagccaggccggcagcgagaaggactacgtggactctgtgaagggcagattcaccatcagccgggacaacgccaagaagtccctgtacctccagatgaacagcctgagagccgaggacaccgccgtgtactattgtgcctctggcgtgtacagcttcgactacagaggccagggcaccctggtcacagtctcttctggtaccggcggaggcggatctggcggcggaggtagcggtggcggaggatctgaattccaatctgctctgacacagcctgccagcgcctctggatctcctggacagagcgtgaccatctcctgtaccggcacctcttctgatgtcggcggctacaactacgtgtcctggtatcagcagcaccccggcaaggcccctaagctgatgatctacgacgtgtccaacagacccagcggcgtgtccaatagattctccggcagcaagagcggcaacaccgccagcctgacaatttctggactgcaagccgaggacgaggccgactactactgtagcagctacaccagcagcagcacactgtacgtgttcggcacaggcacccagctcacagttcttctcgagggacagcctaaggccaatcctaccgtgacactgttccctccaagcagcgaagaactccaggccaacaaggccacacttgtgtgcctgatctccgacttctaccctggggctgtgacagtggcttggaaggccgatggatctcctgtgaaagccggcgtggaaaccaccaagccatccaagcagagcaacaacaaatacgccgccagctcctacctgagcctgacacctgagcagtggaagtcccacagatcctacagctgccaagtgacccacgaaggcagcaccgtggaaaagacagtggcccctacagagtgcagccccatcaagaccgatgtgattacaatggaccccaaggacaactgctccaaggacgccaacgataccctgctgctccagctgaccaacaccagcgcctactacatgtacttgttgctgctgctgaagtccgtggtgtacttcgccatcatcacatgctgcctgctgcggagaaccgccttctgctgcaacggcgagaagtctagggccaagcgatctggatctggagcaacaaacttctcactactcaaacaagcaggtgacgtggaggagaatcccgggcctactagtatggactggatttggcgcatccttttccttgtcggcgctgctaccggcgcgcattccttcgaagaagtgcagctccagcagtctggacctggcctggttaagcctagccagacactgagcctgacctgtgccatcagcggcgattccatgctgagcaacagcgacacctggaactggatcagacagagccccagcagaggcctggaatggctgggcagaacataccacagaagcacttggtacgacgactacgccagctctgtgcggggcagagtgtccatcaatgtggacaccagcaagaaccagtacagcctgcaactgaacgccgtgacacctgaggataccggcgtgtactactgtgccagagtgcggctccaggacggcaattcttggagcgacgcctttgatgtgtggggccagggcacaatggtcaccgtttctagcacgcgtgcctctacaaagggaccctccgtgtttcctctggctcccagcagcaagtctacaagcggaggaacagccgctctgggctgcctggtcaaggattactttcccgagcctgtgaccgtgtcctggaatagcggagcactgacaagcggcgtgcacacctttccagccgtgctgcaaagcagcggcctgtactctctgagcagcgtggtcacagtgcctagctctagcctgggcacccagacctacatctgcaatgtgaaccacaagcctagcaacaccaaggtggacaagagagtggaacccaagagctgtgaagtgaaaaccgactccaccgaccacgtgaagcccaaagagacagagaacaccaagcagcccagcaagagctgccacaagcccaaggccatcgtgcacaccgagaaagtgaacatgatgagcctgaccgtgctgggcctgcggatgctgttcgccaaaaccgtggccgtgaacttcctgctgaccgccaagctgttcttcctc

SEQ ID NO: 2978 - DNA, 2376 bp, Artificial Sequence
  Synthetic Polynucloetide
atggccttaccagtgaccgccttgctcctgccgctggccttgctgctccacgccgccaggccggaagtgcagctggttgaatctggcggaggactggttcagcctggcggatctctgagactgtcttgtgccgccagcggcttcagcttcagcgacttttggatgagctgggtccgacaggcccctggcaaaggacttgaatgggtcgccacaatcagccaggccggcagcgagaaggactacgtggactctgtgaagggcagattcaccatcagccgggacaacgccaagaagtccctgtacctccagatgaacagcctgagagccgaggacaccgccgtgtactattgtgcctctggcgtgtacagcttcgactacagaggccagggcaccctggtcacagtctcttctggtaccggcggaggcggatctggcggcggaggtagcggtggcggaggatctgaattcgacgtgatgctgacccagacaccactgagcctgcctgtgtctctgggcgatcaggccagcatctcctgtagaagcagccagagcatcctgcacagcaccggcgatacctacctggaatggtatctccagaagcctggacagagccccaagctgctgattaacaaggtgtccaaccggctgagcggcgtgcccgatagattttctggcagcggctctggcaccgacttcaccctgaagatcagcagagtggaagccgaggacctgggcgtgtactactgcttccaaggcagccatgttccttggacctttggcggaggcaccaagctggaaatcaagagagctgacgccgctcctaccgtgtccatctttcctctcgagggacagcctaaggccaatcctaccgtgacactgttccctccaagcagcgaagaactccaggccaacaaggccacacttgtgtgcctgatctccgacttctaccctggggctgtgacagtggcttggaaggccgatggatctcctgtgaaagccggcgtggaaaccaccaagccatccaagcagagcaacaacaaatacgccgccagctcctacctgagcctgacacctgagcagtggaagtcccacagatcctacagctgccaagtgacccacgaaggcagcaccgtggaaaagacagtggcccctacagagtgcagccccatcaagaccgatgtgattacaatggaccccaaggacaactgctccaaggacgccaacgataccctgctgctccagctgaccaacaccagcgcctactacatgtacttgttgctgctgctgaagtccgtggtgtacttcgccatcatcacatgctgcctgctgcggagaaccgccttctgctgcaacggcgagaagtctagggccaagcgatctggatctggagcaacaaacttctcactactcaaacaagcaggtgacgtggaggagaatcccgggcctactagtatggactggatttggcgcatccttttccttgtcggcgctgctaccggcgcgcattccttcgaacaagtgaagctccagcagagcggccctagccttgtgaaacctggcgcttccgtgaagatgagctgcaaggccagcggctacaccttcaccgatttctacatgaaatgggtcaagcagagccacggcaagtctctggaatggatcggcgacatcaaccccaacatcggagacaccttctacaaccagaagttcaagggcaaagccacactgaccgtggacaagagcagcagcaccgcctacatgcagctcaacagcctgaccagcgaggacagcgccgtgtacttttgttccgtgggctacttcgacgtgtggggagccggaacaaccgtgacagtctcttctacgcgtgcctctacaaagggaccctccgtgtttcctctggctcccagcagcaagtctacaagcggaggaacagccgctctgggctgcctggtcaaggattactttcccgagcctgtgaccgtgtcctggaatagcggagcactgacaagcggcgtgcacacctttccagccgtgctgcaaagcagcggcctgtactctctgagcagcgtggtcacagtgcctagctctagcctgggcacccagacctacatctgcaatgtgaaccacaagcctagcaacaccaaggtggacaagagagtggaacccaagagctgtgaagtgaaaaccgactccaccgaccacgtgaagcccaaagagacagagaacaccaagcagcccagcaagagctgccacaagcccaaggccatcgtgcacaccgagaaagtgaacatgatgagcctgaccgtgctgggcctgcggatgctgttcgccaaaaccgtggccgtgaacttcctgctgaccgccaagctgttcttcctc

SEQ ID NO: 2979 - DNA, 2364 bp, Artificial Sequence
  Synthetic Polynucloetide
atggccttaccagtgaccgccttgctcctgccgctggccttgctgctccacgccgccaggccggaagtgcagctggttgaatctggcggaggactggttcagcctggcggatctctgagactgtcttgtgccgccagcggcttcagcttcagcgacttttggatgagctgggtccgacaggcccctggcaaaggacttgaatgggtcgccacaatcagccaggccggcagcgagaaggactacgtggactctgtgaagggcagattcaccatcagccgggacaacgccaagaagtccctgtacctccagatgaacagcctgagagccgaggacaccgccgtgtactattgtgcctctggcgtgtacagcttcgactacagaggccagggcaccctggtcacagtctcttctggtaccggcggaggcggatctggcggcggaggtagcggtggcggaggatctgaattcgagatcgtgctgacacagtctcccgccacactgtcactgtctccaggcgaaagagccacactgagctgtagagccagccagagcgtgtccatctacctggcctggtatcagcagaagcctggacaggctccccggctgctgatctacgatgccagcaatagagccacaggcatccccgccagattttctggctctggcagcggcaccgatttcaccctgaccataagcagcctggaacctgaggacttcgccgtgtactactgccagcagagaagcaactggcctcctttcacattcggccctggcaccaaggtggacatcaaactcgagggacagcctaaggccaatcctaccgtgacactgttccctccaagcagcgaagaactccaggccaacaaggccacacttgtgtgcctgatctccgacttctaccctggggctgtgacagtggcttggaaggccgatggatctcctgtgaaagccggcgtggaaaccaccaagccatccaagcagagcaacaacaaatacgccgccagctcctacctgagcctgacacctgagcagtggaagtcccacagatcctacagctgccaagtgacccacgaaggcagcaccgtggaaaagacagtggcccctacagagtgcagccccatcaagaccgatgtgattacaatggaccccaaggacaactgctccaaggacgccaacgataccctgctgctccagctgaccaacaccagcgcctactacatgtacttgttgctgctgctgaagtccgtggtgtacttcgccatcatcacatgctgcctgctgcggagaaccgccttctgctgcaacggcgagaagtctagggccaagcgatctggatctggagcaacaaacttctcactactcaaacaagcaggtgacgtggaggagaatcccgggcctactagtatggactggatttggcgcatccttttccttgtcggcgctgctaccggcgcgcattccttcgaacaggtgcagcttgttgaaagcggaggcggagttgtgcagcctggcagaagtctgagactgtcttgtgccgccagcggcttcaccttcagcagctatggaatgcactgggtccgacaggcccctggcaaaggacttgaatgggttgccgtgatctgggacgacggcagcaacaagtattacgtggacagcgtgaagggcagattcaccatcagccgggacaacagcaagaacaccctgtacctccagatgaacagcctgagagccgaggacacagccgtgtattattgcgccagagatgactactacggcagcggctccttcaacagctactatggcacagacgtgtggggccagggcacaacagttaccgttagctctacgcgtgcctctacaaagggaccctccgtgtttcctctggctcccagcagcaagtctacaagcggaggaacagccgctctgggctgcctggtcaaggattactttcccgagcctgtgaccgtgtcctggaatagcggagcactgacaagcggcgtgcacacctttccagccgtgctgcaaagcagcggcctgtactctctgagcagcgtggtcacagtgcctagctctagcctgggcacccagacctacatctgcaatgtgaaccacaagcctagcaacaccaaggtggacaagagagtggaacccaagagctgtgaagtgaaaaccgactccaccgaccacgtgaagcccaaagagacagagaacaccaagcagcccagcaagagctgccacaagcccaaggccatcgtgcacaccgagaaagtgaacatgatgagcctgaccgtgctgggcctgcggatgctgttcgccaaaaccgtggccgtgaacttcctgctgaccgccaagctgttcttcctc

SEQ ID NO: 2980 - DNA, 2319 bp, Artificial Sequence
  Synthetic Polynucloetide
atggccttaccagtgaccgccttgctcctgccgctggccttgctgctccacgccgccaggccggaagtgcagctggttgaatctggcggaggactggttcagcctggcggatctctgagactgtcttgtgccgccagcggcttcagcttcagcgacttttggatgagctgggtccgacaggcccctggcaaaggacttgaatgggtcgccacaatcagccaggccggcagcgagaaggactacgtggactctgtgaagggcagattcaccatcagccgggacaacgccaagaagtccctgtacctccagatgaacagcctgagagccgaggacaccgccgtgtactattgtgcctctggcgtgtacagcttcgactacagaggccagggcaccctggtcacagtctcttctggtaccggcggaggcggatctggcggcggaggtagcggtggcggaggatctgaattcgacatccagatgacacagagccctagcagcctgtctgccagcgtgggagacagagtgaccatcacctgtagagccagccagggcatctcttcttggctggcctggtatcagcagaagcccgagaaggcccctaagagcctgatctatgccgccagctctctccagagcggagtgcctagcagattttctggcagcggctccggcaccgatttcaccctgacaatatccagcctccagcctgaggacttcgccacctactactgccagcagtacaacagctacccctacaccttcggccagggcaccaagctggaaatcaaactcgagggacagcctaaggccaatcctaccgtgacactgttccctccaagcagcgaagaactccaggccaacaaggccacacttgtgtgcctgatctccgacttctaccctggggctgtgacagtggcttggaaggccgatggatctcctgtgaaagccggcgtggaaaccaccaagccatccaagcagagcaacaacaaatacgccgccagctcctacctgagcctgacacctgagcagtggaagtcccacagatcctacagctgccaagtgacccacgaaggcagcaccgtggaaaagacagtggcccctacagagtgcagccccatcaagaccgatgtgattacaatggaccccaaggacaactgctccaaggacgccaacgataccctgctgctccagctgaccaacaccagcgcctactacatgtacttgttgctgctgctgaagtccgtggtgtacttcgccatcatcacatgctgcctgctgcggagaaccgccttctgctgcaacggcgagaagtctagggccaagcgatctggatctggagcaacaaacttctcactactcaaacaagcaggtgacgtggaggagaatcccgggcctactagtatggactggatttggcgcatccttttccttgtcggcgctgctaccggcgcgcattccttcgaagaagtgcaactggttcaatctggcggcggactggttcatccaggcggttctctgagactgagctgtgccggctctggcttcaccttcagcacctacctgatgtactgggtccgacaggcccctggcaagacactggaatgggtgtccgctattggcagcggaggcgatacctactacgccgactctgtgaagggcagattcaccatcagccgggacaacgccaagaacagcctgtacctccagatgaactccctgagagccgaggacatggccgtgtactactgtgccagaggactcggctattggggccagggaacactggtcacagtgtcctctacgcgtgcctctacaaagggaccctccgtgtttcctctggctcccagcagcaagtctacaagcggaggaacagccgctctgggctgcctggtcaaggattactttcccgagcctgtgaccgtgtcctggaatagcggagcactgacaagcggcgtgcacacctttccagccgtgctgcaaagcagcggcctgtactctctgagcagcgtggtcacagtgcctagctctagcctgggcacccagacctacatctgcaatgtgaaccacaagcctagcaacaccaaggtggacaagagagtggaacccaagagctgtgaagtgaaaaccgactccaccgaccacgtgaagcccaaagagacagagaacaccaagcagcccagcaagagctgccacaagcccaaggccatcgtgcacaccgagaaagtgaacatgatgagcctgaccgtgctgggcctgcggatgctgttcgccaaaaccgtggccgtgaacttcctgctgaccgccaagctgttcttcctc

SEQ ID NO: 2981 - DNA, 2376 bp, Artificial Sequence
  Synthetic Polynucloetide
atggccttaccagtgaccgccttgctcctgccgctggccttgctgctccacgccgccaggccggaagtgcagctggttgaatctggcggaggactggttcagcctggcggatctctgagactgtcttgtgccgccagcggcttcagcttcagcgacttttggatgagctgggtccgacaggcccctggcaaaggacttgaatgggtcgccacaatcagccaggccggcagcgagaaggactacgtggactctgtgaagggcagattcaccatcagccgggacaacgccaagaagtccctgtacctccagatgaacagcctgagagccgaggacaccgccgtgtactattgtgcctctggcgtgtacagcttcgactacagaggccagggcaccctggtcacagtctcttctggtaccggcggaggcggatctggcggcggaggtagcggtggcggaggatctgaattcctgcctgttctgacacagcctccatccgtgtctgtggcccctggaaagaccgccagaatcacatgcggcggcaacaacatcggcagcaagagcgtgcactggtatcagcagaagcctggacaggctcctgtgctggtggtgtacgacgacagcgatagacctagcggcatccccgagagattcagcggcagcaattccggcaataccgccacactgaccatcagcagagtggaagctggcgacgaggccgactactactgccaagtgtgggacagcagcagcgactacgtggtgtttggcggcggaacaaagctgacagtgcttctcgagggacagcctaaggccaatcctaccgtgacactgttccctccaagcagcgaagaactccaggccaacaaggccacacttgtgtgcctgatctccgacttctaccctggggctgtgacagtggcttggaaggccgatggatctcctgtgaaagccggcgtggaaaccaccaagccatccaagcagagcaacaacaaatacgccgccagctcctacctgagcctgacacctgagcagtggaagtcccacagatcctacagctgccaagtgacccacgaaggcagcaccgtggaaaagacagtggcccctacagagtgcagccccatcaagaccgatgtgattacaatggaccccaaggacaactgctccaaggacgccaacgataccctgctgctccagctgaccaacaccagcgcctactacatgtacttgttgctgctgctgaagtccgtggtgtacttcgccatcatcacatgctgcctgctgcggagaaccgccttctgctgcaacggcgagaagtctagggccaagcgatctggatctggagcaacaaacttctcactactcaaacaagcaggtgacgtggaggagaatcccgggcctactagtatggactggatttggcgcatccttttccttgtcggcgctgctaccggcgcgcattccttcgaagaagttcaactggtgcagagcggagccgaagtgaagaagccaggcgagagcctgaagattagctgcaaaggcagcggctacagcttcaccagctactggatcggctgggtccgacagatgcctggcaaaggactggaatggatgggcatcatctaccccggcgacagcgacaccagatacagccctagctttcagggccaagtgaccatctccgccgacaagagcatcagcacagcctacctccagtggtcctctctgaaggccagcgataccgccatgtactactgcgccagacaagtctggggatggcaaggcggcatgtaccccaggtctaactggtggtacaacctggactcttggggccagggcacactggtcacagtctcttctacgcgtgcctctacaaagggaccctccgtgtttcctctggctcccagcagcaagtctacaagcggaggaacagccgctctgggctgcctggtcaaggattactttcccgagcctgtgaccgtgtcctggaatagcggagcactgacaagcggcgtgcacacctttccagccgtgctgcaaagcagcggcctgtactctctgagcagcgtggtcacagtgcctagctctagcctgggcacccagacctacatctgcaatgtgaaccacaagcctagcaacaccaaggtggacaagagagtggaacccaagagctgtgaagtgaaaaccgactccaccgaccacgtgaagcccaaagagacagagaacaccaagcagcccagcaagagctgccacaagcccaaggccatcgtgcacaccgagaaagtgaacatgatgagcctgaccgtgctgggcctgcggatgctgttcgccaaaaccgtggccgtgaacttcctgctgaccgccaagctgttcttcctc

SEQ ID NO: 2982 - DNA, 2355 bp, Artificial Sequence
  Synthetic Polynucloetide
atggccttaccagtgaccgccttgctcctgccgctggccttgctgctccacgccgccaggccggaagtgcagctggttgaatctggcggaggactggttcagcctggcggatctctgagactgtcttgtgccgccagcggcttcagcttcagcgacttttggatgagctgggtccgacaggcccctggcaaaggacttgaatgggtcgccacaatcagccaggccggcagcgagaaggactacgtggactctgtgaagggcagattcaccatcagccgggacaacgccaagaagtccctgtacctccagatgaacagcctgagagccgaggacaccgccgtgtactattgtgcctctggcgtgtacagcttcgactacagaggccagggcaccctggtcacagtctcttctggtaccggcggaggcggatctggcggcggaggtagcggtggcggaggatctgaattcgagctggtcatgacacagagccctgcttctctggccgtgtcactgggacagagagccaccatctcttgcagagccagcgagagcgtggacagctacggcaagagcttcatgcactggtatcagctcaagcccggccagcctcctaagctgctgatctacagagcctccaacctggaaagcggcgtgccagccagattttctggcagcggcagcagaaccgacttcaccctgaccattgatcccgtggaagccgatgatgccgccacctactactgccagcagaacaacgaggacccctggacatttggcggaggcaccaagctggaaatcaaactcgagggacagcctaaggccaatcctaccgtgacactgttccctccaagcagcgaagaactccaggccaacaaggccacacttgtgtgcctgatctccgacttctaccctggggctgtgacagtggcttggaaggccgatggatctcctgtgaaagccggcgtggaaaccaccaagccatccaagcagagcaacaacaaatacgccgccagctcctacctgagcctgacacctgagcagtggaagtcccacagatcctacagctgccaagtgacccacgaaggcagcaccgtggaaaagacagtggcccctacagagtgcagccccatcaagaccgatgtgattacaatggaccccaaggacaactgctccaaggacgccaacgataccctgctgctccagctgaccaacaccagcgcctactacatgtacttgttgctgctgctgaagtccgtggtgtacttcgccatcatcacatgctgcctgctgcggagaaccgccttctgctgcaacggcgagaagtctagggccaagcgatctggatctggagcaacaaacttctcactactcaaacaagcaggtgacgtggaggagaatcccgggcctactagtatggactggatttggcgcatccttttccttgtcggcgctgctaccggcgcgcattccttcgaagaagtgcagctcgaacagtctggccccgagcttgtgaaacctggcgcttccgtgaagatgagctgcaaggccagcggctacaccttcaccaactactacatgaaatgggtcaagcagagccacggcaagtccctggaatggatcggcgatctgaaccccaacaacggcgacaccttctacaaccagaagttcaagggcaaagccacactgaccgtggacaagagcagcaacaccgcctacatgcagctcaactccctgaccagcgaggacagcgccgtgtactactgtgccagaaccggcagatacgaagagaacgctatggactactggggccagggcacaagcgtgacagtctcttctacgcgtgcctctacaaagggaccctccgtgtttcctctggctcccagcagcaagtctacaagcggaggaacagccgctctgggctgcctggtcaaggattactttcccgagcctgtgaccgtgtcctggaatagcggagcactgacaagcggcgtgcacacctttccagccgtgctgcaaagcagcggcctgtactctctgagcagcgtggtcacagtgcctagctctagcctgggcacccagacctacatctgcaatgtgaaccacaagcctagcaacaccaaggtggacaagagagtggaacccaagagctgtgaagtgaaaaccgactccaccgaccacgtgaagcccaaagagacagagaacaccaagcagcccagcaagagctgccacaagcccaaggccatcgtgcacaccgagaaagtgaacatgatgagcctgaccgtgctgggcctgcggatgctgttcgccaaaaccgtggccgtgaacttcctgctgaccgccaagctgttcttcctc

SEQ ID NO: 2983 - DNA, 2337 bp, Artificial Sequence
  Synthetic Polynucloetide
atggccttaccagtgaccgccttgctcctgccgctggccttgctgctccacgccgccaggccggaagtgcagctggttgaatctggcggaggactggttcagcctggcggatctctgagactgtcttgtgccgccagcggcttcagcttcagcgacttttggatgagctgggtccgacaggcccctggcaaaggacttgaatgggtcgccacaatcagccaggccggcagcgagaaggactacgtggactctgtgaagggcagattcaccatcagccgggacaacgccaagaagtccctgtacctccagatgaacagcctgagagccgaggacaccgccgtgtactattgtgcctctggcgtgtacagcttcgactacagaggccagggcaccctggtcacagtctcttctggtaccggcggaggcggatctggcggcggaggtagcggtggcggaggatctgaattcgacgtggtcatgacacagagcccttctagcctgtctgccagcgtgggcgacagagtgaccatcacctgtatggcctccgaggacatctacatccggctggcctggtatcagcagaagcctggaaacgcccctaagctgctgatctacgccgccacctctctggaaacaggcgtgccaagcagattttccggcagcggctctggcaccgatttcaccctgacaatatccagcctccagcctgaggacttcgccacctactactgccagcagtattggagcagcccctggacatttggcggaggcaccaaggtggaaatcaaactcgagggacagcctaaggccaatcctaccgtgacactgttccctccaagcagcgaagaactccaggccaacaaggccacacttgtgtgcctgatctccgacttctaccctggggctgtgacagtggcttggaaggccgatggatctcctgtgaaagccggcgtggaaaccaccaagccatccaagcagagcaacaacaaatacgccgccagctcctacctgagcctgacacctgagcagtggaagtcccacagatcctacagctgccaagtgacccacgaaggcagcaccgtggaaaagacagtggcccctacagagtgcagccccatcaagaccgatgtgattacaatggaccccaaggacaactgctccaaggacgccaacgataccctgctgctccagctgaccaacaccagcgcctactacatgtacttgttgctgctgctgaagtccgtggtgtacttcgccatcatcacatgctgcctgctgcggagaaccgccttctgctgcaacggcgagaagtctagggccaagcgatctggatctggagcaacaaacttctcactactcaaacaagcaggtgacgtggaggagaatcccgggcctactagtatggactggatttggcgcatccttttccttgtcggcgctgctaccggcgcgcattccttcgaacaggttcagctgcaagagtctggccccggactggtcaagcctagccaaacactgagcctgacctgtaccgtgtccggctacagcatcaccagcgactacacctggaactggatcagacagcctcctggcaacggactggaatggatcggctacatcacctacagcggcagcaccagctacaaccccagcctgaaaagccgggtgctgatctccgtggacaccagcaagaatcaggtgtccctgaagctgagcagcgtgacagccgctgataccgccgtgtactactgtgccagactggggagaagatacacaatggactactggggccagggcaccaccgtgacagtttcttctacgcgtgcctctacaaagggaccctccgtgtttcctctggctcccagcagcaagtctacaagcggaggaacagccgctctgggctgcctggtcaaggattactttcccgagcctgtgaccgtgtcctggaatagcggagcactgacaagcggcgtgcacacctttccagccgtgctgcaaagcagcggcctgtactctctgagcagcgtggtcacagtgcctagctctagcctgggcacccagacctacatctgcaatgtgaaccacaagcctagcaacaccaaggtggacaagagagtggaacccaagagctgtgaagtgaaaaccgactccaccgaccacgtgaagcccaaagagacagagaacaccaagcagcccagcaagagctgccacaagcccaaggccatcgtgcacaccgagaaagtgaacatgatgagcctgaccgtgctgggcctgcggatgctgttcgccaaaaccgtggccgtgaacttcctgctgaccgccaagctgttcttcctc

SEQ ID NO: 2984 - DNA, 2349 bp, Artificial Sequence
  Synthetic Polynucloetide
atggccttaccagtgaccgccttgctcctgccgctggccttgctgctccacgccgccaggccggaagtgcagctggttgaatctggcggaggactggttcagcctggcggatctctgagactgtcttgtgccgccagcggcttcagcttcagcgacttttggatgagctgggtccgacaggcccctggcaaaggacttgaatgggtcgccacaatcagccaggccggcagcgagaaggactacgtggactctgtgaagggcagattcaccatcagccgggacaacgccaagaagtccctgtacctccagatgaacagcctgagagccgaggacaccgccgtgtactattgtgcctctggcgtgtacagcttcgactacagaggccagggcaccctggtcacagtctcttctggtaccggcggaggcggatctggcggcggaggtagcggtggcggaggatctgaattcgatattgtgctgactcagagccctgccactctgagccttagtccaggcgacagagctaccatctcctgtagggcctctgaatccgtgaccattctgggctctcatctcatatattggtatcaacaaaagccgggccagcctccacggctgctcattcaactggcctctaacgtgcagaccggcgtgccagctagattttctggctctggctcccggaccgactttacactgacaatcagctccgtggaacccgaagattttgccgtctattattgcctccagtccaggaccattcctcggacattcggccagggaacaaaactcgaaatcaagcggctcgagggacagcctaaggccaatcctaccgtgacactgttccctccaagcagcgaagaactccaggccaacaaggccacacttgtgtgcctgatctccgacttctaccctggggctgtgacagtggcttggaaggccgatggatctcctgtgaaagccggcgtggaaaccaccaagccatccaagcagagcaacaacaaatacgccgccagctcctacctgagcctgacacctgagcagtggaagtcccacagatcctacagctgccaagtgacccacgaaggcagcaccgtggaaaagacagtggcccctacagagtgcagccccatcaagaccgatgtgattacaatggaccccaaggacaactgctccaaggacgccaacgataccctgctgctccagctgaccaacaccagcgcctactacatgtacttgttgctgctgctgaagtccgtggtgtacttcgccatcatcacatgctgcctgctgcggagaaccgccttctgctgcaacggcgagaagtctagggccaagcgatctggatctggagcaacaaacttctcactactcaaacaagcaggtgacgtggaggagaatcccgggcctactagtatggactggatttggcgcatccttttccttgtcggcgctgctaccggcgcgcattccttcgaacaggtgcagctcgttcagagtggccccgaagtgaaaaagccaggcgagtccgtgaagatttcctgcaaagcctccggctacacattccggcactactctatgaattgggtcaagcaggccccaggccagggccttaagtggatgggacgcatcaataccgagtccggcgtgccaatctacgccgatgacttcaaaggccggttcagcttcaccgtggatacctctgcctccaccgcctacctggaaatcagcagcctgaccagcgaggatacagctgtgtacttctgtagcaacgattacctctacagcctggatttctggggacagggaaccacactgaccgtgtctagcacgcgtgcctctacaaagggaccctccgtgtttcctctggctcccagcagcaagtctacaagcggaggaacagccgctctgggctgcctggtcaaggattactttcccgagcctgtgaccgtgtcctggaatagcggagcactgacaagcggcgtgcacacctttccagccgtgctgcaaagcagcggcctgtactctctgagcagcgtggtcacagtgcctagctctagcctgggcacccagacctacatctgcaatgtgaaccacaagcctagcaacaccaaggtggacaagagagtggaacccaagagctgtgaagtgaaaaccgactccaccgaccacgtgaagcccaaagagacagagaacaccaagcagcccagcaagagctgccacaagcccaaggccatcgtgcacaccgagaaagtgaacatgatgagcctgaccgtgctgggcctgcggatgctgttcgccaaaaccgtggccgtgaacttcctgctgaccgccaagctgttcttcctc

SEQ ID NO: 2985 - DNA, 2349 bp, Artificial Sequence
  Synthetic Polynucloetide
atggccttaccagtgaccgccttgctcctgccgctggccttgctgctccacgccgccaggccggaagtgcagctggttgaatctggcggaggactggttcagcctggcggatctctgagactgtcttgtgccgccagcggcttcagcttcagcgacttttggatgagctgggtccgacaggcccctggcaaaggacttgaatgggtcgccacaatcagccaggccggcagcgagaaggactacgtggactctgtgaagggcagattcaccatcagccgggacaacgccaagaagtccctgtacctccagatgaacagcctgagagccgaggacaccgccgtgtactattgtgcctctggcgtgtacagcttcgactacagaggccagggcaccctggtcacagtctcttctggtaccggcggaggcggatctggcggcggaggtagcggtggcggaggatctgaattcgacatcgtgctgacacagtctcccgccacactgtcactgagccctggcgatagagccacactgagctgtagagccagcgagagcgtgacaatcctgggcagccacctgatctactggtatcagcagaagcccggacaggcccctagactgctgattcagctcgccagcaatgtgcagacaggcatccctgccagattttccggcagcggcagcagaaccgatttcaccctgaccataagcagcctggaacctgaggacttcgccgtgtactactgcctccagagccggacaatccccagaacctttggacagggcaccaagctggaaatcaagagactcgagggacagcctaaggccaatcctaccgtgacactgttccctccaagcagcgaagaactccaggccaacaaggccacacttgtgtgcctgatctccgacttctaccctggggctgtgacagtggcttggaaggccgatggatctcctgtgaaagccggcgtggaaaccaccaagccatccaagcagagcaacaacaaatacgccgccagctcctacctgagcctgacacctgagcagtggaagtcccacagatcctacagctgccaagtgacccacgaaggcagcaccgtggaaaagacagtggcccctacagagtgcagccccatcaagaccgatgtgattacaatggaccccaaggacaactgctccaaggacgccaacgataccctgctgctccagctgaccaacaccagcgcctactacatgtacttgttgctgctgctgaagtccgtggtgtacttcgccatcatcacatgctgcctgctgcggagaaccgccttctgctgcaacggcgagaagtctagggccaagcgatctggatctggagcaacaaacttctcactactcaaacaagcaggtgacgtggaggagaatcccgggcctactagtatggactggatttggcgcatccttttccttgtcggcgctgctaccggcgcgcattccttcgaacaggttcagctggtgcagtctggcagcgagctgaagaaacctggcgagagcgtgaagatcagctgcaaggccagcggctacaccttcacacactacagcatgaactgggtccgacaggcccctggacaaggactggaatggatgggcagaatcaacaccgagacaggcgagcccctgtacgccgacgatttcaagggcagattcgtgttcagcctggacaccagcgccagcacagcctatctccagatcagctctctgaaggccgaggacaccgccgtgtactactgctccaacgactacctgtactccctggactattggggccagggcacactggtcacagtgtctagtacgcgtgcctctacaaagggaccctccgtgtttcctctggctcccagcagcaagtctacaagcggaggaacagccgctctgggctgcctggtcaaggattactttcccgagcctgtgaccgtgtcctggaatagcggagcactgacaagcggcgtgcacacctttccagccgtgctgcaaagcagcggcctgtactctctgagcagcgtggtcacagtgcctagctctagcctgggcacccagacctacatctgcaatgtgaaccacaagcctagcaacaccaaggtggacaagagagtggaacccaagagctgtgaagtgaaaaccgactccaccgaccacgtgaagcccaaagagacagagaacaccaagcagcccagcaagagctgccacaagcccaaggccatcgtgcacaccgagaaagtgaacatgatgagcctgaccgtgctgggcctgcggatgctgttcgccaaaaccgtggccgtgaacttcctgctgaccgccaagctgttcttcctc

SEQ ID NO: 2986 - DNA, 2352 bp, Artificial Sequence
  Synthetic Polynucloetide
atggccttaccagtgaccgccttgctcctgccgctggccttgctgctccacgccgccaggccggaagtgcagctggttgaatctggcggaggactggttcagcctggcggatctctgagactgtcttgtgccgccagcggcttcagcttcagcgacttttggatgagctgggtccgacaggcccctggcaaaggacttgaatgggtcgccacaatcagccaggccggcagcgagaaggactacgtggactctgtgaagggcagattcaccatcagccgggacaacgccaagaagtccctgtacctccagatgaacagcctgagagccgaggacaccgccgtgtactattgtgcctctggcgtgtacagcttcgactacagaggccagggcaccctggtcacagtctcttctggtaccggcggaggcggatctggcggcggaggtagcggtggcggaggatctgaattcgacatccagctgactcagagccctagctttctgagcgccagcgtgggcgacagagtgaccattacatgtagagccagccagggcatcagcaccgacctgaactggtatcagcagaagcctggcaaggcccctaagctgctgatctacgccgccagcaatctggaaagcggcgtgccaagcagattttccggctctggcagcggcaccgagttcaccctgacaatatctagcctccagcctgaggacttcgccacctactactgccagcagagctacaactggccctacacctttggcggaggcaccaaggtggaaatcaagagactcgagggacagcctaaggccaatcctaccgtgacactgttccctccaagcagcgaagaactccaggccaacaaggccacacttgtgtgcctgatctccgacttctaccctggggctgtgacagtggcttggaaggccgatggatctcctgtgaaagccggcgtggaaaccaccaagccatccaagcagagcaacaacaaatacgccgccagctcctacctgagcctgacacctgagcagtggaagtcccacagatcctacagctgccaagtgacccacgaaggcagcaccgtggaaaagacagtggcccctacagagtgcagccccatcaagaccgatgtgattacaatggaccccaaggacaactgctccaaggacgccaacgataccctgctgctccagctgaccaacaccagcgcctactacatgtacttgttgctgctgctgaagtccgtggtgtacttcgccatcatcacatgctgcctgctgcggagaaccgccttctgctgcaacggcgagaagtctagggccaagcgatctggatctggagcaacaaacttctcactactcaaacaagcaggtgacgtggaggagaatcccgggcctactagtatggactggatttggcgcatccttttccttgtcggcgctgctaccggcgcgcattccttcgaagaagttcagctggttgaatcaggcggaggactcgtgaaacctggcggctctctgagactgtcttgtgccgccagcggcttcaccttcagcaacttcgagatgaactgggtccgacaggccccaggcaaaggactggaatgggtgtccggcatcagctccaatggccggtacatcaactacgccgacagcgtgaagggcagattcaccatcagccgggacaacgccaagaacagcctgtacctccagatgaactccctgagagccgaggacaccgccgtgtactattgtgccagagtggtggacttcgaccaggactacaacggcttcgactattggggccagggcaccctggttaccgttagctctacgcgtgcctctacaaagggaccctccgtgtttcctctggctcccagcagcaagtctacaagcggaggaacagccgctctgggctgcctggtcaaggattactttcccgagcctgtgaccgtgtcctggaatagcggagcactgacaagcggcgtgcacacctttccagccgtgctgcaaagcagcggcctgtactctctgagcagcgtggtcacagtgcctagctctagcctgggcacccagacctacatctgcaatgtgaaccacaagcctagcaacaccaaggtggacaagagagtggaacccaagagctgtgaagtgaaaaccgactccaccgaccacgtgaagcccaaagagacagagaacaccaagcagcccagcaagagctgccacaagcccaaggccatcgtgcacaccgagaaagtgaacatgatgagcctgaccgtgctgggcctgcggatgctgttcgccaaaaccgtggccgtgaacttcctgctgaccgccaagctgttcttcctc

SEQ ID NO: 2987 - DNA, 2346 bp, Artificial Sequence
  Synthetic Polynucloetide
atggccttaccagtgaccgccttgctcctgccgctggccttgctgctccacgccgccaggccggaagtgcagctggttgaatctggcggaggactggttcagcctggcggatctctgagactgtcttgtgccgccagcggcttcagcttcagcgacttttggatgagctgggtccgacaggcccctggcaaaggacttgaatgggtcgccacaatcagccaggccggcagcgagaaggactacgtggactctgtgaagggcagattcaccatcagccgggacaacgccaagaagtccctgtacctccagatgaacagcctgagagccgaggacaccgccgtgtactattgtgcctctggcgtgtacagcttcgactacagaggccagggcaccctggtcacagtctcttctggtaccggcggaggcggatctggcggcggaggtagcggtggcggaggatctgaattcgacatccaactgactcagagccccagctttctgagcgcctctgtgggcgacagagtgaccatcacatgtagtctcagcctgggcatcagcacatggcgggattggtttccgccgaggcttggcaggggccttgagccgctgacctacgccgccagcacactgcaaagcggagtgcctagcagattttccggcagcggctctggcaccgagttcaccctgacaatatccagcctccagcctgaggacttcgccacctactactgccagcagctcaacagctaccctctgacctttggcggaggcaccaaggtggaaatcaagagactcgagggacagcctaaggccaatcctaccgtgacactgttccctccaagcagcgaagaactccaggccaacaaggccacacttgtgtgcctgatctccgacttctaccctggggctgtgacagtggcttggaaggccgatggatctcctgtgaaagccggcgtggaaaccaccaagccatccaagcagagcaacaacaaatacgccgccagctcctacctgagcctgacacctgagcagtggaagtcccacagatcctacagctgccaagtgacccacgaaggcagcaccgtggaaaagacagtggcccctacagagtgcagccccatcaagaccgatgtgattacaatggaccccaaggacaactgctccaaggacgccaacgataccctgctgctccagctgaccaacaccagcgcctactacatgtacttgttgctgctgctgaagtccgtggtgtacttcgccatcatcacatgctgcctgctgcggagaaccgccttctgctgcaacggcgagaagtctagggccaagcgatctggatctggagcaacaaacttctcactactcaaacaagcaggtgacgtggaggagaatcccgggcctactagtatggactggatttggcgcatccttttccttgtcggcgctgctaccggcgcgcattccttcgaagaagttcaactggttgagtctggtggcggcctggttaagcctggcggatctctgagactgagctgtgccgccagcggcttcacctttagcacatacggcatgagctgggtccgacaggcccctggaaaaggacttgagtgggtcgcctacatcaacaacggctccggctacatctactacgccgacagcgtgaagggcagattcaccatcagccgggacaacgccaagaacagcctgtacctccagatgaactccctgagagccgaggacaccgccgtgtactattgtgccagaggacagtggtggagcggcggagactttgattattggggccagggcaccctggtcaccgtttcttctacgcgtgcctctacaaagggaccctccgtgtttcctctggctcccagcagcaagtctacaagcggaggaacagccgctctgggctgcctggtcaaggattactttcccgagcctgtgaccgtgtcctggaatagcggagcactgacaagcggcgtgcacacctttccagccgtgctgcaaagcagcggcctgtactctctgagcagcgtggtcacagtgcctagctctagcctgggcacccagacctacatctgcaatgtgaaccacaagcctagcaacaccaaggtggacaagagagtggaacccaagagctgtgaagtgaaaaccgactccaccgaccacgtgaagcccaaagagacagagaacaccaagcagcccagcaagagctgccacaagcccaaggccatcgtgcacaccgagaaagtgaacatgatgagcctgaccgtgctgggcctgcggatgctgttcgccaaaaccgtggccgtgaacttcctgctgaccgccaagctgttcttcctc

SEQ ID NO: 2988 - DNA, 2349 bp, Artificial Sequence
  Synthetic Polynucloetide
atggccttaccagtgaccgccttgctcctgccgctggccttgctgctccacgccgccaggccggaagtgcagctggttgaatctggcggaggactggttcagcctggcggatctctgagactgtcttgtgccgccagcggcttcagcttcagcgacttttggatgagctgggtccgacaggcccctggcaaaggacttgaatgggtcgccacaatcagccaggccggcagcgagaaggactacgtggactctgtgaagggcagattcaccatcagccgggacaacgccaagaagtccctgtacctccagatgaacagcctgagagccgaggacaccgccgtgtactattgtgcctctggcgtgtacagcttcgactacagaggccagggcaccctggtcacagtctcttctggtaccggcggaggcggatctggcggcggaggtagcggtggcggaggatctgaattcgagatcgtgctgacacagtctcccgccacactgtcactgtctccaggcgaaagagccacactgagctgtagcgccagcagcagcgtgtcctacatgtactggtatcagcagaagcccggacaggcccctagactgctgatctacagaaccagcaacctggcctctggcatccccgccagattttctggctctggcagcggcaccgatttcaccctgaccataagcagcctggaacctgaggacttcgccgtgtactactgccagcagtaccacagctaccccaccacctttggacagggcaccaaggtggaaatcaagcggacagttctcgagggacagcctaaggccaatcctaccgtgacactgttccctccaagcagcgaagaactccaggccaacaaggccacacttgtgtgcctgatctccgacttctaccctggggctgtgacagtggcttggaaggccgatggatctcctgtgaaagccggcgtggaaaccaccaagccatccaagcagagcaacaacaaatacgccgccagctcctacctgagcctgacacctgagcagtggaagtcccacagatcctacagctgccaagtgacccacgaaggcagcaccgtggaaaagacagtggcccctacagagtgcagccccatcaagaccgatgtgattacaatggaccccaaggacaactgctccaaggacgccaacgataccctgctgctccagctgaccaacaccagcgcctactacatgtacttgttgctgctgctgaagtccgtggtgtacttcgccatcatcacatgctgcctgctgcggagaaccgccttctgctgcaacggcgagaagtctagggccaagcgatctggatctggagcaacaaacttctcactactcaaacaagcaggtgacgtggaggagaatcccgggcctactagtatggactggatttggcgcatccttttccttgtcggcgctgctaccggcgcgcattccttcgaagaagtgcagctggttgaatcaggtggcggcctggttcaacctggcggatctctgagactgtcttgtgccgccagcggcttcagcttcaacacctacgccatgaactgggtccgacaggctcctggcaaaggactggaatgggtgtcccacatcagaagcaagagcaacaacttcgccacctactacgccgacagcgtgaaggacagattcaccatcagccgggacaacgccaagaacagcctgtacctccagatgaactccctgagagccgaggacaccgccgtgtattattgcgccagacaaggcggcgacttccctatggattattggggccagggcaccctggtcaccgtttcttctacgcgtgcctctacaaagggaccctccgtgtttcctctggctcccagcagcaagtctacaagcggaggaacagccgctctgggctgcctggtcaaggattactttcccgagcctgtgaccgtgtcctggaatagcggagcactgacaagcggcgtgcacacctttccagccgtgctgcaaagcagcggcctgtactctctgagcagcgtggtcacagtgcctagctctagcctgggcacccagacctacatctgcaatgtgaaccacaagcctagcaacaccaaggtggacaagagagtggaacccaagagctgtgaagtgaaaaccgactccaccgaccacgtgaagcccaaagagacagagaacaccaagcagcccagcaagagctgccacaagcccaaggccatcgtgcacaccgagaaagtgaacatgatgagcctgaccgtgctgggcctgcggatgctgttcgccaaaaccgtggccgtgaacttcctgctgaccgccaagctgttcttcctc

SEQ ID NO: 2989 - DNA, 2337 bp, Artificial Sequence
  Synthetic Polynucloetide
atggccttaccagtgaccgccttgctcctgccgctggccttgctgctccacgccgccaggccggaagtgcagctggttgaatctggcggaggactggttcagcctggcggatctctgagactgtcttgtgccgccagcggcttcagcttcagcgacttttggatgagctgggtccgacaggcccctggcaaaggacttgaatgggtcgccacaatcagccaggccggcagcgagaaggactacgtggactctgtgaagggcagattcaccatcagccgggacaacgccaagaagtccctgtacctccagatgaacagcctgagagccgaggacaccgccgtgtactattgtgcctctggcgtgtacagcttcgactacagaggccagggcaccctggtcacagtctcttctggtaccggcggaggcggatctggcggcggaggtagcggtggcggaggatctgaattcgacgtggtcatgacacagagcccttctagcctgtctgccagcgtgggcgacagagtgaccatcacctgtaaagccagcgaggacatctacatccggctggcctggtatcagcagaagcctggaaaggcccctaagctgctgatctacgccgccacctctctggaaacaggcgtgccaagcagattttccggcagcggctctggcaccgatttcaccctgacaatatccagcctccagcctgaggacttcgccacctactactgccagcagtattggaccacaccttggacctttggcggaggcaccaaggtggaaatcaaactcgagggacagcctaaggccaatcctaccgtgacactgttccctccaagcagcgaagaactccaggccaacaaggccacacttgtgtgcctgatctccgacttctaccctggggctgtgacagtggcttggaaggccgatggatctcctgtgaaagccggcgtggaaaccaccaagccatccaagcagagcaacaacaaatacgccgccagctcctacctgagcctgacacctgagcagtggaagtcccacagatcctacagctgccaagtgacccacgaaggcagcaccgtggaaaagacagtggcccctacagagtgcagccccatcaagaccgatgtgattacaatggaccccaaggacaactgctccaaggacgccaacgataccctgctgctccagctgaccaacaccagcgcctactacatgtacttgttgctgctgctgaagtccgtggtgtacttcgccatcatcacatgctgcctgctgcggagaaccgccttctgctgcaacggcgagaagtctagggccaagcgatctggatctggagcaacaaacttctcactactcaaacaagcaggtgacgtggaggagaatcccgggcctactagtatggactggatttggcgcatccttttccttgtcggcgctgctaccggcgcgcattccttcgaacaggtgcagctccaagagtctggccctggactggtcaagcctagccagacactgagcctgacctgtaccgtgtccggctacagcatcaccatcgactacacctggaactggatcagacagcctcctggcaaaggactggaatggatcggctacatcacctacagcggcagcaccgactacaaccccagcctgaaaagccgggtgctgatctccgtggacaccagcaagaatcaggtgtccctgaagctgagcagcgtgacagccgctgataccgccgtgtactactgtgccagactgggcagaagatacgccctggattattggggccagggcaccaccgtgacagtgtcatctacgcgtgcctctacaaagggaccctccgtgtttcctctggctcccagcagcaagtctacaagcggaggaacagccgctctgggctgcctggtcaaggattactttcccgagcctgtgaccgtgtcctggaatagcggagcactgacaagcggcgtgcacacctttccagccgtgctgcaaagcagcggcctgtactctctgagcagcgtggtcacagtgcctagctctagcctgggcacccagacctacatctgcaatgtgaaccacaagcctagcaacaccaaggtggacaagagagtggaacccaagagctgtgaagtgaaaaccgactccaccgaccacgtgaagcccaaagagacagagaacaccaagcagcccagcaagagctgccacaagcccaaggccatcgtgcacaccgagaaagtgaacatgatgagcctgaccgtgctgggcctgcggatgctgttcgccaaaaccgtggccgtgaacttcctgctgaccgccaagctgttcttcctc

SEQ ID NO: 2990 - DNA, 2352 bp, Artificial Sequence
  Synthetic Polynucloetide
atggccttaccagtgaccgccttgctcctgccgctggccttgctgctccacgccgccaggccggaagtgcagctggttgaatctggcggaggactggttcagcctggcggatctctgagactgtcttgtgccgccagcggcttcagcttcagcgacttttggatgagctgggtccgacaggcccctggcaaaggacttgaatgggtcgccacaatcagccaggccggcagcgagaaggactacgtggactctgtgaagggcagattcaccatcagccgggacaacgccaagaagtccctgtacctccagatgaacagcctgagagccgaggacaccgccgtgtactattgtgcctctggcgtgtacagcttcgactacagaggccagggcaccctggtcacagtctcttctggtaccggcggaggcggatctggcggcggaggtagcggtggcggaggatctgaattcgacatccagatgacccagaccacaagcagcctgtctgccagcctgggcgacagagtgaccatctcttgtagagccagccaggacatcagcaactacctgaactggtatcagcagaaacccgacggcaccgtgaagctgctgatctactacaccagcatcctgcacagcggcgtgcccagcagattttctggctctggcagcggcaccgactacagcctgaccatcagcaatctggaacaagaggacttcgctacctacttctgccagcaaggcaacaccctgccttggacatttggcggaggcaccaagctggaaatcaaagctctcgagggacagcctaaggccaatcctaccgtgacactgttccctccaagcagcgaagaactccaggccaacaaggccacacttgtgtgcctgatctccgacttctaccctggggctgtgacagtggcttggaaggccgatggatctcctgtgaaagccggcgtggaaaccaccaagccatccaagcagagcaacaacaaatacgccgccagctcctacctgagcctgacacctgagcagtggaagtcccacagatcctacagctgccaagtgacccacgaaggcagcaccgtggaaaagacagtggcccctacagagtgcagccccatcaagaccgatgtgattacaatggaccccaaggacaactgctccaaggacgccaacgataccctgctgctccagctgaccaacaccagcgcctactacatgtacttgttgctgctgctgaagtccgtggtgtacttcgccatcatcacatgctgcctgctgcggagaaccgccttctgctgcaacggcgagaagtctagggccaagcgatctggatctggagcaacaaacttctcactactcaaacaagcaggtgacgtggaggagaatcccgggcctactagtatggactggatttggcgcatccttttccttgtcggcgctgctaccggcgcgcattccttcgaagaagtgcaactggttgaatctggcggcggactggttaagcctggcggatctctgaagctgagctgtgccgcctctggcttcgccttcagcatctacgatatgagctgggtccgacagacccctgagaagagactggaatgggtcgcctacatctctagcggcggagggacctactatcccgacacagtgaagggcagattcaccatctccagagacaacgccaagaacaccctgtacctccagatgagcagcctgaagtccgaggacaccgccatgtactactgcgccagacacagcggctatggcacacattggggagtgctgtttgcctactggggccagggaacactggtcacagtttctgctacgcgtgcctctacaaagggaccctccgtgtttcctctggctcccagcagcaagtctacaagcggaggaacagccgctctgggctgcctggtcaaggattactttcccgagcctgtgaccgtgtcctggaatagcggagcactgacaagcggcgtgcacacctttccagccgtgctgcaaagcagcggcctgtactctctgagcagcgtggtcacagtgcctagctctagcctgggcacccagacctacatctgcaatgtgaaccacaagcctagcaacaccaaggtggacaagagagtggaacccaagagctgtgaagtgaaaaccgactccaccgaccacgtgaagcccaaagagacagagaacaccaagcagcccagcaagagctgccacaagcccaaggccatcgtgcacaccgagaaagtgaacatgatgagcctgaccgtgctgggcctgcggatgctgttcgccaaaaccgtggccgtgaacttcctgctgaccgccaagctgttcttcctc

SEQ ID NO: 2991 - DNA, 2382 bp, Artificial Sequence
  Synthetic Polynucloetide
atggccttaccagtgaccgccttgctcctgccgctggccttgctgctccacgccgccaggccggaagtgcagctggttgaatctggcggaggactggttcagcctggcggatctctgagactgtcttgtgccgccagcggcttcagcttcagcgacttttggatgagctgggtccgacaggcccctggcaaaggacttgaatgggtcgccacaatcagccaggccggcagcgagaaggactacgtggactctgtgaagggcagattcaccatcagccgggacaacgccaagaagtccctgtacctccagatgaacagcctgagagccgaggacaccgccgtgtactattgtgcctctggcgtgtacagcttcgactacagaggccagggcaccctggtcacagtctcttctggtaccggcggaggcggatctggcggcggaggtagcggtggcggaggatctgaattcgacatcgtgatgacacagagccctgatagcctggccgtgtctctgggagagagagccaccatcaactgcaagagcagccagagcctgctgtacagaagcaaccagaagaactacctggcctggtatcagcagaagcccggccagcctcctaagctgctgatctactgggccagcaccagagaaagcggcgtgcccgatagattttctggctctggcagcggcaccgacttcaccctgacaatttctagcctgcaagccgaggacgtggccgtgtactactgccagcagtattacaactaccccagaaccttcggccagggcaccaaggtggaaatcaagagaacagttctcgagggacagcctaaggccaatcctaccgtgacactgttccctccaagcagcgaagaactccaggccaacaaggccacacttgtgtgcctgatctccgacttctaccctggggctgtgacagtggcttggaaggccgatggatctcctgtgaaagccggcgtggaaaccaccaagccatccaagcagagcaacaacaaatacgccgccagctcctacctgagcctgacacctgagcagtggaagtcccacagatcctacagctgccaagtgacccacgaaggcagcaccgtggaaaagacagtggcccctacagagtgcagccccatcaagaccgatgtgattacaatggaccccaaggacaactgctccaaggacgccaacgataccctgctgctccagctgaccaacaccagcgcctactacatgtacttgttgctgctgctgaagtccgtggtgtacttcgccatcatcacatgctgcctgctgcggagaaccgccttctgctgcaacggcgagaagtctagggccaagcgatctggatctggagcaacaaacttctcactactcaaacaagcaggtgacgtggaggagaatcccgggcctactagtatggactggatttggcgcatccttttccttgtcggcgctgctaccggcgcgcattccttcgaagaagttcagctgcttgaatcaggcggcggactggttcaacctggcggatctctgagactgagctgtgccgccagcggctacagcatcacaagcgactatgcctggaactgggtccgacaggcccctggcaaaggactggaatgggtgtcctacatcagcaacagcggcagcaccagctacaaccccagcctgaagtcccggttcaccatcagcagagacaacagcaagaacaccctgtacctccagatgaacagcctgagagctgaggacaccgccgtgtattattgcgccaaagagcggaactacgactacgacgattactactacgctatggactactggggccagggaaccctggtcacagtctcttctacgcgtgcctctacaaagggaccctccgtgtttcctctggctcccagcagcaagtctacaagcggaggaacagccgctctgggctgcctggtcaaggattactttcccgagcctgtgaccgtgtcctggaatagcggagcactgacaagcggcgtgcacacctttccagccgtgctgcaaagcagcggcctgtactctctgagcagcgtggtcacagtgcctagctctagcctgggcacccagacctacatctgcaatgtgaaccacaagcctagcaacaccaaggtggacaagagagtggaacccaagagctgtgaagtgaaaaccgactccaccgaccacgtgaagcccaaagagacagagaacaccaagcagcccagcaagagctgccacaagcccaaggccatcgtgcacaccgagaaagtgaacatgatgagcctgaccgtgctgggcctgcggatgctgttcgccaaaaccgtggccgtgaacttcctgctgaccgccaagctgttcttcctc

SEQ ID NO: 2992 - DNA, 2361 bp, Artificial Sequence
  Synthetic Polynucloetide
atggccttaccagtgaccgccttgctcctgccgctggccttgctgctccacgccgccaggccggaagtgcagctggttgaatctggcggaggactggttcagcctggcggatctctgagactgtcttgtgccgccagcggcttcagcttcagcgacttttggatgagctgggtccgacaggcccctggcaaaggacttgaatgggtcgccacaatcagccaggccggcagcgagaaggactacgtggactctgtgaagggcagattcaccatcagccgggacaacgccaagaagtccctgtacctccagatgaacagcctgagagccgaggacaccgccgtgtactattgtgcctctggcgtgtacagcttcgactacagaggccagggcaccctggtcacagtctcttctggtaccggcggaggcggatctggcggcggaggtagcggtggcggaggatctgaattcgacgtggtcatgacacagagccctctgagcctgcctgtgacacttggacagcctgccagcatcagctgtagaagcagccagagcctgctgcacagcagcggcaatacctacctggaatggtatcagcagaggcccggacagagccccagacctctgatctacaagatcagcacccggttcagcggcgtgcccgatagattttctggctctggcagcggcaccgacttcaccctgaagattagcagagtggaagccgaggacgtgggcgtgtactactgcttccaaggcagccacgtgccatacacctttggcggcggaacaaaggtggaaatcaagagactcgagggacagcctaaggccaatcctaccgtgacactgttccctccaagcagcgaagaactccaggccaacaaggccacacttgtgtgcctgatctccgacttctaccctggggctgtgacagtggcttggaaggccgatggatctcctgtgaaagccggcgtggaaaccaccaagccatccaagcagagcaacaacaaatacgccgccagctcctacctgagcctgacacctgagcagtggaagtcccacagatcctacagctgccaagtgacccacgaaggcagcaccgtggaaaagacagtggcccctacagagtgcagccccatcaagaccgatgtgattacaatggaccccaaggacaactgctccaaggacgccaacgataccctgctgctccagctgaccaacaccagcgcctactacatgtacttgttgctgctgctgaagtccgtggtgtacttcgccatcatcacatgctgcctgctgcggagaaccgccttctgctgcaacggcgagaagtctagggccaagcgatctggatctggagcaacaaacttctcactactcaaacaagcaggtgacgtggaggagaatcccgggcctactagtatggactggatttggcgcatccttttccttgtcggcgctgctaccggcgcgcattccttcgaacaagttcagctggttcagagcggagccgaagtgaagaaacctggggcctctgtgaaggtgtcctgcaaagcctctggcctgaccatcgaggactactacatgcactgggtccgacaggcccctggacaaggacttgaatggatgggctggatcgaccccgagaacggcgatacagagtacggccctaagttccagggcagagtgaccatgaccagagacaccagcatcaacaccgcctacatggaactgagccggctgagatccgatgacaccgccgtgtactattgcgccgtgcacaatgcccactacggcacttggtttgcctattggggccagggcacactggtcaccgttagctctacgcgtgcctctacaaagggaccctccgtgtttcctctggctcccagcagcaagtctacaagcggaggaacagccgctctgggctgcctggtcaaggattactttcccgagcctgtgaccgtgtcctggaatagcggagcactgacaagcggcgtgcacacctttccagccgtgctgcaaagcagcggcctgtactctctgagcagcgtggtcacagtgcctagctctagcctgggcacccagacctacatctgcaatgtgaaccacaagcctagcaacaccaaggtggacaagagagtggaacccaagagctgtgaagtgaaaaccgactccaccgaccacgtgaagcccaaagagacagagaacaccaagcagcccagcaagagctgccacaagcccaaggccatcgtgcacaccgagaaagtgaacatgatgagcctgaccgtgctgggcctgcggatgctgttcgccaaaaccgtggccgtgaacttcctgctgaccgccaagctgttcttcctc

SEQ ID NO: 2993 - DNA, 2337 bp, Artificial Sequence
  Synthetic Polynucloetide
atggccttaccagtgaccgccttgctcctgccgctggccttgctgctccacgccgccaggccggaagtgcagctggttgaatctggcggaggactggttcagcctggcggatctctgagactgtcttgtgccgccagcggcttcagcttcagcgacttttggatgagctgggtccgacaggcccctggcaaaggacttgaatgggtcgccacaatcagccaggccggcagcgagaaggactacgtggactctgtgaagggcagattcaccatcagccgggacaacgccaagaagtccctgtacctccagatgaacagcctgagagccgaggacaccgccgtgtactattgtgcctctggcgtgtacagcttcgactacagaggccagggcaccctggtcacagtctcttctggtaccggcggaggcggatctggcggcggaggtagcggtggcggaggatctgaattcgacatccagatgacacagagccctagcagcctgtctgccagcgtgggagacagagtgaccatcacctgtagagccagcgagaacatctacagcaacctggcctggtatcagcagaagcctggcaaggcccctaagctgctgatctacgccgccaccaatctggctgatggcgtgccaagcagattttccggctctggcagcggcaccgatttcaccctgacaatatccagcctccagcctgaggacttcgccacctactactgccagcacttttggggcacccctacattcggccagggcaccaaggtggaaatcaagagaacagttctcgagggacagcctaaggccaatcctaccgtgacactgttccctccaagcagcgaagaactccaggccaacaaggccacacttgtgtgcctgatctccgacttctaccctggggctgtgacagtggcttggaaggccgatggatctcctgtgaaagccggcgtggaaaccaccaagccatccaagcagagcaacaacaaatacgccgccagctcctacctgagcctgacacctgagcagtggaagtcccacagatcctacagctgccaagtgacccacgaaggcagcaccgtggaaaagacagtggcccctacagagtgcagccccatcaagaccgatgtgattacaatggaccccaaggacaactgctccaaggacgccaacgataccctgctgctccagctgaccaacaccagcgcctactacatgtacttgttgctgctgctgaagtccgtggtgtacttcgccatcatcacatgctgcctgctgcggagaaccgccttctgctgcaacggcgagaagtctagggccaagcgatctggatctggagcaacaaacttctcactactcaaacaagcaggtgacgtggaggagaatcccgggcctactagtatggactggatttggcgcatccttttccttgtcggcgctgctaccggcgcgcattccttcgaagaagtgcagctggttgaatcaggtggcggcctggttcaacctggcggatctctgagactgagctgtgccgcctctggcttcagcctgacaaattacggcgtgcactgggtccgacaggcccctggaaaaggactggaatgggtgtccgtgatttggagcggcggcagcaccgattacaacgccgccttcatcagccggttcaccatcagcgccgacaccagcaagaataccgcctacctccagatgaactccctgagagccgaggacaccgccgtgtactattgcgccagagaactgatccacgctatggacaactggggccagggaaccctggtcacagtctcttctacgcgtgcctctacaaagggaccctccgtgtttcctctggctcccagcagcaagtctacaagcggaggaacagccgctctgggctgcctggtcaaggattactttcccgagcctgtgaccgtgtcctggaatagcggagcactgacaagcggcgtgcacacctttccagccgtgctgcaaagcagcggcctgtactctctgagcagcgtggtcacagtgcctagctctagcctgggcacccagacctacatctgcaatgtgaaccacaagcctagcaacaccaaggtggacaagagagtggaacccaagagctgtgaagtgaaaaccgactccaccgaccacgtgaagcccaaagagacagagaacaccaagcagcccagcaagagctgccacaagcccaaggccatcgtgcacaccgagaaagtgaacatgatgagcctgaccgtgctgggcctgcggatgctgttcgccaaaaccgtggccgtgaacttcctgctgaccgccaagctgttcttcctc

SEQ ID NO: 2994 - DNA, 2358 bp, Artificial Sequence
  Synthetic Polynucloetide
atggccttaccagtgaccgccttgctcctgccgctggccttgctgctccacgccgccaggccggaagtgcagctggttgaatctggcggaggactggttcagcctggcggatctctgagactgtcttgtgccgccagcggcttcagcttcagcgacttttggatgagctgggtccgacaggcccctggcaaaggacttgaatgggtcgccacaatcagccaggccggcagcgagaaggactacgtggactctgtgaagggcagattcaccatcagccgggacaacgccaagaagtccctgtacctccagatgaacagcctgagagccgaggacaccgccgtgtactattgtgcctctggcgtgtacagcttcgactacagaggccagggcaccctggtcacagtctcttctggtaccggcggaggcggatctggcggcggaggtagcggtggcggaggatctgaattcgacttcgtgatgacacagagccctctgagcctgcctgtgacacctggcgaacctgccagcatcagctgtagaagcagccagagcatcgtgcacagcaacggcaacacctacctggaatggtatctccagaagcctggacagagcccacagctgctgatctacaaggtgtccaacagattcagcggcgtgcccgacagattttctggcagcggctctggcaccgacttcaccctgaagattagcagagtggaagccgaggacgtgggcgtgtactactgcttccaaggctctcacgtgcccctgacctttggacagggcaccaagctggaaatcaagagactcgagggacagcctaaggccaatcctaccgtgacactgttccctccaagcagcgaagaactccaggccaacaaggccacacttgtgtgcctgatctccgacttctaccctggggctgtgacagtggcttggaaggccgatggatctcctgtgaaagccggcgtggaaaccaccaagccatccaagcagagcaacaacaaatacgccgccagctcctacctgagcctgacacctgagcagtggaagtcccacagatcctacagctgccaagtgacccacgaaggcagcaccgtggaaaagacagtggcccctacagagtgcagccccatcaagaccgatgtgattacaatggaccccaaggacaactgctccaaggacgccaacgataccctgctgctccagctgaccaacaccagcgcctactacatgtacttgttgctgctgctgaagtccgtggtgtacttcgccatcatcacatgctgcctgctgcggagaaccgccttctgctgcaacggcgagaagtctagggccaagcgatctggatctggagcaacaaacttctcactactcaaacaagcaggtgacgtggaggagaatcccgggcctactagtatggactggatttggcgcatccttttccttgtcggcgctgctaccggcgcgcattccttcgaagaagtgcagctggttgaaagcggagccgaagtgaagaaacctggggcctctgtgaaggtgtcctgcaaggccagcggctacacctttaccagctactggattcactgggtccgacaggcccctggacaaggacttgagtggatgggcgagaacgacccctccaacggcaggaccaactacaacgagaagttcaagaaccgcgtgaccctgaccgtggacaccagcatctctaccgcctacatggaactgagccggctgagatccgatgacaccgccgtgtactattgcgccagaggacccaactacttttacagcatggactactggggccagggcacaatggtcaccgttagctctacgcgtgcctctacaaagggaccctccgtgtttcctctggctcccagcagcaagtctacaagcggaggaacagccgctctgggctgcctggtcaaggattactttcccgagcctgtgaccgtgtcctggaatagcggagcactgacaagcggcgtgcacacctttccagccgtgctgcaaagcagcggcctgtactctctgagcagcgtggtcacagtgcctagctctagcctgggcacccagacctacatctgcaatgtgaaccacaagcctagcaacaccaaggtggacaagagagtggaacccaagagctgtgaagtgaaaaccgactccaccgaccacgtgaagcccaaagagacagagaacaccaagcagcccagcaagagctgccacaagcccaaggccatcgtgcacaccgagaaagtgaacatgatgagcctgaccgtgctgggcctgcggatgctgttcgccaaaaccgtggccgtgaacttcctgctgaccgccaagctgttcttcctc

SEQ ID NO: 2995 - DNA, 2337 bp, Artificial Sequence
  Synthetic Polynucloetide
atggccttaccagtgaccgccttgctcctgccgctggccttgctgctccacgccgccaggccggaagtgcagctggttgaatctggcggaggactggttcagcctggcggatctctgagactgtcttgtgccgccagcggcttcagcttcagcgacttttggatgagctgggtccgacaggcccctggcaaaggacttgaatgggtcgccacaatcagccaggccggcagcgagaaggactacgtggactctgtgaagggcagattcaccatcagccgggacaacgccaagaagtccctgtacctccagatgaacagcctgagagccgaggacaccgccgtgtactattgtgcctctggcgtgtacagcttcgactacagaggccagggcaccctggtcacagtctcttctggtaccggcggaggcggatctggcggcggaggtagcggtggcggaggatctgaattcgacatccagctgactcagagccctagctttctgagcgccagcgtgggcgacagagtgaccatcacatgtagcgccagatccagcatcagcttcatgtactggtatcagcagaagcccggcaaggcccctaagctgctgatctacgacaccagcaatctggcctctggcgtgcccagcagattttctggaagcggcagcggcaccgagttcaccctgacaatctctagcctggaagccgaggatgccgccacctactattgccagcagtggtccagctatcccctgacatttggacagggcaccaagctggaaatcaaactcgagggacagcctaaggccaatcctaccgtgacactgttccctccaagcagcgaagaactccaggccaacaaggccacacttgtgtgcctgatctccgacttctaccctggggctgtgacagtggcttggaaggccgatggatctcctgtgaaagccggcgtggaaaccaccaagccatccaagcagagcaacaacaaatacgccgccagctcctacctgagcctgacacctgagcagtggaagtcccacagatcctacagctgccaagtgacccacgaaggcagcaccgtggaaaagacagtggcccctacagagtgcagccccatcaagaccgatgtgattacaatggaccccaaggacaactgctccaaggacgccaacgataccctgctgctccagctgaccaacaccagcgcctactacatgtacttgttgctgctgctgaagtccgtggtgtacttcgccatcatcacatgctgcctgctgcggagaaccgccttctgctgcaacggcgagaagtctagggccaagcgatctggatctggagcaacaaacttctcactactcaaacaagcaggtgacgtggaggagaatcccgggcctactagtatggactggatttggcgcatccttttccttgtcggcgctgctaccggcgcgcattccttcgaacaggttcagctggttcagtctggggccgaagtgaagaaacctggggcctctgtgaaggtgtcctgcaaggcttccggctacacctttaccggctcttggatgaactgggtccgacaggctcctggacagggactcgaatggatcggcagaatctatcctggcgacggcgagacaaactacaacggcaagttcaaggaccgcgtgacaatcaccgccgacaagagcacaagcaccgcctacatggaactgagcagcctgcggagcgaagataccgccgtgtactactgcgcccggatctacggcaacaacgtgtacttcgatgtgtggggccagggcacaaccgtgacagtctcttctacgcgtgcctctacaaagggaccctccgtgtttcctctggctcccagcagcaagtctacaagcggaggaacagccgctctgggctgcctggtcaaggattactttcccgagcctgtgaccgtgtcctggaatagcggagcactgacaagcggcgtgcacacctttccagccgtgctgcaaagcagcggcctgtactctctgagcagcgtggtcacagtgcctagctctagcctgggcacccagacctacatctgcaatgtgaaccacaagcctagcaacaccaaggtggacaagagagtggaacccaagagctgtgaagtgaaaaccgactccaccgaccacgtgaagcccaaagagacagagaacaccaagcagcccagcaagagctgccacaagcccaaggccatcgtgcacaccgagaaagtgaacatgatgagcctgaccgtgctgggcctgcggatgctgttcgccaaaaccgtggccgtgaacttcctgctgaccgccaagctgttcttcctc

SEQ ID NO: 2996 - DNA, 2361 bp, Artificial Sequence
  Synthetic Polynucloetide
atggccttaccagtgaccgccttgctcctgccgctggccttgctgctccacgccgccaggccggaagtgcagctggttgaatctggcggaggactggttcagcctggcggatctctgagactgtcttgtgccgccagcggcttcagcttcagcgacttttggatgagctgggtccgacaggcccctggcaaaggacttgaatgggtcgccacaatcagccaggccggcagcgagaaggactacgtggactctgtgaagggcagattcaccatcagccgggacaacgccaagaagtccctgtacctccagatgaacagcctgagagccgaggacaccgccgtgtactattgtgcctctggcgtgtacagcttcgactacagaggccagggcaccctggtcacagtctcttctggtaccggcggaggcggatctggcggcggaggtagcggtggcggaggatctgaattccagctggtgctgacacagtctccaagcgcctctgccagcctgggatctagcgtgaagctgacctgtacactgagcagcggccacaagaccgacaccatcgactggtatcagcagcagcctggcaaggcccctagatacctgatgaagctggaaggcagcggcagctacaacaaaggctctggcgtgcccgatagattcagcggcagttcttctggcgctgattggtatctgaccatcagcagcctccagagcgaggacgaggccgattactactgcggcacagactaccccggcaactacctgtttggcggcggaacacagctgacagtgcttggcctcgagggacagcctaaggccaatcctaccgtgacactgttccctccaagcagcgaagaactccaggccaacaaggccacacttgtgtgcctgatctccgacttctaccctggggctgtgacagtggcttggaaggccgatggatctcctgtgaaagccggcgtggaaaccaccaagccatccaagcagagcaacaacaaatacgccgccagctcctacctgagcctgacacctgagcagtggaagtcccacagatcctacagctgccaagtgacccacgaaggcagcaccgtggaaaagacagtggcccctacagagtgcagccccatcaagaccgatgtgattacaatggaccccaaggacaactgctccaaggacgccaacgataccctgctgctccagctgaccaacaccagcgcctactacatgtacttgttgctgctgctgaagtccgtggtgtacttcgccatcatcacatgctgcctgctgcggagaaccgccttctgctgcaacggcgagaagtctagggccaagcgatctggatctggagcaacaaacttctcactactcaaacaagcaggtgacgtggaggagaatcccgggcctactagtatggactggatttggcgcatccttttccttgtcggcgctgctaccggcgcgcattccttcgaacaagaacagctggttgaaagcggcggaggactggttcaacctggcggttctctgagactgagctgtgccgccagcggcttcaccttcagcgactactacatgagctggatcagacaggccccaggcaaaggactggaatgggtcgccacaatctaccccagcagcggcaagacctactacgccgattctgccaagggcagactgaccatctccagcgacaacgccaaggacagcctgtacctccagatgaacagcctgagagccgaggacaccgccgtgtactactgcaccagagatagctacgccgacgacgccgctctgtttgacatttggggccagggcaccaccgtgaccgtttcttctacgcgtgcctctacaaagggaccctccgtgtttcctctggctcccagcagcaagtctacaagcggaggaacagccgctctgggctgcctggtcaaggattactttcccgagcctgtgaccgtgtcctggaatagcggagcactgacaagcggcgtgcacacctttccagccgtgctgcaaagcagcggcctgtactctctgagcagcgtggtcacagtgcctagctctagcctgggcacccagacctacatctgcaatgtgaaccacaagcctagcaacaccaaggtggacaagagagtggaacccaagagctgtgaagtgaaaaccgactccaccgaccacgtgaagcccaaagagacagagaacaccaagcagcccagcaagagctgccacaagcccaaggccatcgtgcacaccgagaaagtgaacatgatgagcctgaccgtgctgggcctgcggatgctgttcgccaaaaccgtggccgtgaacttcctgctgaccgccaagctgttcttcctc

SEQ ID NO: 2997 - DNA, 2326 bp, Artificial Sequence
  Synthetic Polynucloetide
atggccttaccagtgaccgccttgctcctgccgctggccttgctgctccacgccgccaggccggaagtgcagctggttgaatctggcggaggactggttcagcctggcggatctctgagactgtcttgtgccgccagcggcttcagcttcagcgacttttggatgagctgggtccgacaggcccctggcaaaggacttgaatgggtcgccacaatcagccaggccggcagcgagaaggactacgtggactctgtgaagggcagattcaccatcagccgggacaacgccaagaagtccctgtacctccagatgaacagcctgagagccgaggacaccgccgtgtactattgtgcctctggcgtgtacagcttcgactacagaggccagggcaccctggtcacagtctcttctggtaccggcggaggcggatctggcggcggaggtagcggtggcggaggatctgaattcgagattgtgttgacacagtctcccgataccctgtcactgtcacccggcgagaaggcaacgctgagttgcagagcaagccagtcagtctcctcttcttttctggcctggtatcagcaaaaaccaggtcaggcaccatctctcctgatttacgttgccagcagacgggcggctggcattcccgacaggttctctggaagcggatctgggaccgattttaccctgacaattagccgcttggagcccgaagactttggtatgttttactgccagcactacggaaggacacctttcacatttggcccggctcgagggacagcctaaggccaatcctaccgtgacactgttccctccaagcagcgaagaactccaggccaacaaggccacacttgtgtgcctgatctccgacttctaccctggggctgtgacagtggcttggaaggccgatggatctcctgtgaaagccggcgtggaaaccaccaagccatccaagcagagcaacaacaaatacgccgccagctcctacctgagcctgacacctgagcagtggaagtcccacagatcctacagctgccaagtgacccacgaaggcagcaccgtggaaaagacagtggcccctacagagtgcagccccatcaagaccgatgtgattacaatggaccccaaggacaactgctccaaggacgccaacgataccctgctgctccagctgaccaacaccagcgcctactacatgtacttgttgctgctgctgaagtccgtggtgtacttcgccatcatcacatgctgcctgctgcggagaaccgccttctgctgcaacggcgagaagtctagggccaagcgatctggatctggagcaacaaacttctcactactcaaacaagcaggtgacgtggaggagaatcccgggcctactagtatggactggatttggcgcatccttttccttgtcggcgctgctaccggcgcgcattccttcgaacagatccagttggtggaatcagggggcggtgtggtgcagccgggtaggagcctgagactgtcatgcgtggcgtctggcttcacattcaagaactacggcatgcactgggtgcgacaggcccccggaaagggtttggagtgggtcgccgtgatctggtacgacggatctaatgagtattacggagatcctgtgaagggaaggttcaccatctcccgcgacaatagcaaaaatatgctctacctgcaaatgaactcactcagggcggatgatacggcggtctactattgcgctcgctcagggattgctgtggccggcgcattcgattactggggacagggtaccctggtgacagtatcaagcacgcgtgcctctacaaagggaccctccgtgtttcctctggctcccagcagcaagtctacaagcggaggaacagccgctctgggctgcctggtcaaggattactttcccgagcctgtgaccgtgtcctggaatagcggagcactgacaagcggcgtgcacacctttccagccgtgctgcaaagcagcggcctgtactctctgagcagcgtggtcacagtgcctagctctagcctgggcacccagacctacatctgcaatgtgaaccacaagcctagcaacaccaaggtggacaagagagtggaacccaagagctgtgaagtgaaaaccgactccaccgaccacgtgaagcccaaagagacagagaacaccaagcagcccagcaagagctgccacaagcccaaggccatcgtgcacaccgagaaagtgaacatgatgagcctgaccgtgctgggcctgcggatgctgttcgccaaaaccgtggccgtgaacttcctgctgaccgccaagctgttcttcctc

SEQ ID NO: 2998 - DNA, 2375 bp, Artificial Sequence
  Synthetic Polynucloetide
atggccttaccagtgaccgccttgctcctgccgctggccttgctgctccacgccgccaggccggaagtgcagctggttgaatctggcggaggactggttcagcctggcggatctctgagactgtcttgtgccgccagcggcttcagcttcagcgacttttggatgagctgggtccgacaggcccctggcaaaggacttgaatgggtcgccacaatcagccaggccggcagcgagaaggactacgtggactctgtgaagggcagattcaccatcagccgggacaacgccaagaagtccctgtacctccagatgaacagcctgagagccgaggacaccgccgtgtactattgtgcctctggcgtgtacagcttcgactacagaggccagggcaccctggtcacagtctcttctggtaccggcggaggcggatctggcggcggaggtagcggtggcggaggatctgaattcgacattcagatgacccaaagcccgtccagcctgtccgccagcctgggagatagagtgacaatcacgtgtagagcttcccaagggataagaaatgatctcgggtggtatcagcagaagcccggcaaagcccccaaaaggcttatatatgctagtagtacactgcagtctggagttccttcccgattttcaggtagcggctccggtacagagttcaccctcacgataagctcactccagcctgaggatttcgcaacgtactactgcctccagcacaacaattttccctggactttcggccagggcaccaaggtggagatcaagaggctcgagggacagcctaaggccaatcctaccgtgacactgttccctccaagcagcgaagaactccaggccaacaaggccacacttgtgtgcctgatctccgacttctaccctggggctgtgacagtggcttggaaggccgatggatctcctgtgaaagccggcgtggaaaccaccaagccatccaagcagagcaacaacaaatacgccgccagctcctacctgagcctgacacctgagcagtggaagtcccacagatcctacagctgccaagtgacccacgaaggcagcaccgtggaaaagacagtggcccctacagagtgcagccccatcaagaccgatgtgattacaatggaccccaaggacaactgctccaaggacgccaacgataccctgctgctccagctgaccaacaccagcgcctactacatgtacttgttgctgctgctgaagtccgtggtgtacttcgccatcatcacatgctgcctgctgcggagaaccgccttctgctgcaacggcgagaagtctagggccaagcgatctggatctggagcaacaaacttctcactactcaaacaagcaggtgacgtggaggagaatcccgggcctactagtatggactggatttggcgcatccttttccttgtcggcgctgctaccggcgcgcattccttcgaacacgcccgcaagttactttgaaggagtctggacctgtactggtgaagccaaccgagacactgacactcacgtgtacagtgagtggtttttccttgatcaacgcaaggatgggcgtcagctggatcaggcaaccccctggcaaggctctggaatggctcgctcacatattcagcaatgccgaaaaaagctaccggacaagcctgaaatcccgcctgactatttccaaggacacttctaagtctcaggtggtgctgaccatgaccaacatggacccggtggacaccgccacctattactgcgcaagaatccctgggtatggtgggaatggtgactaccattattatgggatggatgtgtgggggcaaggcacaaccgtaacggtctcaagcacgcgtgcctctacaaagggaccctccgtgtttcctctggctcccagcagcaagtctacaagcggaggaacagccgctctgggctgcctggtcaaggattactttcccgagcctgtgaccgtgtcctggaatagcggagcactgacaagcggcgtgcacacctttccagccgtgctgcaaagcagcggcctgtactctctgagcagcgtggtcacagtgcctagctctagcctgggcacccagacctacatctgcaatgtgaaccacaagcctagcaacaccaaggtggacaagagagtggaacccaagagctgtgaagtgaaaaccgactccaccgaccacgtgaagcccaaagagacagagaacaccaagcagcccagcaagagctgccacaagcccaaggccatcgtgcacaccgagaaagtgaacatgatgagcctgaccgtgctgggcctgcggatgctgttcgccaaaaccgtggccgtgaacttcctgctgaccgccaagctgttcttcctc

SEQ ID NO: 2999 - DNA, 2346 bp, Artificial Sequence
  Synthetic Polynucloetide
atggccttaccagtgaccgccttgctcctgccgctggccttgctgctccacgccgccaggccggaagtgcagctggttgaatctggcggaggactggttcagcctggcggatctctgagactgtcttgtgccgccagcggcttcagcttcagcgacttttggatgagctgggtccgacaggcccctggcaaaggacttgaatgggtcgccacaatcagccaggccggcagcgagaaggactacgtggactctgtgaagggcagattcaccatcagccgggacaacgccaagaagtccctgtacctccagatgaacagcctgagagccgaggacaccgccgtgtactattgtgcctctggcgtgtacagcttcgactacagaggccagggcaccctggtcacagtctcttctggtaccggcggaggcggatctggcggcggaggtagcggtggcggaggatctgaattcgacatcgtgctgacacagagccctccaagcctggctatgagcctgggaaagagagccaccatcagctgtagagccagcgagagcgtgacaatcctgggctctcacctgatccactggtatcagcagaagcccggccagcctcctacactgctgattcagctggcctccaatgtgcagacaggcgtgccagccagattttctggcagcggcagcagaaccgacttcaccctgaccattgatcccgtggaagaggacgacgtggccgtgtactactgcctccagagcagaacaatccccagaacctttggcggaggcaccaagctggaaatcaaactcgagggacagcctaaggccaatcctaccgtgacactgttccctccaagcagcgaagaactccaggccaacaaggccacacttgtgtgcctgatctccgacttctaccctggggctgtgacagtggcttggaaggccgatggatctcctgtgaaagccggcgtggaaaccaccaagccatccaagcagagcaacaacaaatacgccgccagctcctacctgagcctgacacctgagcagtggaagtcccacagatcctacagctgccaagtgacccacgaaggcagcaccgtggaaaagacagtggcccctacagagtgcagccccatcaagaccgatgtgattacaatggaccccaaggacaactgctccaaggacgccaacgataccctgctgctccagctgaccaacaccagcgcctactacatgtacttgttgctgctgctgaagtccgtggtgtacttcgccatcatcacatgctgcctgctgcggagaaccgccttctgctgcaacggcgagaagtctagggccaagcgatctggatctggagcaacaaacttctcactactcaaacaagcaggtgacgtggaggagaatcccgggcctactagtatggactggatttggcgcatccttttccttgtcggcgctgctaccggcgcgcattccttcgaacaaatccagctggtgcagtctggccccgagctgaagaaacctggcgagacagtgaagatcagctgcaaggccagcggctacaccttcaccgactacagcatcaactgggtcaagagagcccctggcaagggcctgaaatggatgggctggatcaacaccgaaaccagagagcccgcctacgcctacgacttcagaggcagattcgccttcagcctggaaaccagcgccagcacagcctacctccagatcaacaacctgaagtacgaggacaccgccacctacttttgcgccctggactacagctacgctatggactattggggccagggcaccagcgtgacagtctcttctacgcgtgcctctacaaagggaccctccgtgtttcctctggctcccagcagcaagtctacaagcggaggaacagccgctctgggctgcctggtcaaggattactttcccgagcctgtgaccgtgtcctggaatagcggagcactgacaagcggcgtgcacacctttccagccgtgctgcaaagcagcggcctgtactctctgagcagcgtggtcacagtgcctagctctagcctgggcacccagacctacatctgcaatgtgaaccacaagcctagcaacaccaaggtggacaagagagtggaacccaagagctgtgaagtgaaaaccgactccaccgaccacgtgaagcccaaagagacagagaacaccaagcagcccagcaagagctgccacaagcccaaggccatcgtgcacaccgagaaagtgaacatgatgagcctgaccgtgctgggcctgcggatgctgttcgccaaaaccgtggccgtgaacttcctgctgaccgccaagctgttcttcctc

SEQ ID NO: 3000 - DNA, 2351 bp, Artificial Sequence
  Synthetic Polynucloetide
atggccttaccagtgaccgccttgctcctgccgctggccttgctgctccacgccgccaggccggaagtgcagctggttgaatctggcggaggactggttcagcctggcggatctctgagactgtcttgtgccgccagcggcttcagcttcagcgacttttggatgagctgggtccgacaggcccctggcaaaggacttgaatgggtcgccacaatcagccaggccggcagcgagaaggactacgtggactctgtgaagggcagattcaccatcagccgggacaacgccaagaagtccctgtacctccagatgaacagcctgagagccgaggacaccgccgtgtactattgtgcctctggcgtgtacagcttcgactacagaggccagggcaccctggtcacagtctcttctggtaccggcggaggcggatctggcggcggaggtagcggtggcggaggatctgaattcgatattcaactgacacaatcccccagctcactcagcgccagcgtgggggacagggttagctttacctgtcaagcctctcaggatataaataactttctgaactggtatcaacagaagcctgggaaggcgcccaaactcctgatctatgatgcgtccaacctggaaactggcgtgccttcacgctttagcggctctggcagtggtacagacttcacttttaccatctcttcacttcagccggaggacatcgccacatattactgtcaacagtacggaaacttgccctttacttttggaggcggcaccaaagttgaaatcaaaagctcgagggacagcctaaggccaatcctaccgtgacactgttccctccaagcagcgaagaactccaggccaacaaggccacacttgtgtgcctgatctccgacttctaccctggggctgtgacagtggcttggaaggccgatggatctcctgtgaaagccggcgtggaaaccaccaagccatccaagcagagcaacaacaaatacgccgccagctcctacctgagcctgacacctgagcagtggaagtcccacagatcctacagctgccaagtgacccacgaaggcagcaccgtggaaaagacagtggcccctacagagtgcagccccatcaagaccgatgtgattacaatggaccccaaggacaactgctccaaggacgccaacgataccctgctgctccagctgaccaacaccagcgcctactacatgtacttgttgctgctgctgaagtccgtggtgtacttcgccatcatcacatgctgcctgctgcggagaaccgccttctgctgcaacggcgagaagtctagggccaagcgatctggatctggagcaacaaacttctcactactcaaacaagcaggtgacgtggaggagaatcccgggcctactagtatggactggatttggcgcatccttttccttgtcggcgctgctaccggcgcgcattccttcgaacaggtccaactgcaagaaagcggacccggactggtgaagccttctgagacacttagtctgacgtgcacggtcagtggcggctccatctcctcctattattggtcatggatacgacaacccccaggtaagggcctggaatggattggctatatctactattcaggaagcacgaactacaatcccagcctgaagtcccgagtgacaatttcagtagataccagtaaaaaccagttcagtcttaaactgtcaagcgtgacagctgccgacaccgctgtgtattactgcgtctcactggtgtattgtggaggggattgttatagcgggttcgattattggggacagggaaccctggtgactgtatcttccacgcgtgcctctacaaagggaccctccgtgtttcctctggctcccagcagcaagtctacaagcggaggaacagccgctctgggctgcctggtcaaggattactttcccgagcctgtgaccgtgtcctggaatagcggagcactgacaagcggcgtgcacacctttccagccgtgctgcaaagcagcggcctgtactctctgagcagcgtggtcacagtgcctagctctagcctgggcacccagacctacatctgcaatgtgaaccacaagcctagcaacaccaaggtggacaagagagtggaacccaagagctgtgaagtgaaaaccgactccaccgaccacgtgaagcccaaagagacagagaacaccaagcagcccagcaagagctgccacaagcccaaggccatcgtgcacaccgagaaagtgaacatgatgagcctgaccgtgctgggcctgcggatgctgttcgccaaaaccgtggccgtgaacttcctgctgaccgccaagctgttcttcctc

SEQ ID NO: 3001 - DNA, 2358 bp, Artificial Sequence
  Synthetic Polynucloetide
atggccttaccagtgaccgccttgctcctgccgctggccttgctgctccacgccgccaggccggaagtgcagctggttgaatctggcggaggactggttcagcctggcggatctctgagactgtcttgtgccgccagcggcttcagcttcagcgacttttggatgagctgggtccgacaggcccctggcaaaggacttgaatgggtcgccacaatcagccaggccggcagcgagaaggactacgtggactctgtgaagggcagattcaccatcagccgggacaacgccaagaagtccctgtacctccagatgaacagcctgagagccgaggacaccgccgtgtactattgtgcctctggcgtgtacagcttcgactacagaggccagggcaccctggtcacagtctcttctggtaccggcggaggcggatctggcggcggaggtagcggtggcggaggatctgaattcgatatccagctcactcaaagcccctctagtctctctgcctcagtgggggatcgggtcagttttacttgtcaagcttcacaggatatcaacaacttccttaattggtatcagcagaagccaggaaaagcacccaagctgctcatctatgatgcctcaaatttggagacgggtgttcccagtcgattctctgggtcagggtccgggaccgactttacgtttacgatctcctctctgcagcccgaagacatcgccacatactattgtcaacagtacggcaacttgcctttcacatttgggggcgggactaaggttgaaatcaagaggctcgagggacagcctaaggccaatcctaccgtgacactgttccctccaagcagcgaagaactccaggccaacaaggccacacttgtgtgcctgatctccgacttctaccctggggctgtgacagtggcttggaaggccgatggatctcctgtgaaagccggcgtggaaaccaccaagccatccaagcagagcaacaacaaatacgccgccagctcctacctgagcctgacacctgagcagtggaagtcccacagatcctacagctgccaagtgacccacgaaggcagcaccgtggaaaagacagtggcccctacagagtgcagccccatcaagaccgatgtgattacaatggaccccaaggacaactgctccaaggacgccaacgataccctgctgctccagctgaccaacaccagcgcctactacatgtacttgttgctgctgctgaagtccgtggtgtacttcgccatcatcacatgctgcctgctgcggagaaccgccttctgctgcaacggcgagaagtctagggccaagcgatctggatctggagcaacaaacttctcactactcaaacaagcaggtgacgtggaggagaatcccgggcctactagtatggactggatttggcgcatccttttccttgtcggcgctgctaccggcgcgcattccttcgaacaggtacagctgcaggaatctgggcccggacttgtcaagccaagtcagacactttctcttacatgtaccgtgagcggcggaagtataagcagtggaggcttttactggtcttggatacggcagcacccaggcaaaggcttggagtggattggatacattcatcattcaggatctacacactataatccatcccttaagtcccgggtcaccattagcattgatacgtctaagaatctgttcagtctcaggctgtcctccgtcactgctgccgacacagccgtgtactactgcgcctccttggtttactgcggaggcgactgttatagcggctttgattattgggggcaggggaccctcgtaaccgtgagctctacgcgtgcctctacaaagggaccctccgtgtttcctctggctcccagcagcaagtctacaagcggaggaacagccgctctgggctgcctggtcaaggattactttcccgagcctgtgaccgtgtcctggaatagcggagcactgacaagcggcgtgcacacctttccagccgtgctgcaaagcagcggcctgtactctctgagcagcgtggtcacagtgcctagctctagcctgggcacccagacctacatctgcaatgtgaaccacaagcctagcaacaccaaggtggacaagagagtggaacccaagagctgtgaagtgaaaaccgactccaccgaccacgtgaagcccaaagagacagagaacaccaagcagcccagcaagagctgccacaagcccaaggccatcgtgcacaccgagaaagtgaacatgatgagcctgaccgtgctgggcctgcggatgctgttcgccaaaaccgtggccgtgaacttcctgctgaccgccaagctgttcttcctc

SEQ ID NO: 3002 - DNA, 2346 bp, Artificial Sequence
  Synthetic Polynucloetide
atggccttaccagtgaccgccttgctcctgccgctggccttgctgctccacgccgccaggccggaagtgcagctggttgaatctggcggaggactggttcagcctggcggatctctgagactgtcttgtgccgccagcggcttcagcttcagcgacttttggatgagctgggtccgacaggcccctggcaaaggacttgaatgggtcgccacaatcagccaggccggcagcgagaaggactacgtggactctgtgaagggcagattcaccatcagccgggacaacgccaagaagtccctgtacctccagatgaacagcctgagagccgaggacaccgccgtgtactattgtgcctctggcgtgtacagcttcgactacagaggccagggcaccctggtcacagtctcttctggtaccggcggaggcggatctggcggcggaggtagcggtggcggaggatctgaattcgacattcagatgacacagagccctagcagcctgagcgcctctgtgggagacagagtgaccatcacatgcaagagcagccagagcgtgctgtactccagcaatcagaagaactacctggcctggttccagcagaagcctggcaaggctcctaagctgctgatctactgggccagcaccagagaaagcggcgtgccaagcagattttctggcagcggctctggcaccgacttcaccctgacaatatccagcctccagcctgaggacttcgccacctacttttgccaccagtacctgagcagctacacattcggacagggcaccaaggtggaaatcaagcggctcgagggacagcctaaggccaatcctaccgtgacactgttccctccaagcagcgaagaactccaggccaacaaggccacacttgtgtgcctgatctccgacttctaccctggggctgtgacagtggcttggaaggccgatggatctcctgtgaaagccggcgtggaaaccaccaagccatccaagcagagcaacaacaaatacgccgccagctcctacctgagcctgacacctgagcagtggaagtcccacagatcctacagctgccaagtgacccacgaaggcagcaccgtggaaaagacagtggcccctacagagtgcagccccatcaagaccgatgtgattacaatggaccccaaggacaactgctccaaggacgccaacgataccctgctgctccagctgaccaacaccagcgcctactacatgtacttgttgctgctgctgaagtccgtggtgtacttcgccatcatcacatgctgcctgctgcggagaaccgccttctgctgcaacggcgagaagtctagggccaagcgatctggatctggagcaacaaacttctcactactcaaacaagcaggtgacgtggaggagaatcccgggcctactagtatggactggatttggcgcatccttttccttgtcggcgctgctaccggcgcgcattccttcgaagaggtgcagctggttgaatctggcggaggactggttcagcctggcggatctctgagactgtcttgtgccgccagcggctacaccttcaccacctattggatgcactgggtccgacaggcccctggcaaaggacttgagtgggtcggatatatcaggcccagcaccggctacacagagtacaaccagaagttcaaggaccgcttcaccatcagcgccgacaccagcaagaataccgcctacctccagatgaacagcctgagagccgaggacaccgccgtgtactactgtgccagatccagatggctgctggactattggggccagggcacactggttacagtttctacgcgtgcctctacaaagggaccctccgtgtttcctctggctcccagcagcaagtctacaagcggaggaacagccgctctgggctgcctggtcaaggattactttcccgagcctgtgaccgtgtcctggaatagcggagcactgacaagcggcgtgcacacctttccagccgtgctgcaaagcagcggcctgtactctctgagcagcgtggtcacagtgcctagctctagcctgggcacccagacctacatctgcaatgtgaaccacaagcctagcaacaccaaggtggacaagagagtggaacccaagagctgtgaagtgaaaaccgactccaccgaccacgtgaagcccaaagagacagagaacaccaagcagcccagcaagagctgccacaagcccaaggccatcgtgcacaccgagaaagtgaacatgatgagcctgaccgtgctgggcctgcggatgctgttcgccaaaaccgtggccgtgaacttcctgctgaccgccaagctgttcttcctc

SEQ ID NO: 3003 - DNA, 2337 bp, Artificial Sequence
  Synthetic Polynucloetide
atggccttaccagtgaccgccttgctcctgccgctggccttgctgctccacgccgccaggccggaagtgcagctggttgaatctggcggaggactggttcagcctggcggatctctgagactgtcttgtgccgccagcggcttcagcttcagcgacttttggatgagctgggtccgacaggcccctggcaaaggacttgaatgggtcgccacaatcagccaggccggcagcgagaaggactacgtggactctgtgaagggcagattcaccatcagccgggacaacgccaagaagtccctgtacctccagatgaacagcctgagagccgaggacaccgccgtgtactattgtgcctctggcgtgtacagcttcgactacagaggccagggcaccctggtcacagtctcttctggtaccggcggaggcggatctggcggcggaggtagcggtggcggaggatctgaattcgacatccagatgacacagagccctagcagcctgtctgccagcgtgggagacagagtgaccatcacctgtagagccagccaggacatcagcaactacctgaactggtatcagcagaagcccggcaaggcccctaagctgctgatctactacaccagcagactgcacagcggcgtgcccagcagattttctggctctggcagcggcaccgacttcaccctgacaatatctagcctccagcctgaggacttcgccacctactattgccagcagggcaacaccctgccttacacatttggacagggcaccaaggtggaaatcaagagactcgagggacagcctaaggccaatcctaccgtgacactgttccctccaagcagcgaagaactccaggccaacaaggccacacttgtgtgcctgatctccgacttctaccctggggctgtgacagtggcttggaaggccgatggatctcctgtgaaagccggcgtggaaaccaccaagccatccaagcagagcaacaacaaatacgccgccagctcctacctgagcctgacacctgagcagtggaagtcccacagatcctacagctgccaagtgacccacgaaggcagcaccgtggaaaagacagtggcccctacagagtgcagccccatcaagaccgatgtgattacaatggaccccaaggacaactgctccaaggacgccaacgataccctgctgctccagctgaccaacaccagcgcctactacatgtacttgttgctgctgctgaagtccgtggtgtacttcgccatcatcacatgctgcctgctgcggagaaccgccttctgctgcaacggcgagaagtctagggccaagcgatctggatctggagcaacaaacttctcactactcaaacaagcaggtgacgtggaggagaatcccgggcctactagtatggactggatttggcgcatccttttccttgtcggcgctgctaccggcgcgcattccttcgaagaagtgcagctggttgaatcaggtggcggcctggttcaacctggcggatctctgagactgagctgtgccgccagcggcttcaccttcagcgactactttatgagctgggtccgacaggcccctggcaaaggacttgaatgggtcgccaccatcagcaatggcggcacctacacttactaccccgacagcgtgaagggcagattcaccatctccagagacaacagcaagaacaccctgtacctccagatgaactccctgagagccgaggacaccgccgtgtactactgcgccagattcgacggctacatcttcgactattggggccagggcaccctggtcacagtctcttctacgcgtgcctctacaaagggaccctccgtgtttcctctggctcccagcagcaagtctacaagcggaggaacagccgctctgggctgcctggtcaaggattactttcccgagcctgtgaccgtgtcctggaatagcggagcactgacaagcggcgtgcacacctttccagccgtgctgcaaagcagcggcctgtactctctgagcagcgtggtcacagtgcctagctctagcctgggcacccagacctacatctgcaatgtgaaccacaagcctagcaacaccaaggtggacaagagagtggaacccaagagctgtgaagtgaaaaccgactccaccgaccacgtgaagcccaaagagacagagaacaccaagcagcccagcaagagctgccacaagcccaaggccatcgtgcacaccgagaaagtgaacatgatgagcctgaccgtgctgggcctgcggatgctgttcgccaaaaccgtggccgtgaacttcctgctgaccgccaagctgttcttcctc

SEQ ID NO: 3004 - DNA, 2751 bp, Artificial Sequence
  Synthetic Polynucloetide
atggccttaccagtgaccgccttgctcctgccgctggccttgctgctccacgccgccaggccggaagtgcagctggttgaatctggcggaggactggttcagcctggcggatctctgagactgtcttgtgccgccagcggcttcagcttcagcgacttttggatgagctgggtccgacaggcccctggcaaaggacttgaatgggtcgccacaatcagccaggccggcagcgagaaggactacgtggactctgtgaagggcagattcaccatcagccgggacaacgccaagaagtccctgtacctccagatgaacagcctgagagccgaggacaccgccgtgtactattgtgcctctggcgtgtacagcttcgactacagaggccagggcaccctggtcacagtctcttctggtaccggcggaggcggatctggcggcggaggtagcggtggcggaggatctgaattcgacatccagatgacacagactacatcctccctgtctgcctctctgggagacagagtcaccatcagttgcagggcaagtcaggacattagtaagtacctgaactggtatcagcagaaaccagatggaactgttaaactcctgatctaccatacatcaagattacactcaggagtcccatcaaggttcagtggcagtgggtctggaacagattattctctcaccattagcaacctggagcaagaagatattgccacttacttttgccaacagggtaatacgcttccgtacacgttcggaggggggaccaagctggagatcacactcgagggacagcctaaggccaatcctaccgtgacactgttccctccaagcagcgaagaactccaggccaacaaggccacacttgtgtgcctgatctccgacttctaccctggggctgtgacagtggcttggaaggccgatggatctcctgtgaaagccggcgtggaaaccaccaagccatccaagcagagcaacaacaaatacgccgccagctcctacctgagcctgacacctgagcagtggaagtcccacagatcctacagctgccaagtgacccacgaaggcagcaccgtggaaaagacagtggcccctacagagtgcagccccatcaagaccgatgtgattacaatggaccccaaggacaactgctccaaggacgccaacgataccctgctgctccagctgaccaacaccagcgcctactacatgtacttgttgctgctgctgaagtccgtggtgtacttcgccatcatcacatgctgcctgctgcggagaaccgccttctgctgcaacggcgagaagtctagggccaagcgatctggatctggagcaacaaacttctcactactcaaacaagcaggtgacgtggaggagaatcccgggcctactagtatggactggatttggcgcatccttttccttgtcggcgctgctaccggcgcgcattccgggccccagctccagctgcaagagtctggacctggcctggtcaagcctagcgagacactgagcctgacctgtaccgtgtccggcgatagcatcagcagcggcgattactactggggctggatcagacagcctcctggcaaaggactggaatggatcggccacatctactacagcggcgtgacctactacaaccccagcctgaagtccagagtgaccatcagcgtggacaccagccggaaccagttctccctgaagctgtctagcgtgacagccgccgataccgccgtgtactactgcaccagagaggacagcagcaactggcggagtagaggccagggaacactggtcacagttagctctggatccggcggaggcggaagtggaggcggaggatctggcggcggaggctctttcgaagtgaaactgcaggagtcaggacctggcctggtggcgccctcacagagcctgtccgtcacatgcactgtctcaggggtctcattacccgactatggtgtaagctggattcgccagcctccacgaaagggtctggagtggctgggagtaatatggggtagtgaaaccacatactataattcagctctcaaatccagactgaccatcatcaaggacaactccaagagccaagttttcttaaaaatgaacagtctgcaaactgatgacacagccatttactactgtgccaaacattattactacggtggtagctatgctatggactactggggccaaggaacctcagtcaccgtctcctcaacgcgtgcctctacaaagggaccctccgtgtttcctctggctcccagcagcaagtctacaagcggaggaacagccgctctgggctgcctggtcaaggattactttcccgagcctgtgaccgtgtcctggaatagcggagcactgacaagcggcgtgcacacctttccagccgtgctgcaaagcagcggcctgtactctctgagcagcgtggtcacagtgcctagctctagcctgggcacccagacctacatctgcaatgtgaaccacaagcctagcaacaccaaggtggacaagagagtggaacccaagagctgtgaagtgaaaaccgactccaccgaccacgtgaagcccaaagagacagagaacaccaagcagcccagcaagagctgccacaagcccaaggccatcgtgcacaccgagaaagtgaacatgatgagcctgaccgtgctgggcctgcggatgctgttcgccaaaaccgtggccgtgaacttcctgctgaccgccaagctgttcttcctc

SEQ ID NO: 3005 - DNA, 2754 bp, Artificial Sequence
  Synthetic Polynucloetide
atggccttaccagtgaccgccttgctcctgccgctggccttgctgctccacgccgccaggccggaagtgcagctggttgaatctggcggaggactggttcagcctggcggatctctgagactgtcttgtgccgccagcggcttcagcttcagcgacttttggatgagctgggtccgacaggcccctggcaaaggacttgaatgggtcgccacaatcagccaggccggcagcgagaaggactacgtggactctgtgaagggcagattcaccatcagccgggacaacgccaagaagtccctgtacctccagatgaacagcctgagagccgaggacaccgccgtgtactattgtgcctctggcgtgtacagcttcgactacagaggccagggcaccctggtcacagtctcttctggtaccggcggaggcggatctggcggcggaggtagcggtggcggaggatctgaattcgagatcgtgatgacccagagccctgccaccctgtctctgagccctggcgaaagagccaccctgagctgtagagccagccaggacatcagcaagtacctgaactggtatcagcagaagcccggccaggcccccagactgctgatctaccacaccagcagactgcacagcggcatccccgccagattttctggctctggcagcggcaccgactacaccctgacaatcagcagcctccagcccgaggacttcgccgtgtacttctgtcagcaaggcaacaccctgccctacaccttcggccagggcaccaagctggaaatcaagctcgagggacagcctaaggccaatcctaccgtgacactgttccctccaagcagcgaagaactccaggccaacaaggccacacttgtgtgcctgatctccgacttctaccctggggctgtgacagtggcttggaaggccgatggatctcctgtgaaagccggcgtggaaaccaccaagccatccaagcagagcaacaacaaatacgccgccagctcctacctgagcctgacacctgagcagtggaagtcccacagatcctacagctgccaagtgacccacgaaggcagcaccgtggaaaagacagtggcccctacagagtgcagccccatcaagaccgatgtgattacaatggaccccaaggacaactgctccaaggacgccaacgataccctgctgctccagctgaccaacaccagcgcctactacatgtacttgttgctgctgctgaagtccgtggtgtacttcgccatcatcacatgctgcctgctgcggagaaccgccttctgctgcaacggcgagaagtctagggccaagcgatctggatctggagcaacaaacttctcactactcaaacaagcaggtgacgtggaggagaatcccgggcctactagtatggactggatttggcgcatccttttccttgtcggcgctgctaccggcgcgcattccgggccccagctccagctgcaagagtctggacctggcctggtcaagcctagcgagacactgagcctgacctgtaccgtgtccggcgatagcatcagcagcggcgattactactggggctggatcagacagcctcctggcaaaggactggaatggatcggccacatctactacagcggcgtgacctactacaaccccagcctgaagtccagagtgaccatcagcgtggacaccagccggaaccagttctccctgaagctgtctagcgtgacagccgccgataccgccgtgtactactgcaccagagaggacagcagcaactggcggagtagaggccagggaacactggtcacagttagctctggatccggcggaggcggaagtggaggcggaggatctggcggcggaggctctttcgaacaggtgcaactccaggaatctggccctggcctcgtgaagcccagcgagacactgagcctgacctgtaccgtgtccggcgtgtccctgcctgactatggcgtgtcctggatcagacagccccctggcaagggcctggaatggatcggagtgatttggggcagcgaaaccacctactacaacagctccctgaagtccagagtgaccatctccaaggacaactccaagaaccaggtgtccctgaagctgagcagcgtgacagccgccgacaccgccgtgtattactgcgccaagcactactactacggcggcagctacgctatggactactggggccagggaaccctcgtgaccgtgtctagtacgcgtgcctctacaaagggaccctccgtgtttcctctggctcccagcagcaagtctacaagcggaggaacagccgctctgggctgcctggtcaaggattactttcccgagcctgtgaccgtgtcctggaatagcggagcactgacaagcggcgtgcacacctttccagccgtgctgcaaagcagcggcctgtactctctgagcagcgtggtcacagtgcctagctctagcctgggcacccagacctacatctgcaatgtgaaccacaagcctagcaacaccaaggtggacaagagagtggaacccaagagctgtgaagtgaaaaccgactccaccgaccacgtgaagcccaaagagacagagaacaccaagcagcccagcaagagctgccacaagcccaaggccatcgtgcacaccgagaaagtgaacatgatgagcctgaccgtgctgggcctgcggatgctgttcgccaaaaccgtggccgtgaacttcctgctgaccgccaagctgttcttcctc

SEQ ID NO: 3006 - DNA, 2757 bp, Artificial Sequence
  Synthetic Polynucloetide
atggccttaccagtgaccgccttgctcctgccgctggccttgctgctccacgccgccaggccggaagtgcagctggttgaatctggcggaggactggttcagcctggcggatctctgagactgtcttgtgccgccagcggcttcagcttcagcgacttttggatgagctgggtccgacaggcccctggcaaaggacttgaatgggtcgccacaatcagccaggccggcagcgagaaggactacgtggactctgtgaagggcagattcaccatcagccgggacaacgccaagaagtccctgtacctccagatgaacagcctgagagccgaggacaccgccgtgtactattgtgcctctggcgtgtacagcttcgactacagaggccagggcaccctggtcacagtctcttctggtaccggcggaggcggatctggcggcggaggtagcggtggcggaggatctgaattcgacgagatcgtgctgacacagagccccgccaccctgtcactgtctccaggcgaaagagccaccctgagctgtagcgccagcagcagcgtgtcctacatgcactggtatcagcagaagcccggccaggcccccagactgctgatctacgataccagcaagctggcctccggcatccccgccagattttctggcagcggctccggcaccgacttcaccctgacaatcagcagcctggaacccgaggacgtggccgtgtactactgttttcaaggcagcgtgtaccccttcaccttcggccagggcaccaagctggaaatcaagagactcgagggacagcctaaggccaatcctaccgtgacactgttccctccaagcagcgaagaactccaggccaacaaggccacacttgtgtgcctgatctccgacttctaccctggggctgtgacagtggcttggaaggccgatggatctcctgtgaaagccggcgtggaaaccaccaagccatccaagcagagcaacaacaaatacgccgccagctcctacctgagcctgacacctgagcagtggaagtcccacagatcctacagctgccaagtgacccacgaaggcagcaccgtggaaaagacagtggcccctacagagtgcagccccatcaagaccgatgtgattacaatggaccccaaggacaactgctccaaggacgccaacgataccctgctgctccagctgaccaacaccagcgcctactacatgtacttgttgctgctgctgaagtccgtggtgtacttcgccatcatcacatgctgcctgctgcggagaaccgccttctgctgcaacggcgagaagtctagggccaagcgatctggatctggagcaacaaacttctcactactcaaacaagcaggtgacgtggaggagaatcccgggcctactagtatggactggatttggcgcatccttttccttgtcggcgctgctaccggcgcgcattccgggccccagctccagctgcaagagtctggacctggcctggtcaagcctagcgagacactgagcctgacctgtaccgtgtccggcgatagcatcagcagcggcgattactactggggctggatcagacagcctcctggcaaaggactggaatggatcggccacatctactacagcggcgtgacctactacaaccccagcctgaagtccagagtgaccatcagcgtggacaccagccggaaccagttctccctgaagctgtctagcgtgacagccgccgataccgccgtgtactactgcaccagagaggacagcagcaactggcggagtagaggccagggaacactggtcacagttagctctggatccggcggaggcggaagtggaggcggaggatctggcggcggaggctctttcgaacaggtgcagctccaggaatctggccctggcctcgtgaagcctagccagaccctgagcctgacctgtaccgtgtctggcggcagcatcagcacaagcggcatgggcgtgggctggatcagacagcaccctggcaagggcctggaatggatcggccacatttggtgggacgacgacaagcggtacaaccccgccctgaagtccagagtgaccatcagcgtggacaccagcaagaaccagttcagcctgaagctgagcagcgtgacagccgccgataccgccgtgtattattgcgcccggatggaactgtggtcctactacttcgactactggggccagggaaccctcgtgaccgtgtctagtacgcgtgcctctacaaagggaccctccgtgtttcctctggctcccagcagcaagtctacaagcggaggaacagccgctctgggctgcctggtcaaggattactttcccgagcctgtgaccgtgtcctggaatagcggagcactgacaagcggcgtgcacacctttccagccgtgctgcaaagcagcggcctgtactctctgagcagcgtggtcacagtgcctagctctagcctgggcacccagacctacatctgcaatgtgaaccacaagcctagcaacaccaaggtggacaagagagtggaacccaagagctgtgaagtgaaaaccgactccaccgaccacgtgaagcccaaagagacagagaacaccaagcagcccagcaagagctgccacaagcccaaggccatcgtgcacaccgagaaagtgaacatgatgagcctgaccgtgctgggcctgcggatgctgttcgccaaaaccgtggccgtgaacttcctgctgaccgccaagctgttcttcctc

SEQ ID NO: 3007 - DNA, 2751 bp, Artificial Sequence
  Synthetic Polynucloetide
atggccttaccagtgaccgccttgctcctgccgctggccttgctgctccacgccgccaggccggaagtgcagctggttgaatctggcggaggactggttcagcctggcggatctctgagactgtcttgtgccgccagcggcttcagcttcagcgacttttggatgagctgggtccgacaggcccctggcaaaggacttgaatgggtcgccacaatcagccaggccggcagcgagaaggactacgtggactctgtgaagggcagattcaccatcagccgggacaacgccaagaagtccctgtacctccagatgaacagcctgagagccgaggacaccgccgtgtactattgtgcctctggcgtgtacagcttcgactacagaggccagggcaccctggtcacagtctcttctggtaccggcggaggcggatctggcggcggaggtagcggtggcggaggatctgaattcgactacatccacgtgacacagagccctagcagcctgtccgtgtccatcggcgatagagtgaccatcaactgccagacctctcaaggcgtgggcagcgacctgcactggtatcagcacaaacctggcagagcccctaagctgctgatccaccatgccagctctgtggaagatggcgtgcccagcagattttccggcaccggatttcacaccagcttcaacctgacaatcaacgacctccaggccgacgacatcggcacctactactgtcaagtgctccagagcttcggcagaggcagcagactggatacaaaactcgagggacagcctaaggccaatcctaccgtgacactgttccctccaagcagcgaagaactccaggccaacaaggccacacttgtgtgcctgatctccgacttctaccctggggctgtgacagtggcttggaaggccgatggatctcctgtgaaagccggcgtggaaaccaccaagccatccaagcagagcaacaacaaatacgccgccagctcctacctgagcctgacacctgagcagtggaagtcccacagatcctacagctgccaagtgacccacgaaggcagcaccgtggaaaagacagtggcccctacagagtgcagccccatcaagaccgatgtgattacaatggaccccaaggacaactgctccaaggacgccaacgataccctgctgctccagctgaccaacaccagcgcctactacatgtacttgttgctgctgctgaagtccgtggtgtacttcgccatcatcacatgctgcctgctgcggagaaccgccttctgctgcaacggcgagaagtctagggccaagcgatctggatctggagcaacaaacttctcactactcaaacaagcaggtgacgtggaggagaatcccgggcctactagtatggactggatttggcgcatccttttccttgtcggcgctgctaccggcgcgcattccgggccccagctccagctgcaagagtctggacctggcctggtcaagcctagcgagacactgagcctgacctgtaccgtgtccggcgatagcatcagcagcggcgattactactggggctggatcagacagcctcctggcaaaggactggaatggatcggccacatctactacagcggcgtgacctactacaaccccagcctgaagtccagagtgaccatcagcgtggacaccagccggaaccagttctccctgaagctgtctagcgtgacagccgccgataccgccgtgtactactgcaccagagaggacagcagcaactggcggagtagaggccagggaacactggtcacagttagctctggatccggcggaggcggaagtggaggcggaggatctggcggcggaggctctttcgaaagggcacacctggtgcagtctggcaccgccatgaagaaacctggcgcttccgtcagagtgtcctgtcagacaagcggctacaccttcacagcccacatcctgttctggttcagacaggccccaggcagaggactggaatgggtcggatggatcaagccccagtacggggccgtgaatttcggcggaggcttcagagacagagtgaccctgaccagggacgtgtaccgggaaatcgcctacatggacatccggggcctgaagcctgatgacaccgccgtgtactactgcgccagggatagaagctacggcgacagctcttgggctctcgatgcttggggacagggcacaacagtggtggtgtctgctacgcgtgcctctacaaagggaccctccgtgtttcctctggctcccagcagcaagtctacaagcggaggaacagccgctctgggctgcctggtcaaggattactttcccgagcctgtgaccgtgtcctggaatagcggagcactgacaagcggcgtgcacacctttccagccgtgctgcaaagcagcggcctgtactctctgagcagcgtggtcacagtgcctagctctagcctgggcacccagacctacatctgcaatgtgaaccacaagcctagcaacaccaaggtggacaagagagtggaacccaagagctgtgaagtgaaaaccgactccaccgaccacgtgaagcccaaagagacagagaacaccaagcagcccagcaagagctgccacaagcccaaggccatcgtgcacaccgagaaagtgaacatgatgagcctgaccgtgctgggcctgcggatgctgttcgccaaaaccgtggccgtgaacttcctgctgaccgccaagctgttcttcctc

SEQ ID NO: 3008 - DNA, 2781 bp, Artificial Sequence
  Synthetic Polynucloetide
atggccttaccagtgaccgccttgctcctgccgctggccttgctgctccacgccgccaggccggaagtgcagctggttgaatctggcggaggactggttcagcctggcggatctctgagactgtcttgtgccgccagcggcttcagcttcagcgacttttggatgagctgggtccgacaggcccctggcaaaggacttgaatgggtcgccacaatcagccaggccggcagcgagaaggactacgtggactctgtgaagggcagattcaccatcagccgggacaacgccaagaagtccctgtacctccagatgaacagcctgagagccgaggacaccgccgtgtactattgtgcctctggcgtgtacagcttcgactacagaggccagggcaccctggtcacagtctcttctggtaccggcggaggcggatctggcggcggaggtagcggtggcggaggatctgaattcgacgtgcagatgatccagacccccgatagcctggccgtgtccctgggacagagagccaccatctcttgcagagccagcgagagcgtggacaactacggcatcagcttcatgcactggtatcagcagaagcccggccagagccccaagctgctgatctacagagcctccaacctggaaagcggcatccccgccagattttccggcagcggcagcagaaccgacttcaccctgaccatcaaccccgtggaaaccgacgacgtggcaacctactactgccagcagaacaacaaggacccccccacctttggcggaggcaccaagctggaaatcaagctcgagggacagcctaaggccaatcctaccgtgacactgttccctccaagcagcgaagaactccaggccaacaaggccacacttgtgtgcctgatctccgacttctaccctggggctgtgacagtggcttggaaggccgatggatctcctgtgaaagccggcgtggaaaccaccaagccatccaagcagagcaacaacaaatacgccgccagctcctacctgagcctgacacctgagcagtggaagtcccacagatcctacagctgccaagtgacccacgaaggcagcaccgtggaaaagacagtggcccctacagagtgcagccccatcaagaccgatgtgattacaatggaccccaaggacaactgctccaaggacgccaacgataccctgctgctccagctgaccaacaccagcgcctactacatgtacttgttgctgctgctgaagtccgtggtgtacttcgccatcatcacatgctgcctgctgcggagaaccgccttctgctgcaacggcgagaagtctagggccaagcgatctggatctggagcaacaaacttctcactactcaaacaagcaggtgacgtggaggagaatcccgggcctactagtatggactggatttggcgcatccttttccttgtcggcgctgctaccggcgcgcattccgggccccagctccagctgcaagagtctggacctggcctggtcaagcctagcgagacactgagcctgacctgtaccgtgtccggcgatagcatcagcagcggcgattactactggggctggatcagacagcctcctggcaaaggactggaatggatcggccacatctactacagcggcgtgacctactacaaccccagcctgaagtccagagtgaccatcagcgtggacaccagccggaaccagttctccctgaagctgtctagcgtgacagccgccgataccgccgtgtactactgcaccagagaggacagcagcaactggcggagtagaggccagggaacactggtcacagttagctctggatccggcggaggcggaagtggaggcggaggatctggcggcggaggctctttcgaagggggaggcggctctcaggtgcaactccagcagtctggcgctgagcttgtgaagcctggggccagcgtgaagattagctgcaaggccagcggctacgccttcagcagctactggatgaactgggtcaagcagcggcctggcaagggcctggaatggatcggccaaatctaccccggcgacggcgacaccacctacaacggcaagttcaagggcaaggccaccctgacagccgacaagagcagcagcaccgtgtacatgcaactgaacagcctgaccagcgaggacagcgccgtgtacttctgcgtgcggtactactacggcagctccggctacttcgactattggggccagggcaccacactgaccgtgtcctctacgcgtgcctctacaaagggaccctccgtgtttcctctggctcccagcagcaagtctacaagcggaggaacagccgctctgggctgcctggtcaaggattactttcccgagcctgtgaccgtgtcctggaatagcggagcactgacaagcggcgtgcacacctttccagccgtgctgcaaagcagcggcctgtactctctgagcagcgtggtcacagtgcctagctctagcctgggcacccagacctacatctgcaatgtgaaccacaagcctagcaacaccaaggtggacaagagagtggaacccaagagctgtgaagtgaaaaccgactccaccgaccacgtgaagcccaaagagacagagaacaccaagcagcccagcaagagctgccacaagcccaaggccatcgtgcacaccgagaaagtgaacatgatgagcctgaccgtgctgggcctgcggatgctgttcgccaaaaccgtggccgtgaacttcctgctgaccgccaagctgttcttcctc

SEQ ID NO: 3009 - DNA, 2754 bp, Artificial Sequence
  Synthetic Polynucloetide
atggccttaccagtgaccgccttgctcctgccgctggccttgctgctccacgccgccaggccggaagtgcagctggttgaatctggcggaggactggttcagcctggcggatctctgagactgtcttgtgccgccagcggcttcagcttcagcgacttttggatgagctgggtccgacaggcccctggcaaaggacttgaatgggtcgccacaatcagccaggccggcagcgagaaggactacgtggactctgtgaagggcagattcaccatcagccgggacaacgccaagaagtccctgtacctccagatgaacagcctgagagccgaggacaccgccgtgtactattgtgcctctggcgtgtacagcttcgactacagaggccagggcaccctggtcacagtctcttctggtaccggcggaggcggatctggcggcggaggtagcggtggcggaggatctgaattcgacgtgcagatgatccagacccccagcagcctgtctgccagcctgggcgatagagtgaccatcagctgtcgggccagccaggacatcggcaactacctgaactggtatcagcagaaacccgacggcaccgtgaagctgctgatctactacaccagcagactgcacagcggcgtgcccagcagattttctggcagcggctctggcaccgagtacagcctgaccatctccaacctggaacaggaagatattgctacctacttctgtcagcaaggcagcgccctgccccctacatttggcggcggaacaaagctggaaatcaacctcgagggacagcctaaggccaatcctaccgtgacactgttccctccaagcagcgaagaactccaggccaacaaggccacacttgtgtgcctgatctccgacttctaccctggggctgtgacagtggcttggaaggccgatggatctcctgtgaaagccggcgtggaaaccaccaagccatccaagcagagcaacaacaaatacgccgccagctcctacctgagcctgacacctgagcagtggaagtcccacagatcctacagctgccaagtgacccacgaaggcagcaccgtggaaaagacagtggcccctacagagtgcagccccatcaagaccgatgtgattacaatggaccccaaggacaactgctccaaggacgccaacgataccctgctgctccagctgaccaacaccagcgcctactacatgtacttgttgctgctgctgaagtccgtggtgtacttcgccatcatcacatgctgcctgctgcggagaaccgccttctgctgcaacggcgagaagtctagggccaagcgatctggatctggagcaacaaacttctcactactcaaacaagcaggtgacgtggaggagaatcccgggcctactagtatggactggatttggcgcatccttttccttgtcggcgctgctaccggcgcgcattccgggccccagctccagctgcaagagtctggacctggcctggtcaagcctagcgagacactgagcctgacctgtaccgtgtccggcgatagcatcagcagcggcgattactactggggctggatcagacagcctcctggcaaaggactggaatggatcggccacatctactacagcggcgtgacctactacaaccccagcctgaagtccagagtgaccatcagcgtggacaccagccggaaccagttctccctgaagctgtctagcgtgacagccgccgataccgccgtgtactactgcaccagagaggacagcagcaactggcggagtagaggccagggaacactggtcacagttagctctggatccggcggaggcggaagtggaggcggaggatctggcggcggaggctctttcgaagctctccagctccagcagtctggcgcagaactcgtgcggcctggcgcttctgtgaccctgagctgtaaagccagcggctacaccttcaccgactacgagatgcactgggtcaagcagacccctgtgcacggcctggaatggatcggagccatcgaccctgagacaggcggcaccgcctacaaccagaagttcgagggcaaggccatcctgaccgccgacaagagcagcagcacagcctacatggaactgcggagcctgacctccgaggacagccccgtgtactactgtgccagacggcggtactacggcagcagctccttcgactattggggccagggcaccaccctgaccgtgtctagtacgcgtgcctctacaaagggaccctccgtgtttcctctggctcccagcagcaagtctacaagcggaggaacagccgctctgggctgcctggtcaaggattactttcccgagcctgtgaccgtgtcctggaatagcggagcactgacaagcggcgtgcacacctttccagccgtgctgcaaagcagcggcctgtactctctgagcagcgtggtcacagtgcctagctctagcctgggcacccagacctacatctgcaatgtgaaccacaagcctagcaacaccaaggtggacaagagagtggaacccaagagctgtgaagtgaaaaccgactccaccgaccacgtgaagcccaaagagacagagaacaccaagcagcccagcaagagctgccacaagcccaaggccatcgtgcacaccgagaaagtgaacatgatgagcctgaccgtgctgggcctgcggatgctgttcgccaaaaccgtggccgtgaacttcctgctgaccgccaagctgttcttcctc

SEQ ID NO: 3010 - DNA, 2766 bp, Artificial Sequence
  Synthetic Polynucloetide
atggccttaccagtgaccgccttgctcctgccgctggccttgctgctccacgccgccaggccggaagtgcagctggttgaatctggcggaggactggttcagcctggcggatctctgagactgtcttgtgccgccagcggcttcagcttcagcgacttttggatgagctgggtccgacaggcccctggcaaaggacttgaatgggtcgccacaatcagccaggccggcagcgagaaggactacgtggactctgtgaagggcagattcaccatcagccgggacaacgccaagaagtccctgtacctccagatgaacagcctgagagccgaggacaccgccgtgtactattgtgcctctggcgtgtacagcttcgactacagaggccagggcaccctggtcacagtctcttctggtaccggcggaggcggatctggcggcggaggtagcggtggcggaggatctgaattcgacatcgtcctgacccagtccccagccagcctggcggtgtccctgggtcaacgagctaccatttcctgcagagcctctaagtccgtatccacttccggctatagttacctgcattggtaccaacagaaaccagggcagccacccaagctgctcatctatctggcctcaaacctggagtccggcgtgcccgccagattctccggaagtgggagcggcaccgactttacattgaacatccacccagtcgaagaggaagatgctgccacttattactgtcagcactccagggagctgccatttacatttggctctggcacaaaactggagatcaaactcgagggacagcctaaggccaatcctaccgtgacactgttccctccaagcagcgaagaactccaggccaacaaggccacacttgtgtgcctgatctccgacttctaccctggggctgtgacagtggcttggaaggccgatggatctcctgtgaaagccggcgtggaaaccaccaagccatccaagcagagcaacaacaaatacgccgccagctcctacctgagcctgacacctgagcagtggaagtcccacagatcctacagctgccaagtgacccacgaaggcagcaccgtggaaaagacagtggcccctacagagtgcagccccatcaagaccgatgtgattacaatggaccccaaggacaactgctccaaggacgccaacgataccctgctgctccagctgaccaacaccagcgcctactacatgtacttgttgctgctgctgaagtccgtggtgtacttcgccatcatcacatgctgcctgctgcggagaaccgccttctgctgcaacggcgagaagtctagggccaagcgatctggatctggagcaacaaacttctcactactcaaacaagcaggtgacgtggaggagaatcccgggcctactagtatggactggatttggcgcatccttttccttgtcggcgctgctaccggcgcgcattccgggccccagctccagctgcaagagtctggacctggcctggtcaagcctagcgagacactgagcctgacctgtaccgtgtccggcgatagcatcagcagcggcgattactactggggctggatcagacagcctcctggcaaaggactggaatggatcggccacatctactacagcggcgtgacctactacaaccccagcctgaagtccagagtgaccatcagcgtggacaccagccggaaccagttctccctgaagctgtctagcgtgacagccgccgataccgccgtgtactactgcaccagagaggacagcagcaactggcggagtagaggccagggaacactggtcacagttagctctggatccggcggaggcggaagtggaggcggaggatctggcggcggaggctctttcgaacaggttcagctggtcgagtccgggggaggtctggtacagccgggtggcagcctcaagctgtcatgtgccgcatctggttttgactttagcaggtattggatgagctgggtccgccaggccccgggcaagggacttgagtggattggagaaataaaccctacttccagcacaatcaacttcacaccttctttgaaagataaggtttttatctctcgggataacgctaaaaacacactgtacttgcagatgtctaaggtgcgaagcgaagacaccgccctctattattgcgcccggggtaattactaccgctatggggatgcgatggactattgggggcaaggtacctccgtcacggtctcaacgcgtgcctctacaaagggaccctccgtgtttcctctggctcccagcagcaagtctacaagcggaggaacagccgctctgggctgcctggtcaaggattactttcccgagcctgtgaccgtgtcctggaatagcggagcactgacaagcggcgtgcacacctttccagccgtgctgcaaagcagcggcctgtactctctgagcagcgtggtcacagtgcctagctctagcctgggcacccagacctacatctgcaatgtgaaccacaagcctagcaacaccaaggtggacaagagagtggaacccaagagctgtgaagtgaaaaccgactccaccgaccacgtgaagcccaaagagacagagaacaccaagcagcccagcaagagctgccacaagcccaaggccatcgtgcacaccgagaaagtgaacatgatgagcctgaccgtgctgggcctgcggatgctgttcgccaaaaccgtggccgtgaacttcctgctgaccgccaagctgttcttcctc

SEQ ID NO: 3011 - DNA, 2760 bp, Artificial Sequence
  Synthetic Polynucloetide
atggccttaccagtgaccgccttgctcctgccgctggccttgctgctccacgccgccaggccggaagtgcagctggttgaatctggcggaggactggttcagcctggcggatctctgagactgtcttgtgccgccagcggcttcagcttcagcgacttttggatgagctgggtccgacaggcccctggcaaaggacttgaatgggtcgccacaatcagccaggccggcagcgagaaggactacgtggactctgtgaagggcagattcaccatcagccgggacaacgccaagaagtccctgtacctccagatgaacagcctgagagccgaggacaccgccgtgtactattgtgcctctggcgtgtacagcttcgactacagaggccagggcaccctggtcacagtctcttctggtaccggcggaggcggatctggcggcggaggtagcggtggcggaggatctgaattcgacatccagatgacccagagccctagctcactgagcgccagcgtgggcgacagggtgaccattacctgctccgccagccaggacatcagcaactacctgaactggtaccagcagaagcccggcaaggcccccaagctgctgatctactacacctccaacctgcactccggcgtgcccagcaggttcagcggaagcggcagcggcaccgatttcaccctgaccatctccagcctgcagcccgaggacttcgccacctactactgccagcagtacaggaagctcccctggactttcggccagggcaccaaactggagatcaagcgtctcgagggacagcctaaggccaatcctaccgtgacactgttccctccaagcagcgaagaactccaggccaacaaggccacacttgtgtgcctgatctccgacttctaccctggggctgtgacagtggcttggaaggccgatggatctcctgtgaaagccggcgtggaaaccaccaagccatccaagcagagcaacaacaaatacgccgccagctcctacctgagcctgacacctgagcagtggaagtcccacagatcctacagctgccaagtgacccacgaaggcagcaccgtggaaaagacagtggcccctacagagtgcagccccatcaagaccgatgtgattacaatggaccccaaggacaactgctccaaggacgccaacgataccctgctgctccagctgaccaacaccagcgcctactacatgtacttgttgctgctgctgaagtccgtggtgtacttcgccatcatcacatgctgcctgctgcggagaaccgccttctgctgcaacggcgagaagtctagggccaagcgatctggatctggagcaacaaacttctcactactcaaacaagcaggtgacgtggaggagaatcccgggcctactagtatggactggatttggcgcatccttttccttgtcggcgctgctaccggcgcgcattccgggccccagctccagctgcaagagtctggacctggcctggtcaagcctagcgagacactgagcctgacctgtaccgtgtccggcgatagcatcagcagcggcgattactactggggctggatcagacagcctcctggcaaaggactggaatggatcggccacatctactacagcggcgtgacctactacaaccccagcctgaagtccagagtgaccatcagcgtggacaccagccggaaccagttctccctgaagctgtctagcgtgacagccgccgataccgccgtgtactactgcaccagagaggacagcagcaactggcggagtagaggccagggaacactggtcacagttagctctggatccggcggaggcggaagtggaggcggaggatctggcggcggaggctctttcgaacaggtgcagctggtccagagcggcgccgaagtgaagaagcccggcagctccgtgaaagtgagctgcaaggccagcggcggcaccttcagcaactactggatgcactgggtgaggcaggcccccggacagggcctggagtggatgggcgccacctacaggggccacagcgacacctactacaaccagaagttcaagggccgggtgaccatcaccgccgacaagagcaccagcaccgcctacatggaactgagcagcctcaggagcgaggacaccgctgtgtattactgcgccaggggcgccatctacgacggctacgacgtgctggacaactggggccagggcacactggtgaccgtgtccagcacgcgtgcctctacaaagggaccctccgtgtttcctctggctcccagcagcaagtctacaagcggaggaacagccgctctgggctgcctggtcaaggattactttcccgagcctgtgaccgtgtcctggaatagcggagcactgacaagcggcgtgcacacctttccagccgtgctgcaaagcagcggcctgtactctctgagcagcgtggtcacagtgcctagctctagcctgggcacccagacctacatctgcaatgtgaaccacaagcctagcaacaccaaggtggacaagagagtggaacccaagagctgtgaagtgaaaaccgactccaccgaccacgtgaagcccaaagagacagagaacaccaagcagcccagcaagagctgccacaagcccaaggccatcgtgcacaccgagaaagtgaacatgatgagcctgaccgtgctgggcctgcggatgctgttcgccaaaaccgtggccgtgaacttcctgctgaccgccaagctgttcttcctc

SEQ ID NO: 3012 - DNA, 2760 bp, Artificial Sequence
  Synthetic Polynucloetide
atggccttaccagtgaccgccttgctcctgccgctggccttgctgctccacgccgccaggccggaagtgcagctggttgaatctggcggaggactggttcagcctggcggatctctgagactgtcttgtgccgccagcggcttcagcttcagcgacttttggatgagctgggtccgacaggcccctggcaaaggacttgaatgggtcgccacaatcagccaggccggcagcgagaaggactacgtggactctgtgaagggcagattcaccatcagccgggacaacgccaagaagtccctgtacctccagatgaacagcctgagagccgaggacaccgccgtgtactattgtgcctctggcgtgtacagcttcgactacagaggccagggcaccctggtcacagtctcttctggtaccggcggaggcggatctggcggcggaggtagcggtggcggaggatctgaattcgacatcgtgctgacacagagccctgccaccctgtctctgagccctggcgatagagccaccatcagctgtagagccagcgagagcgtgaccatcctgggcagccacctgatctactggtatcagcagaagcccggccagccccccagactgctgattcagctggcctccaatgtgcagaccggcgtgccagccagattttccggcagcggcagcagaaccgacttcaccctgaccatcagcagcgtggaacccgaggacttcgccgtgtactactgcctccagagccggaccatccccagaacattcggccagggcaccaagctggaaatcaagagactcgagggacagcctaaggccaatcctaccgtgacactgttccctccaagcagcgaagaactccaggccaacaaggccacacttgtgtgcctgatctccgacttctaccctggggctgtgacagtggcttggaaggccgatggatctcctgtgaaagccggcgtggaaaccaccaagccatccaagcagagcaacaacaaatacgccgccagctcctacctgagcctgacacctgagcagtggaagtcccacagatcctacagctgccaagtgacccacgaaggcagcaccgtggaaaagacagtggcccctacagagtgcagccccatcaagaccgatgtgattacaatggaccccaaggacaactgctccaaggacgccaacgataccctgctgctccagctgaccaacaccagcgcctactacatgtacttgttgctgctgctgaagtccgtggtgtacttcgccatcatcacatgctgcctgctgcggagaaccgccttctgctgcaacggcgagaagtctagggccaagcgatctggatctggagcaacaaacttctcactactcaaacaagcaggtgacgtggaggagaatcccgggcctactagtatggactggatttggcgcatccttttccttgtcggcgctgctaccggcgcgcattccgggccccagctccagctgcaagagtctggacctggcctggtcaagcctagcgagacactgagcctgacctgtaccgtgtccggcgatagcatcagcagcggcgattactactggggctggatcagacagcctcctggcaaaggactggaatggatcggccacatctactacagcggcgtgacctactacaaccccagcctgaagtccagagtgaccatcagcgtggacaccagccggaaccagttctccctgaagctgtctagcgtgacagccgccgataccgccgtgtactactgcaccagagaggacagcagcaactggcggagtagaggccagggaacactggtcacagttagctctggatccggcggaggcggaagtggaggcggaggatctggcggcggaggctctttcgaacaggtgcagctggtgcagtctggccccgaagtgaagaaacccggcgagtccgtgaagatcagctgcaaggccagcggctacaccttccggcactacagcatgaactgggtcaagcaggccccaggccagggcctgaagtggatgggcagaatcaacaccgagagcggcgtgcccatctacgccgacgacttcaagggccggttcagcttcaccgtggacaccagcgccagcaccgcctacctggaaatctccagcctgaccagcgaggataccgccgtgtatttctgctccaacgactacctgtacagcctggatttctggggccagggaaccaccctgacagtgtcctctacgcgtgcctctacaaagggaccctccgtgtttcctctggctcccagcagcaagtctacaagcggaggaacagccgctctgggctgcctggtcaaggattactttcccgagcctgtgaccgtgtcctggaatagcggagcactgacaagcggcgtgcacacctttccagccgtgctgcaaagcagcggcctgtactctctgagcagcgtggtcacagtgcctagctctagcctgggcacccagacctacatctgcaatgtgaaccacaagcctagcaacaccaaggtggacaagagagtggaacccaagagctgtgaagtgaaaaccgactccaccgaccacgtgaagcccaaagagacagagaacaccaagcagcccagcaagagctgccacaagcccaaggccatcgtgcacaccgagaaagtgaacatgatgagcctgaccgtgctgggcctgcggatgctgttcgccaaaaccgtggccgtgaacttcctgctgaccgccaagctgttcttcctc

SEQ ID NO: 3013 - DNA, 2763 bp, Artificial Sequence
  Synthetic Polynucloetide
atggccttaccagtgaccgccttgctcctgccgctggccttgctgctccacgccgccaggccggaagtgcagctggttgaatctggcggaggactggttcagcctggcggatctctgagactgtcttgtgccgccagcggcttcagcttcagcgacttttggatgagctgggtccgacaggcccctggcaaaggacttgaatgggtcgccacaatcagccaggccggcagcgagaaggactacgtggactctgtgaagggcagattcaccatcagccgggacaacgccaagaagtccctgtacctccagatgaacagcctgagagccgaggacaccgccgtgtactattgtgcctctggcgtgtacagcttcgactacagaggccagggcaccctggtcacagtctcttctggtaccggcggaggcggatctggcggcggaggtagcggtggcggaggatctgaattccagtctgtgctgacacagcctcctagtgtgtctggcgctcctggacagagagtgaccatcagctgtacaggcagcagcagcaatatcggagccggctttgacgtgcactggtatcagcagctgcctggcacagcccctaaactgctgatctacggcaacagcaacagacccagcggcgtgcccgatagattttccggctctaagagcggcacaagcgccagcctggctattactggactccaggccgaggacgaggccgactactactgtcagagctacgacagcagcctgagcggctacgttttcggcaccggcaccaaagtgacagtgcttggtctcgagggacagcctaaggccaatcctaccgtgacactgttccctccaagcagcgaagaactccaggccaacaaggccacacttgtgtgcctgatctccgacttctaccctggggctgtgacagtggcttggaaggccgatggatctcctgtgaaagccggcgtggaaaccaccaagccatccaagcagagcaacaacaaatacgccgccagctcctacctgagcctgacacctgagcagtggaagtcccacagatcctacagctgccaagtgacccacgaaggcagcaccgtggaaaagacagtggcccctacagagtgcagccccatcaagaccgatgtgattacaatggaccccaaggacaactgctccaaggacgccaacgataccctgctgctccagctgaccaacaccagcgcctactacatgtacttgttgctgctgctgaagtccgtggtgtacttcgccatcatcacatgctgcctgctgcggagaaccgccttctgctgcaacggcgagaagtctagggccaagcgatctggatctggagcaacaaacttctcactactcaaacaagcaggtgacgtggaggagaatcccgggcctactagtatggactggatttggcgcatccttttccttgtcggcgctgctaccggcgcgcattccgggccccagctccagctgcaagagtctggacctggcctggtcaagcctagcgagacactgagcctgacctgtaccgtgtccggcgatagcatcagcagcggcgattactactggggctggatcagacagcctcctggcaaaggactggaatggatcggccacatctactacagcggcgtgacctactacaaccccagcctgaagtccagagtgaccatcagcgtggacaccagccggaaccagttctccctgaagctgtctagcgtgacagccgccgataccgccgtgtactactgcaccagagaggacagcagcaactggcggagtagaggccagggaacactggtcacagttagctctggatccggcggaggcggaagtggaggcggaggatctggcggcggaggctctttcgaacaagttcagctggttcagagcggagccgaagtgaagaaacctggggcctctgtgaaggtgtcctgcaaggcttccggctacacctttaccgattactacatgcactgggtccgacaggctcccggccaaagacttgaatggatgggctggatcaaccccaacagcggcggcacaaattacgcccagaagttccaggaccggatcaccgtgaccagagacaccagctccaacaccggctacatggaactgacccggctgagatccgatgacaccgccgtgtactactgcgctagaagcccttactccggcgtgctggataagtggggacagggcacactggtcaccgtgtcatctacgcgtgcctctacaaagggaccctccgtgtttcctctggctcccagcagcaagtctacaagcggaggaacagccgctctgggctgcctggtcaaggattactttcccgagcctgtgaccgtgtcctggaatagcggagcactgacaagcggcgtgcacacctttccagccgtgctgcaaagcagcggcctgtactctctgagcagcgtggtcacagtgcctagctctagcctgggcacccagacctacatctgcaatgtgaaccacaagcctagcaacaccaaggtggacaagagagtggaacccaagagctgtgaagtgaaaaccgactccaccgaccacgtgaagcccaaagagacagagaacaccaagcagcccagcaagagctgccacaagcccaaggccatcgtgcacaccgagaaagtgaacatgatgagcctgaccgtgctgggcctgcggatgctgttcgccaaaaccgtggccgtgaacttcctgctgaccgccaagctgttcttcctc

SEQ ID NO: 3014 - DNA, 2754 bp, Artificial Sequence
  Synthetic Polynucloetide
atggccttaccagtgaccgccttgctcctgccgctggccttgctgctccacgccgccaggccggaagtgcagctggttgaatctggcggaggactggttcagcctggcggatctctgagactgtcttgtgccgccagcggcttcagcttcagcgacttttggatgagctgggtccgacaggcccctggcaaaggacttgaatgggtcgccacaatcagccaggccggcagcgagaaggactacgtggactctgtgaagggcagattcaccatcagccgggacaacgccaagaagtccctgtacctccagatgaacagcctgagagccgaggacaccgccgtgtactattgtgcctctggcgtgtacagcttcgactacagaggccagggcaccctggtcacagtctcttctggtaccggcggaggcggatctggcggcggaggtagcggtggcggaggatctgaattccaggctgttctgacacagcctccatctgcctctggcacacctggacagagagtgaccatctcctgtagcggcagcagcagcaacatcggcagctacaccgtgtcctggtatcagcagctccctggaacagcccctaagttcctgatctacagcaacaaccagcggcctagcggcgtgcccgatagattttctggcagcaagagcggcacaagcgccagcctggctatttctggactccagtctgaggacgaggccgactactattgtgccgcctgggacgatagcctgaacggctatgtgtttggcaccggcaccaaagtgacagtgcttggtctcgagggacagcctaaggccaatcctaccgtgacactgttccctccaagcagcgaagaactccaggccaacaaggccacacttgtgtgcctgatctccgacttctaccctggggctgtgacagtggcttggaaggccgatggatctcctgtgaaagccggcgtggaaaccaccaagccatccaagcagagcaacaacaaatacgccgccagctcctacctgagcctgacacctgagcagtggaagtcccacagatcctacagctgccaagtgacccacgaaggcagcaccgtggaaaagacagtggcccctacagagtgcagccccatcaagaccgatgtgattacaatggaccccaaggacaactgctccaaggacgccaacgataccctgctgctccagctgaccaacaccagcgcctactacatgtacttgttgctgctgctgaagtccgtggtgtacttcgccatcatcacatgctgcctgctgcggagaaccgccttctgctgcaacggcgagaagtctagggccaagcgatctggatctggagcaacaaacttctcactactcaaacaagcaggtgacgtggaggagaatcccgggcctactagtatggactggatttggcgcatccttttccttgtcggcgctgctaccggcgcgcattccgggccccagctccagctgcaagagtctggacctggcctggtcaagcctagcgagacactgagcctgacctgtaccgtgtccggcgatagcatcagcagcggcgattactactggggctggatcagacagcctcctggcaaaggactggaatggatcggccacatctactacagcggcgtgacctactacaaccccagcctgaagtccagagtgaccatcagcgtggacaccagccggaaccagttctccctgaagctgtctagcgtgacagccgccgataccgccgtgtactactgcaccagagaggacagcagcaactggcggagtagaggccagggaacactggtcacagttagctctggatccggcggaggcggaagtggaggcggaggatctggcggcggaggctctttcgaagttcaactggttcagagcggagccgaagtgaagaagcctggcgagagcctgaagattagctgcaaaggcagcggctacgacttcaccacctactggatcggctgggtccgacagatgcctggcaaaggactggaatggatgggcatcatctaccccggcgacagcgacaccagatacagccctagcgttagaggccgcgtgaccatcagcgccgacaagtctatcaacaccgcctacctccagtggtccagcctggaagcctctgacaccgccatgtactactgcgccagaatgtggaccttcagccaggatggatggggccagggaacactggtcacagtgtcatctacgcgtgcctctacaaagggaccctccgtgtttcctctggctcccagcagcaagtctacaagcggaggaacagccgctctgggctgcctggtcaaggattactttcccgagcctgtgaccgtgtcctggaatagcggagcactgacaagcggcgtgcacacctttccagccgtgctgcaaagcagcggcctgtactctctgagcagcgtggtcacagtgcctagctctagcctgggcacccagacctacatctgcaatgtgaaccacaagcctagcaacaccaaggtggacaagagagtggaacccaagagctgtgaagtgaaaaccgactccaccgaccacgtgaagcccaaagagacagagaacaccaagcagcccagcaagagctgccacaagcccaaggccatcgtgcacaccgagaaagtgaacatgatgagcctgaccgtgctgggcctgcggatgctgttcgccaaaaccgtggccgtgaacttcctgctgaccgccaagctgttcttcctc

SEQ ID NO: 3015 - DNA, 2763 bp, Artificial Sequence
  Synthetic Polynucloetide
atggccttaccagtgaccgccttgctcctgccgctggccttgctgctccacgccgccaggccggaagtgcagctggttgaatctggcggaggactggttcagcctggcggatctctgagactgtcttgtgccgccagcggcttcagcttcagcgacttttggatgagctgggtccgacaggcccctggcaaaggacttgaatgggtcgccacaatcagccaggccggcagcgagaaggactacgtggactctgtgaagggcagattcaccatcagccgggacaacgccaagaagtccctgtacctccagatgaacagcctgagagccgaggacaccgccgtgtactattgtgcctctggcgtgtacagcttcgactacagaggccagggcaccctggtcacagtctcttctggtaccggcggaggcggatctggcggcggaggtagcggtggcggaggatctgaattcgacatcgtgatgacccagagccccgatagcctggccgtgtctctgggagagagagccaccatcaactgcaagagcagccagagcatcctgtacagcagcaaccagaagaactacctggcctggtatcagcagaagcccggccagagccctaagctgctgatctactgggccagcaccagagaaagcggcgtgcccgatagattcagcggcagcggctctggcaccgacttcaccctgaccatcagttctcttcaggccgaggacgtggccgtgtactactgccaccagtacatcagctcctacaccttcggccagggcaccaagctggaaatcaagctcgagggacagcctaaggccaatcctaccgtgacactgttccctccaagcagcgaagaactccaggccaacaaggccacacttgtgtgcctgatctccgacttctaccctggggctgtgacagtggcttggaaggccgatggatctcctgtgaaagccggcgtggaaaccaccaagccatccaagcagagcaacaacaaatacgccgccagctcctacctgagcctgacacctgagcagtggaagtcccacagatcctacagctgccaagtgacccacgaaggcagcaccgtggaaaagacagtggcccctacagagtgcagccccatcaagaccgatgtgattacaatggaccccaaggacaactgctccaaggacgccaacgataccctgctgctccagctgaccaacaccagcgcctactacatgtacttgttgctgctgctgaagtccgtggtgtacttcgccatcatcacatgctgcctgctgcggagaaccgccttctgctgcaacggcgagaagtctagggccaagcgatctggatctggagcaacaaacttctcactactcaaacaagcaggtgacgtggaggagaatcccgggcctactagtatggactggatttggcgcatccttttccttgtcggcgctgctaccggcgcgcattccgggccccagctccagctgcaagagtctggacctggcctggtcaagcctagcgagacactgagcctgacctgtaccgtgtccggcgatagcatcagcagcggcgattactactggggctggatcagacagcctcctggcaaaggactggaatggatcggccacatctactacagcggcgtgacctactacaaccccagcctgaagtccagagtgaccatcagcgtggacaccagccggaaccagttctccctgaagctgtctagcgtgacagccgccgataccgccgtgtactactgcaccagagaggacagcagcaactggcggagtagaggccagggaacactggtcacagttagctctggatccggcggaggcggaagtggaggcggaggatctggcggcggaggctctttcgaacaggtgcagctggtgcagtctggcgctgaagtgaagaaacctggggccagcgtgaaggtgtcctgcaaggccagcggctacacctttgccagccagtggatgcactggatgagacaggcccctggacagggcctggaatggatcggctggatcaaccccggcaacgtgaacaccaagtacaacgagaagttcaagggcagagccaccctgacagtggacaccagcaccaacaccgcctacatggaactgagcagcctgcggagcgaggacaccgccgtgtattattgcgccagaagcacctggtacagacccctggattattggggccagggaacccttgtgaccgtgtcctctacgcgtgcctctacaaagggaccctccgtgtttcctctggctcccagcagcaagtctacaagcggaggaacagccgctctgggctgcctggtcaaggattactttcccgagcctgtgaccgtgtcctggaatagcggagcactgacaagcggcgtgcacacctttccagccgtgctgcaaagcagcggcctgtactctctgagcagcgtggtcacagtgcctagctctagcctgggcacccagacctacatctgcaatgtgaaccacaagcctagcaacaccaaggtggacaagagagtggaacccaagagctgtgaagtgaaaaccgactccaccgaccacgtgaagcccaaagagacagagaacaccaagcagcccagcaagagctgccacaagcccaaggccatcgtgcacaccgagaaagtgaacatgatgagcctgaccgtgctgggcctgcggatgctgttcgccaaaaccgtggccgtgaacttcctgctgaccgccaagctgttcttcctc

SEQ ID NO: 3016 - DNA, 2763 bp, Artificial Sequence
  Synthetic Polynucloetide
atggccttaccagtgaccgccttgctcctgccgctggccttgctgctccacgccgccaggccggaagtgcagctggttgaatctggcggaggactggttcagcctggcggatctctgagactgtcttgtgccgccagcggcttcagcttcagcgacttttggatgagctgggtccgacaggcccctggcaaaggacttgaatgggtcgccacaatcagccaggccggcagcgagaaggactacgtggactctgtgaagggcagattcaccatcagccgggacaacgccaagaagtccctgtacctccagatgaacagcctgagagccgaggacaccgccgtgtactattgtgcctctggcgtgtacagcttcgactacagaggccagggcaccctggtcacagtctcttctggtaccggcggaggcggatctggcggcggaggtagcggtggcggaggatctgaattcgaccacatcgtgctgacccagagccctagcagcctgtctgccagcctgggcgacagagtgaccatcagctgtagagccagccaggacatcagcacctacctgaactggtatcagcagaaacccgacggcaccgtgaagctgctgatcttctacaccagcagactgcacgccggggtgcccagcagattttctggcagcggctctggcacccaccacagcctgaccatctccaacctggaacaggaagatattgctacctacttctgtcagcaaggcaacagcctgcccttcaccttcggcagcggcaccaagctggaaatcaagagactcgagggacagcctaaggccaatcctaccgtgacactgttccctccaagcagcgaagaactccaggccaacaaggccacacttgtgtgcctgatctccgacttctaccctggggctgtgacagtggcttggaaggccgatggatctcctgtgaaagccggcgtggaaaccaccaagccatccaagcagagcaacaacaaatacgccgccagctcctacctgagcctgacacctgagcagtggaagtcccacagatcctacagctgccaagtgacccacgaaggcagcaccgtggaaaagacagtggcccctacagagtgcagccccatcaagaccgatgtgattacaatggaccccaaggacaactgctccaaggacgccaacgataccctgctgctccagctgaccaacaccagcgcctactacatgtacttgttgctgctgctgaagtccgtggtgtacttcgccatcatcacatgctgcctgctgcggagaaccgccttctgctgcaacggcgagaagtctagggccaagcgatctggatctggagcaacaaacttctcactactcaaacaagcaggtgacgtggaggagaatcccgggcctactagtatggactggatttggcgcatccttttccttgtcggcgctgctaccggcgcgcattccgggccccagctccagctgcaagagtctggacctggcctggtcaagcctagcgagacactgagcctgacctgtaccgtgtccggcgatagcatcagcagcggcgattactactggggctggatcagacagcctcctggcaaaggactggaatggatcggccacatctactacagcggcgtgacctactacaaccccagcctgaagtccagagtgaccatcagcgtggacaccagccggaaccagttctccctgaagctgtctagcgtgacagccgccgataccgccgtgtactactgcaccagagaggacagcagcaactggcggagtagaggccagggaacactggtcacagttagctctggatccggcggaggcggaagtggaggcggaggatctggcggcggaggctctttcgaacaggtgcagctgaaagagagcggccctgagctggaaaagcctggggccagcgtgaagattagctgcaaggccagcggctacagcttcaccgcctacagcatgaactgggtcaagcagaacaacggcatgagcctggaatggatcggcagcatcgacccctactacggcgacaccaaatacgcccagaagttcaagggcaaggccaccctgaccgtggataaggccagcagcaccgcctacctccagctgaagtctctgaccagcgaggacagcgccgtgtactactgcgccagacggatgattaccaccggcgactggtacttcgacgtgtggggagccggaaccaccgtgacagtgtctagcacgcgtgcctctacaaagggaccctccgtgtttcctctggctcccagcagcaagtctacaagcggaggaacagccgctctgggctgcctggtcaaggattactttcccgagcctgtgaccgtgtcctggaatagcggagcactgacaagcggcgtgcacacctttccagccgtgctgcaaagcagcggcctgtactctctgagcagcgtggtcacagtgcctagctctagcctgggcacccagacctacatctgcaatgtgaaccacaagcctagcaacaccaaggtggacaagagagtggaacccaagagctgtgaagtgaaaaccgactccaccgaccacgtgaagcccaaagagacagagaacaccaagcagcccagcaagagctgccacaagcccaaggccatcgtgcacaccgagaaagtgaacatgatgagcctgaccgtgctgggcctgcggatgctgttcgccaaaaccgtggccgtgaacttcctgctgaccgccaagctgttcttcctc

SEQ ID NO: 3017 - DNA, 2763 bp, Artificial Sequence; identical to SEQ ID NO: 3016
  Synthetic Polynucloetide

SEQ ID NO: 3018 - DNA, 2763 bp, Artificial Sequence
  Synthetic Polynucloetide
atggccttaccagtgaccgccttgctcctgccgctggccttgctgctccacgccgccaggccggaagtgcagctggttgaatctggcggaggactggttcagcctggcggatctctgagactgtcttgtgccgccagcggcttcagcttcagcgacttttggatgagctgggtccgacaggcccctggcaaaggacttgaatgggtcgccacaatcagccaggccggcagcgagaaggactacgtggactctgtgaagggcagattcaccatcagccgggacaacgccaagaagtccctgtacctccagatgaacagcctgagagccgaggacaccgccgtgtactattgtgcctctggcgtgtacagcttcgactacagaggccagggcaccctggtcacagtctcttctggtaccggcggaggcggatctggcggcggaggtagcggtggcggaggatctgaattcgacgagatcgtgctgacacagagccctgccaccctgtctctgagccctggcgaaagagccaccctgagctgtagagccagccagagcgtgtccagctacctggcctggtatcagcagaagcccggccaggctccccggctgctgatctacgatgccagcaatagagccaccggcatccccgccagattttccggctctggcagcggcaccgacttcaccctgaccatcagctccctggaacccgaggacttcgccgtgtactactgccagcagcggagcaactggcccatcacattcggccagggcacccggctggaaatcaaactcgagggacagcctaaggccaatcctaccgtgacactgttccctccaagcagcgaagaactccaggccaacaaggccacacttgtgtgcctgatctccgacttctaccctggggctgtgacagtggcttggaaggccgatggatctcctgtgaaagccggcgtggaaaccaccaagccatccaagcagagcaacaacaaatacgccgccagctcctacctgagcctgacacctgagcagtggaagtcccacagatcctacagctgccaagtgacccacgaaggcagcaccgtggaaaagacagtggcccctacagagtgcagccccatcaagaccgatgtgattacaatggaccccaaggacaactgctccaaggacgccaacgataccctgctgctccagctgaccaacaccagcgcctactacatgtacttgttgctgctgctgaagtccgtggtgtacttcgccatcatcacatgctgcctgctgcggagaaccgccttctgctgcaacggcgagaagtctagggccaagcgatctggatctggagcaacaaacttctcactactcaaacaagcaggtgacgtggaggagaatcccgggcctactagtatggactggatttggcgcatccttttccttgtcggcgctgctaccggcgcgcattccgggccccagctccagctgcaagagtctggacctggcctggtcaagcctagcgagacactgagcctgacctgtaccgtgtccggcgatagcatcagcagcggcgattactactggggctggatcagacagcctcctggcaaaggactggaatggatcggccacatctactacagcggcgtgacctactacaaccccagcctgaagtccagagtgaccatcagcgtggacaccagccggaaccagttctccctgaagctgtctagcgtgacagccgccgataccgccgtgtactactgcaccagagaggacagcagcaactggcggagtagaggccagggaacactggtcacagttagctctggatccggcggaggcggaagtggaggcggaggatctggcggcggaggctctttcgaagaagtgcagctggtggaatcaggcggcggactggtgcagcctggcagaagcctgagactgagctgtgccgccagcggcttcaccttcaacgactacgccatgcactgggtgcgccaggcccctggaaaaggactggaatgggtgtccacaatcagctggaacagcggcagcatcggctacgccgatagcgtgaagggccggttcaccatcagccgggacaacgccaagaagtccctgtacctccagatgaacagcctgcgggccgaggacacagccctgtactattgcgccaaggacatccagtacggcaactactactacggcatggacgtgtggggccagggaaccaccgtgaccgtgtcatctacgcgtgcctctacaaagggaccctccgtgtttcctctggctcccagcagcaagtctacaagcggaggaacagccgctctgggctgcctggtcaaggattactttcccgagcctgtgaccgtgtcctggaatagcggagcactgacaagcggcgtgcacacctttccagccgtgctgcaaagcagcggcctgtactctctgagcagcgtggtcacagtgcctagctctagcctgggcacccagacctacatctgcaatgtgaaccacaagcctagcaacaccaaggtggacaagagagtggaacccaagagctgtgaagtgaaaaccgactccaccgaccacgtgaagcccaaagagacagagaacaccaagcagcccagcaagagctgccacaagcccaaggccatcgtgcacaccgagaaagtgaacatgatgagcctgaccgtgctgggcctgcggatgctgttcgccaaaaccgtggccgtgaacttcctgctgaccgccaagctgttcttcctc

SEQ ID NO: 3019 - DNA, 2769 bp, Artificial Sequence
  Synthetic Polynucloetide
atggccttaccagtgaccgccttgctcctgccgctggccttgctgctccacgccgccaggccggaagtgcagctggttgaatctggcggaggactggttcagcctggcggatctctgagactgtcttgtgccgccagcggcttcagcttcagcgacttttggatgagctgggtccgacaggcccctggcaaaggacttgaatgggtcgccacaatcagccaggccggcagcgagaaggactacgtggactctgtgaagggcagattcaccatcagccgggacaacgccaagaagtccctgtacctccagatgaacagcctgagagccgaggacaccgccgtgtactattgtgcctctggcgtgtacagcttcgactacagaggccagggcaccctggtcacagtctcttctggtaccggcggaggcggatctggcggcggaggtagcggtggcggaggatctgaattcgacatcgtgatgacccagacccccctgagcctgcctgtgacacctggcgagcctgccagcatctcctgcagaagcagcaagagcctgctgcacagcaacggcatcacctacctgtactggtatctgcagaaacccggccagagcccccaactgctgatctaccagatgagcaacctggtgtccggcgtgcccgacagattttctggcagcggctccggcaccgacttcaccctgaagatcagccgggtggaagccgaggacgtgggcgtgtactactgcgcccagaacctggaactgccctacacctttggcggcggaacaaaggtggaaatcaagcggctcgagggacagcctaaggccaatcctaccgtgacactgttccctccaagcagcgaagaactccaggccaacaaggccacacttgtgtgcctgatctccgacttctaccctggggctgtgacagtggcttggaaggccgatggatctcctgtgaaagccggcgtggaaaccaccaagccatccaagcagagcaacaacaaatacgccgccagctcctacctgagcctgacacctgagcagtggaagtcccacagatcctacagctgccaagtgacccacgaaggcagcaccgtggaaaagacagtggcccctacagagtgcagccccatcaagaccgatgtgattacaatggaccccaaggacaactgctccaaggacgccaacgataccctgctgctccagctgaccaacaccagcgcctactacatgtacttgttgctgctgctgaagtccgtggtgtacttcgccatcatcacatgctgcctgctgcggagaaccgccttctgctgcaacggcgagaagtctagggccaagcgatctggatctggagcaacaaacttctcactactcaaacaagcaggtgacgtggaggagaatcccgggcctactagtatggactggatttggcgcatccttttccttgtcggcgctgctaccggcgcgcattccgggccccagctccagctgcaagagtctggacctggcctggtcaagcctagcgagacactgagcctgacctgtaccgtgtccggcgatagcatcagcagcggcgattactactggggctggatcagacagcctcctggcaaaggactggaatggatcggccacatctactacagcggcgtgacctactacaaccccagcctgaagtccagagtgaccatcagcgtggacaccagccggaaccagttctccctgaagctgtctagcgtgacagccgccgataccgccgtgtactactgcaccagagaggacagcagcaactggcggagtagaggccagggaacactggtcacagttagctctggatccggcggaggcggaagtggaggcggaggatctggcggcggaggctctttcgaacaggtgcaactggtgcagagcggagccgaagtgaaaaagcccggcagcagcgtgaaggtgtcctgcaaggccagcggctacgccttcagctactcctggatcaactgggtgcgccaggcccctggacagggcctggaatggatgggcagaatcttccccggcgacggcgacaccgactacaacggcaagttcaagggcagagtgaccatcaccgccgacaagagcaccagcaccgcctacatggaactgagcagcctgcggagcgaggataccgccgtgtactattgtgccagaaacgtgttcgacggctactggctggtgtactggggccagggaacacttgtgaccgtgtccagcacgcgtgcctctacaaagggaccctccgtgtttcctctggctcccagcagcaagtctacaagcggaggaacagccgctctgggctgcctggtcaaggattactttcccgagcctgtgaccgtgtcctggaatagcggagcactgacaagcggcgtgcacacctttccagccgtgctgcaaagcagcggcctgtactctctgagcagcgtggtcacagtgcctagctctagcctgggcacccagacctacatctgcaatgtgaaccacaagcctagcaacaccaaggtggacaagagagtggaacccaagagctgtgaagtgaaaaccgactccaccgaccacgtgaagcccaaagagacagagaacaccaagcagcccagcaagagctgccacaagcccaaggccatcgtgcacaccgagaaagtgaacatgatgagcctgaccgtgctgggcctgcggatgctgttcgccaaaaccgtggccgtgaacttcctgctgaccgccaagctgttcttcctc

SEQ ID NO: 3020 - DNA, 2772 bp, Artificial Sequence
  Synthetic Polynucloetide
atggccttaccagtgaccgccttgctcctgccgctggccttgctgctccacgccgccaggccggaagtgcagctggttgaatctggcggaggactggttcagcctggcggatctctgagactgtcttgtgccgccagcggcttcagcttcagcgacttttggatgagctgggtccgacaggcccctggcaaaggacttgaatgggtcgccacaatcagccaggccggcagcgagaaggactacgtggactctgtgaagggcagattcaccatcagccgggacaacgccaagaagtccctgtacctccagatgaacagcctgagagccgaggacaccgccgtgtactattgtgcctctggcgtgtacagcttcgactacagaggccagggcaccctggtcacagtctcttctggtaccggcggaggcggatctggcggcggaggtagcggtggcggaggatctgaattcgacatccagatgacccagagccccagcagcctgtctgccagcgtgggcgacagagtgaccatcacctgtcggagcagccagagcatcgtgcactccgtgggcaacaccttcctggaatggtatcagcagaagcccggcaaggcccccaagctgctgatctacaaggtgtccaacagattcagcggcgtgcccagcaggtttagcggctctggcagcggcaccgacttcaccctgaccatctctagcctccagcccgaggacttcgccacctactactgttttcaaggcagccagttcccctacaccttcggccagggaacaaaggtggaaatcaagcggctcgagggacagcctaaggccaatcctaccgtgacactgttccctccaagcagcgaagaactccaggccaacaaggccacacttgtgtgcctgatctccgacttctaccctggggctgtgacagtggcttggaaggccgatggatctcctgtgaaagccggcgtggaaaccaccaagccatccaagcagagcaacaacaaatacgccgccagctcctacctgagcctgacacctgagcagtggaagtcccacagatcctacagctgccaagtgacccacgaaggcagcaccgtggaaaagacagtggcccctacagagtgcagccccatcaagaccgatgtgattacaatggaccccaaggacaactgctccaaggacgccaacgataccctgctgctccagctgaccaacaccagcgcctactacatgtacttgttgctgctgctgaagtccgtggtgtacttcgccatcatcacatgctgcctgctgcggagaaccgccttctgctgcaacggcgagaagtctagggccaagcgatctggatctggagcaacaaacttctcactactcaaacaagcaggtgacgtggaggagaatcccgggcctactagtatggactggatttggcgcatccttttccttgtcggcgctgctaccggcgcgcattccgggccccagctccagctgcaagagtctggacctggcctggtcaagcctagcgagacactgagcctgacctgtaccgtgtccggcgatagcatcagcagcggcgattactactggggctggatcagacagcctcctggcaaaggactggaatggatcggccacatctactacagcggcgtgacctactacaaccccagcctgaagtccagagtgaccatcagcgtggacaccagccggaaccagttctccctgaagctgtctagcgtgacagccgccgataccgccgtgtactactgcaccagagaggacagcagcaactggcggagtagaggccagggaacactggtcacagttagctctggatccggcggaggcggaagtggaggcggaggatctggcggcggaggctctttcgaagaagtgcaactggtggaaagcggaggcggcctggtgcagcctggcggatctctgagactgagctgtgccgccagcggctacgagttcagccggtcctggatgaactgggtgcgccaggcccctggcaagggactggaatgggtgggaagaatctaccccggcgacggcgacaccaactacagcggcaagttcaagggccggttcaccatcagcgccgacaccagcaagaacaccgcctacctccagatgaacagcctgcgggccgaggataccgccgtgtactactgtgccagagatggcagctcctgggactggtacttcgacgtgtggggacagggaacccttgtgaccgtgtccagcacgcgtgcctctacaaagggaccctccgtgtttcctctggctcccagcagcaagtctacaagcggaggaacagccgctctgggctgcctggtcaaggattactttcccgagcctgtgaccgtgtcctggaatagcggagcactgacaagcggcgtgcacacctttccagccgtgctgcaaagcagcggcctgtactctctgagcagcgtggtcacagtgcctagctctagcctgggcacccagacctacatctgcaatgtgaaccacaagcctagcaacaccaaggtggacaagagagtggaacccaagagctgtgaagtgaaaaccgactccaccgaccacgtgaagcccaaagagacagagaacaccaagcagcccagcaagagctgccacaagcccaaggccatcgtgcacaccgagaaagtgaacatgatgagcctgaccgtgctgggcctgcggatgctgttcgccaaaaccgtggccgtgaacttcctgctgaccgccaagctgttcttcctc

SEQ ID NO: 3021 - DNA, 2766 bp, Artificial Sequence
  Synthetic Polynucloetide
atggccttaccagtgaccgccttgctcctgccgctggccttgctgctccacgccgccaggccggaagtgcagctggttgaatctggcggaggactggttcagcctggcggatctctgagactgtcttgtgccgccagcggcttcagcttcagcgacttttggatgagctgggtccgacaggcccctggcaaaggacttgaatgggtcgccacaatcagccaggccggcagcgagaaggactacgtggactctgtgaagggcagattcaccatcagccgggacaacgccaagaagtccctgtacctccagatgaacagcctgagagccgaggacaccgccgtgtactattgtgcctctggcgtgtacagcttcgactacagaggccagggcaccctggtcacagtctcttctggtaccggcggaggcggatctggcggcggaggtagcggtggcggaggatctgaattcgacatccagatgacccagagccccagcagcctgtctgccagcgtgggcgacagagtgaccatcacctgtagagccagccagaccatctggtcctacctgaactggtatcagcagaggcccggcaaggcccccaacctgctgatctatgccgccagctctctccagagcggcgtgcccagcagattttccggcagaggcagcggcaccgacttcaccctgaccatcagttccttgcaggccgaggacttcgccacctactactgccagcagagctacagcatcccccagattttcggccagggcaccaagctggaaatcaagctcgagggacagcctaaggccaatcctaccgtgacactgttccctccaagcagcgaagaactccaggccaacaaggccacacttgtgtgcctgatctccgacttctaccctggggctgtgacagtggcttggaaggccgatggatctcctgtgaaagccggcgtggaaaccaccaagccatccaagcagagcaacaacaaatacgccgccagctcctacctgagcctgacacctgagcagtggaagtcccacagatcctacagctgccaagtgacccacgaaggcagcaccgtggaaaagacagtggcccctacagagtgcagccccatcaagaccgatgtgattacaatggaccccaaggacaactgctccaaggacgccaacgataccctgctgctccagctgaccaacaccagcgcctactacatgtacttgttgctgctgctgaagtccgtggtgtacttcgccatcatcacatgctgcctgctgcggagaaccgccttctgctgcaacggcgagaagtctagggccaagcgatctggatctggagcaacaaacttctcactactcaaacaagcaggtgacgtggaggagaatcccgggcctactagtatggactggatttggcgcatccttttccttgtcggcgctgctaccggcgcgcattccgggccccagctccagctgcaagagtctggacctggcctggtcaagcctagcgagacactgagcctgacctgtaccgtgtccggcgatagcatcagcagcggcgattactactggggctggatcagacagcctcctggcaaaggactggaatggatcggccacatctactacagcggcgtgacctactacaaccccagcctgaagtccagagtgaccatcagcgtggacaccagccggaaccagttctccctgaagctgtctagcgtgacagccgccgataccgccgtgtactactgcaccagagaggacagcagcaactggcggagtagaggccagggaacactggtcacagttagctctggatccggcggaggcggaagtggaggcggaggatctggcggcggaggctctttcgaacaggtgcagctccagcagtctggacccggcctcgtgaagcctagccagacactgagcctgacctgcgccatcagcggcgatagcgtgtccagcaatagcgccgcctggaactggatcagacagtccccctctcggggcctggaatggctgggccggacctactaccgcagcaagtggtacaacgactacgccgtgtccgtgaagtcccggatcaccatcaaccccgacaccagcaagaaccagttctccttgcaactgaacagcgtgacccccgaggacaccgccgtgtactactgcgccagagaagtgaccggcgacctggaagatgccttcgacatctggggccagggaacaatggtcacagtgtccagcacgcgtgcctctacaaagggaccctccgtgtttcctctggctcccagcagcaagtctacaagcggaggaacagccgctctgggctgcctggtcaaggattactttcccgagcctgtgaccgtgtcctggaatagcggagcactgacaagcggcgtgcacacctttccagccgtgctgcaaagcagcggcctgtactctctgagcagcgtggtcacagtgcctagctctagcctgggcacccagacctacatctgcaatgtgaaccacaagcctagcaacaccaaggtggacaagagagtggaacccaagagctgtgaagtgaaaaccgactccaccgaccacgtgaagcccaaagagacagagaacaccaagcagcccagcaagagctgccacaagcccaaggccatcgtgcacaccgagaaagtgaacatgatgagcctgaccgtgctgggcctgcggatgctgttcgccaaaaccgtggccgtgaacttcctgctgaccgccaagctgttcttcctc

SEQ ID NO: 3022 - DNA, 2745 bp, Artificial Sequence
  Synthetic Polynucloetide
atggccttaccagtgaccgccttgctcctgccgctggccttgctgctccacgccgccaggccggaagtgcagctggttgaatctggcggaggactggttcagcctggcggatctctgagactgtcttgtgccgccagcggcttcagcttcagcgacttttggatgagctgggtccgacaggcccctggcaaaggacttgaatgggtcgccacaatcagccaggccggcagcgagaaggactacgtggactctgtgaagggcagattcaccatcagccgggacaacgccaagaagtccctgtacctccagatgaacagcctgagagccgaggacaccgccgtgtactattgtgcctctggcgtgtacagcttcgactacagaggccagggcaccctggtcacagtctcttctggtaccggcggaggcggatctggcggcggaggtagcggtggcggaggatctgaattcgacatccagatgacccagagccccgccaccatcgagaacacaagcctgtctgccagcgtgggcgacagagtgaccatcacctgtagagccagccagggcatcagctcttggctgacctggtatcagcagaagcccgagaaggcccccaagagcctgatctacgccgccagctctctgcagtctggcgtgcccagcagattttccggcagcggctctggcaccgacttcaccctgacaatcagcagcctgcagcccgaggacttcgccacctactactgccagcagtacgacagctaccccatcaccttcggccagggcacccggctggaaatcaagctcgagggacagcctaaggccaatcctaccgtgacactgttccctccaagcagcgaagaactccaggccaacaaggccacacttgtgtgcctgatctccgacttctaccctggggctgtgacagtggcttggaaggccgatggatctcctgtgaaagccggcgtggaaaccaccaagccatccaagcagagcaacaacaaatacgccgccagctcctacctgagcctgacacctgagcagtggaagtcccacagatcctacagctgccaagtgacccacgaaggcagcaccgtggaaaagacagtggcccctacagagtgcagccccatcaagaccgatgtgattacaatggaccccaaggacaactgctccaaggacgccaacgataccctgctgctccagctgaccaacaccagcgcctactacatgtacttgttgctgctgctgaagtccgtggtgtacttcgccatcatcacatgctgcctgctgcggagaaccgccttctgctgcaacggcgagaagtctagggccaagcgatctggatctggagcaacaaacttctcactactcaaacaagcaggtgacgtggaggagaatcccgggcctactagtatggactggatttggcgcatccttttccttgtcggcgctgctaccggcgcgcattccgggccccagctccagctgcaagagtctggacctggcctggtcaagcctagcgagacactgagcctgacctgtaccgtgtccggcgatagcatcagcagcggcgattactactggggctggatcagacagcctcctggcaaaggactggaatggatcggccacatctactacagcggcgtgacctactacaaccccagcctgaagtccagagtgaccatcagcgtggacaccagccggaaccagttctccctgaagctgtctagcgtgacagccgccgataccgccgtgtactactgcaccagagaggacagcagcaactggcggagtagaggccagggaacactggtcacagttagctctggatccggcggaggcggaagtggaggcggaggatctggcggcggaggctctttcgaacaggtgcaactgcagcagtggggagccggactgctgaagcctagcgagacactgagcctgacctgcgccgtgtacggcggcagcttcagcgcctactattggagctggatcagacagccccctggcaagggcctggaatggatcggcgacatcaatcacggcggaggcaccaactacaaccccagcctgaagtcccgcgtgaccatctccgtggacaccagcaagaaccagttctccctgaagctgaacagcgtgacagccgccgacacagccgtgtactactgtgccagcctgaccgcctattggggccagggatctcttgtgaccgtgtccagcacgcgtgcctctacaaagggaccctccgtgtttcctctggctcccagcagcaagtctacaagcggaggaacagccgctctgggctgcctggtcaaggattactttcccgagcctgtgaccgtgtcctggaatagcggagcactgacaagcggcgtgcacacctttccagccgtgctgcaaagcagcggcctgtactctctgagcagcgtggtcacagtgcctagctctagcctgggcacccagacctacatctgcaatgtgaaccacaagcctagcaacaccaaggtggacaagagagtggaacccaagagctgtgaagtgaaaaccgactccaccgaccacgtgaagcccaaagagacagagaacaccaagcagcccagcaagagctgccacaagcccaaggccatcgtgcacaccgagaaagtgaacatgatgagcctgaccgtgctgggcctgcggatgctgttcgccaaaaccgtggccgtgaacttcctgctgaccgccaagctgttcttcctc

SEQ ID NO: 3023 - DNA, 2760 bp, Artificial Sequence
  Synthetic Polynucloetide
atggccttaccagtgaccgccttgctcctgccgctggccttgctgctccacgccgccaggccggaagtgcagctggttgaatctggcggaggactggttcagcctggcggatctctgagactgtcttgtgccgccagcggcttcagcttcagcgacttttggatgagctgggtccgacaggcccctggcaaaggacttgaatgggtcgccacaatcagccaggccggcagcgagaaggactacgtggactctgtgaagggcagattcaccatcagccgggacaacgccaagaagtccctgtacctccagatgaacagcctgagagccgaggacaccgccgtgtactattgtgcctctggcgtgtacagcttcgactacagaggccagggcaccctggtcacagtctcttctggtaccggcggaggcggatctggcggcggaggtagcggtggcggaggatctgaattcgacgagatcgtgctgacccagagccctgatagcctggccgtgtctctgggcgagagagccaccatcaactgcaaggccagccagagcgtggacttcgacggcgacagctacctgaactggtatcagcagaagcccggccagccccccaaggtgctgatctatgccgccagcacactgcagagcggcgtgcccagcagattttctggcagcggctccggcaccgacttcaccctgaccatcaacagcctggaagccgaggacgccgccacctactactgccagcagagcaacgaggacccctggacctttggcggcggaacaaaggtggaaatcaagctcgagggacagcctaaggccaatcctaccgtgacactgttccctccaagcagcgaagaactccaggccaacaaggccacacttgtgtgcctgatctccgacttctaccctggggctgtgacagtggcttggaaggccgatggatctcctgtgaaagccggcgtggaaaccaccaagccatccaagcagagcaacaacaaatacgccgccagctcctacctgagcctgacacctgagcagtggaagtcccacagatcctacagctgccaagtgacccacgaaggcagcaccgtggaaaagacagtggcccctacagagtgcagccccatcaagaccgatgtgattacaatggaccccaaggacaactgctccaaggacgccaacgataccctgctgctccagctgaccaacaccagcgcctactacatgtacttgttgctgctgctgaagtccgtggtgtacttcgccatcatcacatgctgcctgctgcggagaaccgccttctgctgcaacggcgagaagtctagggccaagcgatctggatctggagcaacaaacttctcactactcaaacaagcaggtgacgtggaggagaatcccgggcctactagtatggactggatttggcgcatccttttccttgtcggcgctgctaccggcgcgcattccgggccccagctccagctgcaagagtctggacctggcctggtcaagcctagcgagacactgagcctgacctgtaccgtgtccggcgatagcatcagcagcggcgattactactggggctggatcagacagcctcctggcaaaggactggaatggatcggccacatctactacagcggcgtgacctactacaaccccagcctgaagtccagagtgaccatcagcgtggacaccagccggaaccagttctccctgaagctgtctagcgtgacagccgccgataccgccgtgtactactgcaccagagaggacagcagcaactggcggagtagaggccagggaacactggtcacagttagctctggatccggcggaggcggaagtggaggcggaggatctggcggcggaggctctttcgaacaggtgcaactggtgcagtccggcgctgaagtgaagaaacctggggccagcgtgaaggtgtcctgcaaggtgtccggctacacctttaccgactactacattacctgggtgcgccaggcccctggacaggccctggaatggatgggctggatctaccccggcagcggcaacaccaagtacagccagaagttccagggcagattcgtgttcagcgtggacaccagcgccagcaccgcctacctgcaactgtctagcctgaaggccgaagataccgccgtgtactactgcgccaactacggcaactattggttcgcctattggggccagggaacccttgtgaccgtgtcctctacgcgtgcctctacaaagggaccctccgtgtttcctctggctcccagcagcaagtctacaagcggaggaacagccgctctgggctgcctggtcaaggattactttcccgagcctgtgaccgtgtcctggaatagcggagcactgacaagcggcgtgcacacctttccagccgtgctgcaaagcagcggcctgtactctctgagcagcgtggtcacagtgcctagctctagcctgggcacccagacctacatctgcaatgtgaaccacaagcctagcaacaccaaggtggacaagagagtggaacccaagagctgtgaagtgaaaaccgactccaccgaccacgtgaagcccaaagagacagagaacaccaagcagcccagcaagagctgccacaagcccaaggccatcgtgcacaccgagaaagtgaacatgatgagcctgaccgtgctgggcctgcggatgctgttcgccaaaaccgtggccgtgaacttcctgctgaccgccaagctgttcttcctc

SEQ ID NO: 3024 - DNA, 2751 bp, Artificial Sequence
  Synthetic Polynucloetide
atggccttaccagtgaccgccttgctcctgccgctggccttgctgctccacgccgccaggccggaagtgcagctggttgaatctggcggaggactggttcagcctggcggatctctgagactgtcttgtgccgccagcggcttcagcttcagcgacttttggatgagctgggtccgacaggcccctggcaaaggacttgaatgggtcgccacaatcagccaggccggcagcgagaaggactacgtggactctgtgaagggcagattcaccatcagccgggacaacgccaagaagtccctgtacctccagatgaacagcctgagagccgaggacaccgccgtgtactattgtgcctctggcgtgtacagcttcgactacagaggccagggcaccctggtcacagtctcttctggtaccggcggaggcggatctggcggcggaggtagcggtggcggaggatctgaattcgacatccagatgacccagagccccagcagcctgtctgccagcgtgggcgacagagtgaccatcacctgtagagccagccagggcatcagctcttggctggcctggtatcagcagaagcccgagaaggcccccaagagcctgatctacgccgcctctagtctccagagcggcgtgcccagcagattttctggcagcggctccggcaccgacttcaccctgacaatcagctccctccagcccgaggacttcgccacctactactgccagcagtacaacagctaccctcccacctttggcggaggcaccaaggtggaaatcaagctcgagggacagcctaaggccaatcctaccgtgacactgttccctccaagcagcgaagaactccaggccaacaaggccacacttgtgtgcctgatctccgacttctaccctggggctgtgacagtggcttggaaggccgatggatctcctgtgaaagccggcgtggaaaccaccaagccatccaagcagagcaacaacaaatacgccgccagctcctacctgagcctgacacctgagcagtggaagtcccacagatcctacagctgccaagtgacccacgaaggcagcaccgtggaaaagacagtggcccctacagagtgcagccccatcaagaccgatgtgattacaatggaccccaaggacaactgctccaaggacgccaacgataccctgctgctccagctgaccaacaccagcgcctactacatgtacttgttgctgctgctgaagtccgtggtgtacttcgccatcatcacatgctgcctgctgcggagaaccgccttctgctgcaacggcgagaagtctagggccaagcgatctggatctggagcaacaaacttctcactactcaaacaagcaggtgacgtggaggagaatcccgggcctactagtatggactggatttggcgcatccttttccttgtcggcgctgctaccggcgcgcattccgggccccagctccagctgcaagagtctggacctggcctggtcaagcctagcgagacactgagcctgacctgtaccgtgtccggcgatagcatcagcagcggcgattactactggggctggatcagacagcctcctggcaaaggactggaatggatcggccacatctactacagcggcgtgacctactacaaccccagcctgaagtccagagtgaccatcagcgtggacaccagccggaaccagttctccctgaagctgtctagcgtgacagccgccgataccgccgtgtactactgcaccagagaggacagcagcaactggcggagtagaggccagggaacactggtcacagttagctctggatccggcggaggcggaagtggaggcggaggatctggcggcggaggctctttcgaagaagtgcaactggtgcagtctggcggagggctggtgcatcctgggggaagcctgagactgagctgtgccggctctggcttcgccttcagcagcagcaccatgcactggatcagacaggcccctggcaagggcctggaatggatcagcctgatcggaagcggagggggcatctactacggcgacagcgtgaagggccggttcaccatcagccgggacaacgccaagaacagcctgtacctccagatgaactccctgcgggccgaggacatggccgtgtactattgtgtgcggggctacttcgactgggtggactacttcgattactggggccagggcaccctcgtgaccgtgtcatctacgcgtgcctctacaaagggaccctccgtgtttcctctggctcccagcagcaagtctacaagcggaggaacagccgctctgggctgcctggtcaaggattactttcccgagcctgtgaccgtgtcctggaatagcggagcactgacaagcggcgtgcacacctttccagccgtgctgcaaagcagcggcctgtactctctgagcagcgtggtcacagtgcctagctctagcctgggcacccagacctacatctgcaatgtgaaccacaagcctagcaacaccaaggtggacaagagagtggaacccaagagctgtgaagtgaaaaccgactccaccgaccacgtgaagcccaaagagacagagaacaccaagcagcccagcaagagctgccacaagcccaaggccatcgtgcacaccgagaaagtgaacatgatgagcctgaccgtgctgggcctgcggatgctgttcgccaaaaccgtggccgtgaacttcctgctgaccgccaagctgttcttcctc

SEQ ID NO: 3025 - DNA, 2781 bp, Artificial Sequence
  Synthetic Polynucloetide
atggccttaccagtgaccgccttgctcctgccgctggccttgctgctccacgccgccaggccggaagtgcagctggttgaatctggcggaggactggttcagcctggcggatctctgagactgtcttgtgccgccagcggcttcagcttcagcgacttttggatgagctgggtccgacaggcccctggcaaaggacttgaatgggtcgccacaatcagccaggccggcagcgagaaggactacgtggactctgtgaagggcagattcaccatcagccgggacaacgccaagaagtccctgtacctccagatgaacagcctgagagccgaggacaccgccgtgtactattgtgcctctggcgtgtacagcttcgactacagaggccagggcaccctggtcacagtctcttctggtaccggcggaggcggatctggcggcggaggtagcggtggcggaggatctgaattcgacgacatcgtgatgacacagtcaccagatagcctcaccgtctccctgggggagcggaccaccattaattgtaaatccagccaaagcgtgctggactcaagcaagaacaagaatagcctcgcctggtatcagcagaagcccggtcagcctccaaagctgctgctttcttgggcctccaccagagagtccgggattcctgataggtttagtggttcaggctccggcacagattttactctgaccattgattctctccagccagaggattctgcaacttattactgccagcaaagcgcccactttcctataacttttggccagggaacccgacttgaaatcaagctcgagggacagcctaaggccaatcctaccgtgacactgttccctccaagcagcgaagaactccaggccaacaaggccacacttgtgtgcctgatctccgacttctaccctggggctgtgacagtggcttggaaggccgatggatctcctgtgaaagccggcgtggaaaccaccaagccatccaagcagagcaacaacaaatacgccgccagctcctacctgagcctgacacctgagcagtggaagtcccacagatcctacagctgccaagtgacccacgaaggcagcaccgtggaaaagacagtggcccctacagagtgcagccccatcaagaccgatgtgattacaatggaccccaaggacaactgctccaaggacgccaacgataccctgctgctccagctgaccaacaccagcgcctactacatgtacttgttgctgctgctgaagtccgtggtgtacttcgccatcatcacatgctgcctgctgcggagaaccgccttctgctgcaacggcgagaagtctagggccaagcgatctggatctggagcaacaaacttctcactactcaaacaagcaggtgacgtggaggagaatcccgggcctactagtatggactggatttggcgcatccttttccttgtcggcgctgctaccggcgcgcattccgggccccagctccagctgcaagagtctggacctggcctggtcaagcctagcgagacactgagcctgacctgtaccgtgtccggcgatagcatcagcagcggcgattactactggggctggatcagacagcctcctggcaaaggactggaatggatcggccacatctactacagcggcgtgacctactacaaccccagcctgaagtccagagtgaccatcagcgtggacaccagccggaaccagttctccctgaagctgtctagcgtgacagccgccgataccgccgtgtactactgcaccagagaggacagcagcaactggcggagtagaggccagggaacactggtcacagttagctctggatccggcggaggcggaagtggaggcggaggatctggcggcggaggctctttcgaacaggtgcagctggtgcagagcggtgccgaagtgaagaaaccaggtgcatccgttaaagtttcatgtaaggctagtggatataccttcaccaattacggaatgaactgggtgaaacaggcccctggccagggactgaagtggatggggtggattaacacctacaccggggagccgacttatgcagacgactttaaggggcgggtcacgatgacctccgacacctccaccagtaccgcctacctggagctgcacaaccttaggtcagacgataccgccgtgtattactgtgcccgatggtcttggtccgacggatactatgtctacttcgactattggggccaggggaccacagttaccgtgtcctctacgcgtgcctctacaaagggaccctccgtgtttcctctggctcccagcagcaagtctacaagcggaggaacagccgctctgggctgcctggtcaaggattactttcccgagcctgtgaccgtgtcctggaatagcggagcactgacaagcggcgtgcacacctttccagccgtgctgcaaagcagcggcctgtactctctgagcagcgtggtcacagtgcctagctctagcctgggcacccagacctacatctgcaatgtgaaccacaagcctagcaacaccaaggtggacaagagagtggaacccaagagctgtgaagtgaaaaccgactccaccgaccacgtgaagcccaaagagacagagaacaccaagcagcccagcaagagctgccacaagcccaaggccatcgtgcacaccgagaaagtgaacatgatgagcctgaccgtgctgggcctgcggatgctgttcgccaaaaccgtggccgtgaacttcctgctgaccgccaagctgttcttcctc

SEQ ID NO: 3026 - DNA, 2769 bp, Artificial Sequence
  Synthetic Polynucloetide
atggccttaccagtgaccgccttgctcctgccgctggccttgctgctccacgccgccaggccggaagtgcagctggttgaatctggcggaggactggttcagcctggcggatctctgagactgtcttgtgccgccagcggcttcagcttcagcgacttttggatgagctgggtccgacaggcccctggcaaaggacttgaatgggtcgccacaatcagccaggccggcagcgagaaggactacgtggactctgtgaagggcagattcaccatcagccgggacaacgccaagaagtccctgtacctccagatgaacagcctgagagccgaggacaccgccgtgtactattgtgcctctggcgtgtacagcttcgactacagaggccagggcaccctggtcacagtctcttctggtaccggcggaggcggatctggcggcggaggtagcggtggcggaggatctgaattcgacgagatcgtgctgacacagagccctggaagcctggccgtgtctcctggcgagcgcgtgacaatgagctgcaagagcagccagagcgtgttcttcagcagctcccagaagaactacctggcctggtatcagcagatccccggccagagccccagactgctgatctactgggccagcaccagagaaagcggcgtgcccgatagattcaccggcagcggctctggcaccgacttcaccctgacaatcagcagcgtgcagcccgaggacctggctatctactactgccaccagtacctgagcagccggaccttcggccagggcaccaagctggaaatcaagagactcgagggacagcctaaggccaatcctaccgtgacactgttccctccaagcagcgaagaactccaggccaacaaggccacacttgtgtgcctgatctccgacttctaccctggggctgtgacagtggcttggaaggccgatggatctcctgtgaaagccggcgtggaaaccaccaagccatccaagcagagcaacaacaaatacgccgccagctcctacctgagcctgacacctgagcagtggaagtcccacagatcctacagctgccaagtgacccacgaaggcagcaccgtggaaaagacagtggcccctacagagtgcagccccatcaagaccgatgtgattacaatggaccccaaggacaactgctccaaggacgccaacgataccctgctgctccagctgaccaacaccagcgcctactacatgtacttgttgctgctgctgaagtccgtggtgtacttcgccatcatcacatgctgcctgctgcggagaaccgccttctgctgcaacggcgagaagtctagggccaagcgatctggatctggagcaacaaacttctcactactcaaacaagcaggtgacgtggaggagaatcccgggcctactagtatggactggatttggcgcatccttttccttgtcggcgctgctaccggcgcgcattccgggccccagctccagctgcaagagtctggacctggcctggtcaagcctagcgagacactgagcctgacctgtaccgtgtccggcgatagcatcagcagcggcgattactactggggctggatcagacagcctcctggcaaaggactggaatggatcggccacatctactacagcggcgtgacctactacaaccccagcctgaagtccagagtgaccatcagcgtggacaccagccggaaccagttctccctgaagctgtctagcgtgacagccgccgataccgccgtgtactactgcaccagagaggacagcagcaactggcggagtagaggccagggaacactggtcacagttagctctggatccggcggaggcggaagtggaggcggaggatctggcggcggaggctctttcgaacaggtgcaactgcagcagcctggcgctgaggtcgtgaagccaggcgcttccgtgaagatgtcctgcaaggccagcggctacaccttcaccagctactacatccactggatcaagcagacccctggacagggcctggaatgggtgggagtgatctaccccggcaacgacgacatcagctacaaccagaagttccagggcaaggccaccctgaccgccgacaagtctagcaccaccgcctacatgcaactgtccagcctgaccagcgaggacagcgccgtgtactactgcgccagagaagtgcggctgcggtacttcgatgtgtggggccagggaaccaccgtgaccgtgtcatctacgcgtgcctctacaaagggaccctccgtgtttcctctggctcccagcagcaagtctacaagcggaggaacagccgctctgggctgcctggtcaaggattactttcccgagcctgtgaccgtgtcctggaatagcggagcactgacaagcggcgtgcacacctttccagccgtgctgcaaagcagcggcctgtactctctgagcagcgtggtcacagtgcctagctctagcctgggcacccagacctacatctgcaatgtgaaccacaagcctagcaacaccaaggtggacaagagagtggaacccaagagctgtgaagtgaaaaccgactccaccgaccacgtgaagcccaaagagacagagaacaccaagcagcccagcaagagctgccacaagcccaaggccatcgtgcacaccgagaaagtgaacatgatgagcctgaccgtgctgggcctgcggatgctgttcgccaaaaccgtggccgtgaacttcctgctgaccgccaagctgttcttcctc

SEQ ID NO: 3027 - DNA, 2781 bp, Artificial Sequence
  Synthetic Polynucloetide
atggccttaccagtgaccgccttgctcctgccgctggccttgctgctccacgccgccaggccggaagtgcagctggttgaatctggcggaggactggttcagcctggcggatctctgagactgtcttgtgccgccagcggcttcagcttcagcgacttttggatgagctgggtccgacaggcccctggcaaaggacttgaatgggtcgccacaatcagccaggccggcagcgagaaggactacgtggactctgtgaagggcagattcaccatcagccgggacaacgccaagaagtccctgtacctccagatgaacagcctgagagccgaggacaccgccgtgtactattgtgcctctggcgtgtacagcttcgactacagaggccagggcaccctggtcacagtctcttctggtaccggcggaggcggatctggcggcggaggtagcggtggcggaggatctgaattcgatgtgctgctgacccagagccctctgagcctgcctgtgacactgggacagcctgccagcatctcctgtcggagcagccagaccatcgtgcacagcaacggcaacacctacctggaatggttccagcagcggccaggccagagccccagactgctgatctaccaggtgtccaacagattcagcggcgtgcccgacagattctccggcagcggctctggcaccgacttcaccctgaagatcagccgggtggaagccgaggacgtgggcgtgtactactgttttcaaggcagccacgtgccccggacctttggcggaggaacaaaggtggaaatcaagagagccctcgagggacagcctaaggccaatcctaccgtgacactgttccctccaagcagcgaagaactccaggccaacaaggccacacttgtgtgcctgatctccgacttctaccctggggctgtgacagtggcttggaaggccgatggatctcctgtgaaagccggcgtggaaaccaccaagccatccaagcagagcaacaacaaatacgccgccagctcctacctgagcctgacacctgagcagtggaagtcccacagatcctacagctgccaagtgacccacgaaggcagcaccgtggaaaagacagtggcccctacagagtgcagccccatcaagaccgatgtgattacaatggaccccaaggacaactgctccaaggacgccaacgataccctgctgctccagctgaccaacaccagcgcctactacatgtacttgttgctgctgctgaagtccgtggtgtacttcgccatcatcacatgctgcctgctgcggagaaccgccttctgctgcaacggcgagaagtctagggccaagcgatctggatctggagcaacaaacttctcactactcaaacaagcaggtgacgtggaggagaatcccgggcctactagtatggactggatttggcgcatccttttccttgtcggcgctgctaccggcgcgcattccgggccccagctccagctgcaagagtctggacctggcctggtcaagcctagcgagacactgagcctgacctgtaccgtgtccggcgatagcatcagcagcggcgattactactggggctggatcagacagcctcctggcaaaggactggaatggatcggccacatctactacagcggcgtgacctactacaaccccagcctgaagtccagagtgaccatcagcgtggacaccagccggaaccagttctccctgaagctgtctagcgtgacagccgccgataccgccgtgtactactgcaccagagaggacagcagcaactggcggagtagaggccagggaacactggtcacagttagctctggatccggcggaggcggaagtggaggcggaggatctggcggcggaggctctttcgaacagatccaactggtgcagagcggcagcgagctgaagaaacctggggccagcgtgaaggtgtcctgcaaggccagcggctacacctttaccaactacggcatgaactgggtgcgccaggcccctggacagggcctgaaatggatgggctggatcaacaccaacaccggcgagcctaagtacgccgaagagttcaagggcagattcgccctgagcctggacaccagcgtgtccacagcctacctccagatcaacagcctgaaggccgaggataccgccgtgtacttctgcgccagaggctacggcaactacgccagaggggcttggctggcctattggggccagggaacactcgtgaccgtgtcctctacgcgtgcctctacaaagggaccctccgtgtttcctctggctcccagcagcaagtctacaagcggaggaacagccgctctgggctgcctggtcaaggattactttcccgagcctgtgaccgtgtcctggaatagcggagcactgacaagcggcgtgcacacctttccagccgtgctgcaaagcagcggcctgtactctctgagcagcgtggtcacagtgcctagctctagcctgggcacccagacctacatctgcaatgtgaaccacaagcctagcaacaccaaggtggacaagagagtggaacccaagagctgtgaagtgaaaaccgactccaccgaccacgtgaagcccaaagagacagagaacaccaagcagcccagcaagagctgccacaagcccaaggccatcgtgcacaccgagaaagtgaacatgatgagcctgaccgtgctgggcctgcggatgctgttcgccaaaaccgtggccgtgaacttcctgctgaccgccaagctgttcttcctc

SEQ ID NO: 3028 - DNA, 2736 bp, Artificial Sequence
  Synthetic Polynucloetide
atggccttaccagtgaccgccttgctcctgccgctggccttgctgctccacgccgccaggccggaagtgcagctggttgaatctggcggaggactggttcagcctggcggatctctgagactgtcttgtgccgccagcggcttcagcttcagcgacttttggatgagctgggtccgacaggcccctggcaaaggacttgaatgggtcgccacaatcagccaggccggcagcgagaaggactacgtggactctgtgaagggcagattcaccatcagccgggacaacgccaagaagtccctgtacctccagatgaacagcctgagagccgaggacaccgccgtgtactattgtgcctctggcgtgtacagcttcgactacagaggccagggcaccctggtcacagtctcttctggtaccggcggaggcggatctggcggcggaggtagcggtggcggaggatctgaattcgacgagatcgtgctgacacagagccctgccacactctctctgagccctggcgaaagagccaccctgagctgtagcgccagcagcagcatcaactacatctactggctccagcagaagcccggccaggcccccagaatcctgatctacctgaccagcaacctggcctccggcgtgccagccagattttctggcagcggctccggcaccgacttcaccctgacaatcagcagcctggaacccgaggacttcgccgtgtactactgcctccagtggtccagcaaccccctgacctttggcggaggcaccaaggtggaaatcaagctcgagggacagcctaaggccaatcctaccgtgacactgttccctccaagcagcgaagaactccaggccaacaaggccacacttgtgtgcctgatctccgacttctaccctggggctgtgacagtggcttggaaggccgatggatctcctgtgaaagccggcgtggaaaccaccaagccatccaagcagagcaacaacaaatacgccgccagctcctacctgagcctgacacctgagcagtggaagtcccacagatcctacagctgccaagtgacccacgaaggcagcaccgtggaaaagacagtggcccctacagagtgcagccccatcaagaccgatgtgattacaatggaccccaaggacaactgctccaaggacgccaacgataccctgctgctccagctgaccaacaccagcgcctactacatgtacttgttgctgctgctgaagtccgtggtgtacttcgccatcatcacatgctgcctgctgcggagaaccgccttctgctgcaacggcgagaagtctagggccaagcgatctggatctggagcaacaaacttctcactactcaaacaagcaggtgacgtggaggagaatcccgggcctactagtatggactggatttggcgcatccttttccttgtcggcgctgctaccggcgcgcattccgggccccagctccagctgcaagagtctggacctggcctggtcaagcctagcgagacactgagcctgacctgtaccgtgtccggcgatagcatcagcagcggcgattactactggggctggatcagacagcctcctggcaaaggactggaatggatcggccacatctactacagcggcgtgacctactacaaccccagcctgaagtccagagtgaccatcagcgtggacaccagccggaaccagttctccctgaagctgtctagcgtgacagccgccgataccgccgtgtactactgcaccagagaggacagcagcaactggcggagtagaggccagggaacactggtcacagttagctctggatccggcggaggcggaagtggaggcggaggatctggcggcggaggctctttcgaagaagtgcaactggtggaaagcgggggaggacttgtgaagcctggcggctctctgagactgagctgtgccgcctctggcttcaccttcagcagctacgacatgagctgggtgcgccaggctcctggcaagggactggaatgggtgtccaccatcagcagcggcggcagctacacctactacctggacagcatcaagggccggttcaccatctccagagacaacgccaagaacagcctgtacctccagatgaactccctgcgggccgaggacacagccgtgtattattgcgccagacagggcctggattactggggcagaggcacccttgtgaccgtgtcctctacgcgtgcctctacaaagggaccctccgtgtttcctctggctcccagcagcaagtctacaagcggaggaacagccgctctgggctgcctggtcaaggattactttcccgagcctgtgaccgtgtcctggaatagcggagcactgacaagcggcgtgcacacctttccagccgtgctgcaaagcagcggcctgtactctctgagcagcgtggtcacagtgcctagctctagcctgggcacccagacctacatctgcaatgtgaaccacaagcctagcaacaccaaggtggacaagagagtggaacccaagagctgtgaagtgaaaaccgactccaccgaccacgtgaagcccaaagagacagagaacaccaagcagcccagcaagagctgccacaagcccaaggccatcgtgcacaccgagaaagtgaacatgatgagcctgaccgtgctgggcctgcggatgctgttcgccaaaaccgtggccgtgaacttcctgctgaccgccaagctgttcttcctc

SEQ ID NO: 3029 - DNA, 2763 bp, Artificial Sequence
  Synthetic Polynucloetide
atggccttaccagtgaccgccttgctcctgccgctggccttgctgctccacgccgccaggccggaagtgcagctggttgaatctggcggaggactggttcagcctggcggatctctgagactgtcttgtgccgccagcggcttcagcttcagcgacttttggatgagctgggtccgacaggcccctggcaaaggacttgaatgggtcgccacaatcagccaggccggcagcgagaaggactacgtggactctgtgaagggcagattcaccatcagccgggacaacgccaagaagtccctgtacctccagatgaacagcctgagagccgaggacaccgccgtgtactattgtgcctctggcgtgtacagcttcgactacagaggccagggcaccctggtcacagtctcttctggtaccggcggaggcggatctggcggcggaggtagcggtggcggaggatctgaattcgacatcgtgatgacccagagccccgatagcctggccgtgtctctgggagagagagccaccatcaactgccgggccagcaagagcgtgtccaccagcggctacagcttcatgcactggtatcagcagaagcccggccagccccccaagctgctgatctacctggcctccaacctggaaagcggcgtgcccgatagattcagcggcagcggctctggcaccgacttcaccctgaccatcagttctcttcaggccgaggacgtggccgtgtactactgccagcacagcagagaggtgccctggacattcggccagggcacaaaggtggaaatcaagcggctcgagggacagcctaaggccaatcctaccgtgacactgttccctccaagcagcgaagaactccaggccaacaaggccacacttgtgtgcctgatctccgacttctaccctggggctgtgacagtggcttggaaggccgatggatctcctgtgaaagccggcgtggaaaccaccaagccatccaagcagagcaacaacaaatacgccgccagctcctacctgagcctgacacctgagcagtggaagtcccacagatcctacagctgccaagtgacccacgaaggcagcaccgtggaaaagacagtggcccctacagagtgcagccccatcaagaccgatgtgattacaatggaccccaaggacaactgctccaaggacgccaacgataccctgctgctccagctgaccaacaccagcgcctactacatgtacttgttgctgctgctgaagtccgtggtgtacttcgccatcatcacatgctgcctgctgcggagaaccgccttctgctgcaacggcgagaagtctagggccaagcgatctggatctggagcaacaaacttctcactactcaaacaagcaggtgacgtggaggagaatcccgggcctactagtatggactggatttggcgcatccttttccttgtcggcgctgctaccggcgcgcattccgggccccagctccagctgcaagagtctggacctggcctggtcaagcctagcgagacactgagcctgacctgtaccgtgtccggcgatagcatcagcagcggcgattactactggggctggatcagacagcctcctggcaaaggactggaatggatcggccacatctactacagcggcgtgacctactacaaccccagcctgaagtccagagtgaccatcagcgtggacaccagccggaaccagttctccctgaagctgtctagcgtgacagccgccgataccgccgtgtactactgcaccagagaggacagcagcaactggcggagtagaggccagggaacactggtcacagttagctctggatccggcggaggcggaagtggaggcggaggatctggcggcggaggctctttcgaacaggtgcagctggtgcagtctggggccgaagtgaagaaacctggggccagcgtgaaggtgtcctgcaaggccagcggatacacctttaccaactacggcatgaactgggtgcgccaggcccctggacagggcctggaatggatgggctggatcaacacctacaccggcgagcccacatacgccgacgccttcaagggcagattcgccttcagcctggacaccagcacctccaccgcctacctccagatcaacagcctgcggagcgacgacaccgccgtgtattattgcgccagagattacggcgactacgggatggactattggggccagggaaccaccgtgaccgtgtcctctacgcgtgcctctacaaagggaccctccgtgtttcctctggctcccagcagcaagtctacaagcggaggaacagccgctctgggctgcctggtcaaggattactttcccgagcctgtgaccgtgtcctggaatagcggagcactgacaagcggcgtgcacacctttccagccgtgctgcaaagcagcggcctgtactctctgagcagcgtggtcacagtgcctagctctagcctgggcacccagacctacatctgcaatgtgaaccacaagcctagcaacaccaaggtggacaagagagtggaacccaagagctgtgaagtgaaaaccgactccaccgaccacgtgaagcccaaagagacagagaacaccaagcagcccagcaagagctgccacaagcccaaggccatcgtgcacaccgagaaagtgaacatgatgagcctgaccgtgctgggcctgcggatgctgttcgccaaaaccgtggccgtgaacttcctgctgaccgccaagctgttcttcctc

SEQ ID NO: 3030 - DNA, 2751 bp, Artificial Sequence
  Synthetic Polynucloetide
atggccttaccagtgaccgccttgctcctgccgctggccttgctgctccacgccgccaggccggaagtgcagctggttgaatctggcggaggactggttcagcctggcggatctctgagactgtcttgtgccgccagcggcttcagcttcagcgacttttggatgagctgggtccgacaggcccctggcaaaggacttgaatgggtcgccacaatcagccaggccggcagcgagaaggactacgtggactctgtgaagggcagattcaccatcagccgggacaacgccaagaagtccctgtacctccagatgaacagcctgagagccgaggacaccgccgtgtactattgtgcctctggcgtgtacagcttcgactacagaggccagggcaccctggtcacagtctcttctggtaccggcggaggcggatctggcggcggaggtagcggtggcggaggatctgaattcgacatcgtgatgacccagacccccctgaccctgagcgtgacaatcggacagcctgccagcatctcctgcaagagcagccagagcctgctggacagcgacggcaagacctacctgaactggctgctgcagaggccaggccagagccccgagagactgatctacctggtgtccaagctggactccggcgtgcccgatagattcacaggcagcggctccggcaccgacttcaccctgaagatcagccgggtggaagccgaggacctgggcgtgtactgttgttggcagggcacccacttcccttacaccttcggcggagggaccaaggtggaaatcaagggcctcgagggacagcctaaggccaatcctaccgtgacactgttccctccaagcagcgaagaactccaggccaacaaggccacacttgtgtgcctgatctccgacttctaccctggggctgtgacagtggcttggaaggccgatggatctcctgtgaaagccggcgtggaaaccaccaagccatccaagcagagcaacaacaaatacgccgccagctcctacctgagcctgacacctgagcagtggaagtcccacagatcctacagctgccaagtgacccacgaaggcagcaccgtggaaaagacagtggcccctacagagtgcagccccatcaagaccgatgtgattacaatggaccccaaggacaactgctccaaggacgccaacgataccctgctgctccagctgaccaacaccagcgcctactacatgtacttgttgctgctgctgaagtccgtggtgtacttcgccatcatcacatgctgcctgctgcggagaaccgccttctgctgcaacggcgagaagtctagggccaagcgatctggatctggagcaacaaacttctcactactcaaacaagcaggtgacgtggaggagaatcccgggcctactagtatggactggatttggcgcatccttttccttgtcggcgctgctaccggcgcgcattccgggccccagctccagctgcaagagtctggacctggcctggtcaagcctagcgagacactgagcctgacctgtaccgtgtccggcgatagcatcagcagcggcgattactactggggctggatcagacagcctcctggcaaaggactggaatggatcggccacatctactacagcggcgtgacctactacaaccccagcctgaagtccagagtgaccatcagcgtggacaccagccggaaccagttctccctgaagctgtctagcgtgacagccgccgataccgccgtgtactactgcaccagagaggacagcagcaactggcggagtagaggccagggaacactggtcacagttagctctggatccggcggaggcggaagtggaggcggaggatctggcggcggaggctctttcgaacaggtgcaactgcagcagcctggcgctgaacttgtgcggccaggcgcctctgtgaagctgagctgtaaagccagcggctacaccttcaccagctactggatgaactgggtcaagcagcgcccaggccagggcctggaatggatcggaatgatcgaccccagcgacagcgagacacactacaaccacatcttcaaggacaaggccaccctgaccgtggacaagtccagcagcacagcctacctgcaactgtccagcctgaccagcgaggacagcgccgtgtactactgcgcccggaacctgtatctgtggggccagggaacaagcgtgaccgtgtctagcacgcgtgcctctacaaagggaccctccgtgtttcctctggctcccagcagcaagtctacaagcggaggaacagccgctctgggctgcctggtcaaggattactttcccgagcctgtgaccgtgtcctggaatagcggagcactgacaagcggcgtgcacacctttccagccgtgctgcaaagcagcggcctgtactctctgagcagcgtggtcacagtgcctagctctagcctgggcacccagacctacatctgcaatgtgaaccacaagcctagcaacaccaaggtggacaagagagtggaacccaagagctgtgaagtgaaaaccgactccaccgaccacgtgaagcccaaagagacagagaacaccaagcagcccagcaagagctgccacaagcccaaggccatcgtgcacaccgagaaagtgaacatgatgagcctgaccgtgctgggcctgcggatgctgttcgccaaaaccgtggccgtgaacttcctgctgaccgccaagctgttcttcctc

SEQ ID NO: 3031 - DNA, 2775 bp, Artificial Sequence
  Synthetic Polynucloetide
atggccttaccagtgaccgccttgctcctgccgctggccttgctgctccacgccgccaggccggaagtgcagctggttgaatctggcggaggactggttcagcctggcggatctctgagactgtcttgtgccgccagcggcttcagcttcagcgacttttggatgagctgggtccgacaggcccctggcaaaggacttgaatgggtcgccacaatcagccaggccggcagcgagaaggactacgtggactctgtgaagggcagattcaccatcagccgggacaacgccaagaagtccctgtacctccagatgaacagcctgagagccgaggacaccgccgtgtactattgtgcctctggcgtgtacagcttcgactacagaggccagggcaccctggtcacagtctcttctggtaccggcggaggcggatctggcggcggaggtagcggtggcggaggatctgaattcgacatcgtgatgacccagagccccgatagcctggccgtgtctctgggagagagagccaccatcaactgcgagagcagccagagcctgctgaacagcggcaaccagaagaactacctgacctggtatcagcagaagcccggccagccccccaagcccctgatctattgggccagcaccagagaaagcggcgtgcccgatagattcagcggcagcggaagcggcaccgacttcaccctgaccatcagttctcttcaggccgaggacgtggccgtgtactactgccagaacgactacagctacccctacaccttcggccagggcaccaagctggaaatcaagagactcgagggacagcctaaggccaatcctaccgtgacactgttccctccaagcagcgaagaactccaggccaacaaggccacacttgtgtgcctgatctccgacttctaccctggggctgtgacagtggcttggaaggccgatggatctcctgtgaaagccggcgtggaaaccaccaagccatccaagcagagcaacaacaaatacgccgccagctcctacctgagcctgacacctgagcagtggaagtcccacagatcctacagctgccaagtgacccacgaaggcagcaccgtggaaaagacagtggcccctacagagtgcagccccatcaagaccgatgtgattacaatggaccccaaggacaactgctccaaggacgccaacgataccctgctgctccagctgaccaacaccagcgcctactacatgtacttgttgctgctgctgaagtccgtggtgtacttcgccatcatcacatgctgcctgctgcggagaaccgccttctgctgcaacggcgagaagtctagggccaagcgatctggatctggagcaacaaacttctcactactcaaacaagcaggtgacgtggaggagaatcccgggcctactagtatggactggatttggcgcatccttttccttgtcggcgctgctaccggcgcgcattccgggccccagctccagctgcaagagtctggacctggcctggtcaagcctagcgagacactgagcctgacctgtaccgtgtccggcgatagcatcagcagcggcgattactactggggctggatcagacagcctcctggcaaaggactggaatggatcggccacatctactacagcggcgtgacctactacaaccccagcctgaagtccagagtgaccatcagcgtggacaccagccggaaccagttctccctgaagctgtctagcgtgacagccgccgataccgccgtgtactactgcaccagagaggacagcagcaactggcggagtagaggccagggaacactggtcacagttagctctggatccggcggaggcggaagtggaggcggaggatctggcggcggaggctctttcgaagaagtgcagctggtgcagtctggggccgaagtgaagaagcctggcgagagcctgaagatcagctgcaagggcagcggctacagcttcaccgactactacatgaagtgggccagacagatgcccggcaagggcctggaatggatgggcgacatcatccccagcaacggggccaccttctacaaccagaaattcaagggccaagtgaccatctccgccgacaagagcatcagcaccacctacctccagtggtccagcctgaaggccagcgacaccgccatgtactattgcgccagaagccatctgctgcgggccagttggttcgcctattggggccagggaacaatggtcacagtgtccagcacgcgtgcctctacaaagggaccctccgtgtttcctctggctcccagcagcaagtctacaagcggaggaacagccgctctgggctgcctggtcaaggattactttcccgagcctgtgaccgtgtcctggaatagcggagcactgacaagcggcgtgcacacctttccagccgtgctgcaaagcagcggcctgtactctctgagcagcgtggtcacagtgcctagctctagcctgggcacccagacctacatctgcaatgtgaaccacaagcctagcaacaccaaggtggacaagagagtggaacccaagagctgtgaagtgaaaaccgactccaccgaccacgtgaagcccaaagagacagagaacaccaagcagcccagcaagagctgccacaagcccaaggccatcgtgcacaccgagaaagtgaacatgatgagcctgaccgtgctgggcctgcggatgctgttcgccaaaaccgtggccgtgaacttcctgctgaccgccaagctgttcttcctc

SEQ ID NO: 3032 - DNA, 2760 bp, Artificial Sequence
  Synthetic Polynucloetide
atggccttaccagtgaccgccttgctcctgccgctggccttgctgctccacgccgccaggccggaagtgcagctggttgaatctggcggaggactggttcagcctggcggatctctgagactgtcttgtgccgccagcggcttcagcttcagcgacttttggatgagctgggtccgacaggcccctggcaaaggacttgaatgggtcgccacaatcagccaggccggcagcgagaaggactacgtggactctgtgaagggcagattcaccatcagccgggacaacgccaagaagtccctgtacctccagatgaacagcctgagagccgaggacaccgccgtgtactattgtgcctctggcgtgtacagcttcgactacagaggccagggcaccctggtcacagtctcttctggtaccggcggaggcggatctggcggcggaggtagcggtggcggaggatctgaattcgacatccagatgacccagtctaccagttccctgagtgcatccctcggagacagggtgacgatcagttgcagcgcaagccaagggatcaataactatctgaactggtatcagcagaaaccggacggaacagtcgaactcctgatttattacaccagcacccttcagagtggcgtcccttcccggttcagtggctccggaagcgggaccgattactccctgaccatttctaatctggagccagaggacataggaacgtattattgccagcagtatagtaaactgccacgaacttttggaggggggacgaaactggagatcaaactcgagggacagcctaaggccaatcctaccgtgacactgttccctccaagcagcgaagaactccaggccaacaaggccacacttgtgtgcctgatctccgacttctaccctggggctgtgacagtggcttggaaggccgatggatctcctgtgaaagccggcgtggaaaccaccaagccatccaagcagagcaacaacaaatacgccgccagctcctacctgagcctgacacctgagcagtggaagtcccacagatcctacagctgccaagtgacccacgaaggcagcaccgtggaaaagacagtggcccctacagagtgcagccccatcaagaccgatgtgattacaatggaccccaaggacaactgctccaaggacgccaacgataccctgctgctccagctgaccaacaccagcgcctactacatgtacttgttgctgctgctgaagtccgtggtgtacttcgccatcatcacatgctgcctgctgcggagaaccgccttctgctgcaacggcgagaagtctagggccaagcgatctggatctggagcaacaaacttctcactactcaaacaagcaggtgacgtggaggagaatcccgggcctactagtatggactggatttggcgcatccttttccttgtcggcgctgctaccggcgcgcattccgggccccagctccagctgcaagagtctggacctggcctggtcaagcctagcgagacactgagcctgacctgtaccgtgtccggcgatagcatcagcagcggcgattactactggggctggatcagacagcctcctggcaaaggactggaatggatcggccacatctactacagcggcgtgacctactacaaccccagcctgaagtccagagtgaccatcagcgtggacaccagccggaaccagttctccctgaagctgtctagcgtgacagccgccgataccgccgtgtactactgcaccagagaggacagcagcaactggcggagtagaggccagggaacactggtcacagttagctctggatccggcggaggcggaagtggaggcggaggatctggcggcggaggctctttcgaacaggtgcaactccagcagtccggaagcgagcttatgatgccaggggcatcagtgaagatcagctgcaaggctactggctacaccttctctaattactggatagagtgggttaaacaaaggccagggcacggcctggaatggatcggcgagatcctgcctgggacaggccgaaccatttataacgagaagttcaaaggcaaggctactttcaccgcagatataagctctaatacagtgcaaatgcagctctcttccctgacaagtgaggatagtgccgtgtattattgcgcacgaagagattactatggaaatttttattacgctatggattattggggtcaaggaacaagtgtgaccgttagcagcacgcgtgcctctacaaagggaccctccgtgtttcctctggctcccagcagcaagtctacaagcggaggaacagccgctctgggctgcctggtcaaggattactttcccgagcctgtgaccgtgtcctggaatagcggagcactgacaagcggcgtgcacacctttccagccgtgctgcaaagcagcggcctgtactctctgagcagcgtggtcacagtgcctagctctagcctgggcacccagacctacatctgcaatgtgaaccacaagcctagcaacaccaaggtggacaagagagtggaacccaagagctgtgaagtgaaaaccgactccaccgaccacgtgaagcccaaagagacagagaacaccaagcagcccagcaagagctgccacaagcccaaggccatcgtgcacaccgagaaagtgaacatgatgagcctgaccgtgctgggcctgcggatgctgttcgccaaaaccgtggccgtgaacttcctgctgaccgccaagctgttcttcctc

SEQ ID NO: 3033 - DNA, 2745 bp, Artificial Sequence
  Synthetic Polynucloetide
atggccttaccagtgaccgccttgctcctgccgctggccttgctgctccacgccgccaggccggaagtgcagctggttgaatctggcggaggactggttcagcctggcggatctctgagactgtcttgtgccgccagcggcttcagcttcagcgacttttggatgagctgggtccgacaggcccctggcaaaggacttgaatgggtcgccacaatcagccaggccggcagcgagaaggactacgtggactctgtgaagggcagattcaccatcagccgggacaacgccaagaagtccctgtacctccagatgaacagcctgagagccgaggacaccgccgtgtactattgtgcctctggcgtgtacagcttcgactacagaggccagggcaccctggtcacagtctcttctggtaccggcggaggcggatctggcggcggaggtagcggtggcggaggatctgaattcgacatccagatgacccagagccctgccagcctgtccgtgtctgtgggcgagacagtgaccatcacctgtcgggccagcgagaacatctacagcaacctggcctggtatcagcagaagcagggcaagagcccccaactgctggtgtacgccgccaccaatctggccgatggcgtgcccagcagattttccggctctggcagcggcacccagtacagcctgaagatcaacagcctccagagcgaggacttcggcagctactactgccagcacttctggggcacctggacctttggaggaggcaccaccctggaaatcaagctcgagggacagcctaaggccaatcctaccgtgacactgttccctccaagcagcgaagaactccaggccaacaaggccacacttgtgtgcctgatctccgacttctaccctggggctgtgacagtggcttggaaggccgatggatctcctgtgaaagccggcgtggaaaccaccaagccatccaagcagagcaacaacaaatacgccgccagctcctacctgagcctgacacctgagcagtggaagtcccacagatcctacagctgccaagtgacccacgaaggcagcaccgtggaaaagacagtggcccctacagagtgcagccccatcaagaccgatgtgattacaatggaccccaaggacaactgctccaaggacgccaacgataccctgctgctccagctgaccaacaccagcgcctactacatgtacttgttgctgctgctgaagtccgtggtgtacttcgccatcatcacatgctgcctgctgcggagaaccgccttctgctgcaacggcgagaagtctagggccaagcgatctggatctggagcaacaaacttctcactactcaaacaagcaggtgacgtggaggagaatcccgggcctactagtatggactggatttggcgcatccttttccttgtcggcgctgctaccggcgcgcattccgggccccagctccagctgcaagagtctggacctggcctggtcaagcctagcgagacactgagcctgacctgtaccgtgtccggcgatagcatcagcagcggcgattactactggggctggatcagacagcctcctggcaaaggactggaatggatcggccacatctactacagcggcgtgacctactacaaccccagcctgaagtccagagtgaccatcagcgtggacaccagccggaaccagttctccctgaagctgtctagcgtgacagccgccgataccgccgtgtactactgcaccagagaggacagcagcaactggcggagtagaggccagggaacactggtcacagttagctctggatccggcggaggcggaagtggaggcggaggatctggcggcggaggctctttcgaagaagtgcaactccagcagagcggccctgagcttgtgaagcctggcgcttccgtgaagatgagctgcaaggccagcggctacaccttcaccgactactacatgaagtggatgaagcagagccacggcaagtccctggaatggatcggcgacatcaaccccaacaacggcggcaccacctacaaccagaagttcaagggcaaggccaccctgaccgtggacaagagcagcagcaccgcctacatgcaactgaacagcctgaccagcgaggacagcgccgtgtactactgcgccagagactacggctacggctatttcgactactggggccagggcacaaccctgacagtgtcctctacgcgtgcctctacaaagggaccctccgtgtttcctctggctcccagcagcaagtctacaagcggaggaacagccgctctgggctgcctggtcaaggattactttcccgagcctgtgaccgtgtcctggaatagcggagcactgacaagcggcgtgcacacctttccagccgtgctgcaaagcagcggcctgtactctctgagcagcgtggtcacagtgcctagctctagcctgggcacccagacctacatctgcaatgtgaaccacaagcctagcaacaccaaggtggacaagagagtggaacccaagagctgtgaagtgaaaaccgactccaccgaccacgtgaagcccaaagagacagagaacaccaagcagcccagcaagagctgccacaagcccaaggccatcgtgcacaccgagaaagtgaacatgatgagcctgaccgtgctgggcctgcggatgctgttcgccaaaaccgtggccgtgaacttcctgctgaccgccaagctgttcttcctc

SEQ ID NO: 3034 - DNA, 2754 bp, Artificial Sequence
  Synthetic Polynucloetide
atggccttaccagtgaccgccttgctcctgccgctggccttgctgctccacgccgccaggccggaagtgcagctggttgaatctggcggaggactggttcagcctggcggatctctgagactgtcttgtgccgccagcggcttcagcttcagcgacttttggatgagctgggtccgacaggcccctggcaaaggacttgaatgggtcgccacaatcagccaggccggcagcgagaaggactacgtggactctgtgaagggcagattcaccatcagccgggacaacgccaagaagtccctgtacctccagatgaacagcctgagagccgaggacaccgccgtgtactattgtgcctctggcgtgtacagcttcgactacagaggccagggcaccctggtcacagtctcttctggtaccggcggaggcggatctggcggcggaggtagcggtggcggaggatctgaattcgagatcgtgctgacacagagccctggcaccctgagcctgtctccaggcgaaagagccacactgagctgtcgggcctctcagagcgtgggaggctacctggcttggtatcagcagaagccaggccaggcccccagactgctgatctacgacgccagcaatcgggccacaggcatccccgccagattttctggcagcggctccggcaccgacttcaccctgacaatcagcagcctggaacccgaggacttcgccgtgtactactgccagcagcggaacaactggccccccatgtacacattcggccagggcaccaagctggaaatcaagagactcgagggacagcctaaggccaatcctaccgtgacactgttccctccaagcagcgaagaactccaggccaacaaggccacacttgtgtgcctgatctccgacttctaccctggggctgtgacagtggcttggaaggccgatggatctcctgtgaaagccggcgtggaaaccaccaagccatccaagcagagcaacaacaaatacgccgccagctcctacctgagcctgacacctgagcagtggaagtcccacagatcctacagctgccaagtgacccacgaaggcagcaccgtggaaaagacagtggcccctacagagtgcagccccatcaagaccgatgtgattacaatggaccccaaggacaactgctccaaggacgccaacgataccctgctgctccagctgaccaacaccagcgcctactacatgtacttgttgctgctgctgaagtccgtggtgtacttcgccatcatcacatgctgcctgctgcggagaaccgccttctgctgcaacggcgagaagtctagggccaagcgatctggatctggagcaacaaacttctcactactcaaacaagcaggtgacgtggaggagaatcccgggcctactagtatggactggatttggcgcatccttttccttgtcggcgctgctaccggcgcgcattccgggccccagctccagctgcaagagtctggacctggcctggtcaagcctagcgagacactgagcctgacctgtaccgtgtccggcgatagcatcagcagcggcgattactactggggctggatcagacagcctcctggcaaaggactggaatggatcggccacatctactacagcggcgtgacctactacaaccccagcctgaagtccagagtgaccatcagcgtggacaccagccggaaccagttctccctgaagctgtctagcgtgacagccgccgataccgccgtgtactactgcaccagagaggacagcagcaactggcggagtagaggccagggaacactggtcacagttagctctggatccggcggaggcggaagtggaggcggaggatctggcggcggaggctctttcgaacaggtgcaactggtgcagagcggagccgaagtgaagaaacccggcagcagcgtgaaggtgtcctgcaaggcttccggcggcaccttcagcagctacgccatttcttgggtgcgccaggctcctggacagggcctggaatggatgggcggcatcatccctatcctgggcaccgccaactacgcccagaaattccagggcagagtgaccatcaccgccgacgagagcaccagcaccgcctacatggaactgagcagcctgcggagcgaggacacagccgtgtattattgcgccagatggggcggaggggccttcgacatttggggccagggaacaatggtcaccgtgtccagcacgcgtgcctctacaaagggaccctccgtgtttcctctggctcccagcagcaagtctacaagcggaggaacagccgctctgggctgcctggtcaaggattactttcccgagcctgtgaccgtgtcctggaatagcggagcactgacaagcggcgtgcacacctttccagccgtgctgcaaagcagcggcctgtactctctgagcagcgtggtcacagtgcctagctctagcctgggcacccagacctacatctgcaatgtgaaccacaagcctagcaacaccaaggtggacaagagagtggaacccaagagctgtgaagtgaaaaccgactccaccgaccacgtgaagcccaaagagacagagaacaccaagcagcccagcaagagctgccacaagcccaaggccatcgtgcacaccgagaaagtgaacatgatgagcctgaccgtgctgggcctgcggatgctgttcgccaaaaccgtggccgtgaacttcctgctgaccgccaagctgttcttcctc

SEQ ID NO: 3035 - DNA, 2739 bp, Artificial Sequence
  Synthetic Polynucloetide
atggccttaccagtgaccgccttgctcctgccgctggccttgctgctccacgccgccaggccggaagtgcagctggttgaatctggcggaggactggttcagcctggcggatctctgagactgtcttgtgccgccagcggcttcagcttcagcgacttttggatgagctgggtccgacaggcccctggcaaaggacttgaatgggtcgccacaatcagccaggccggcagcgagaaggactacgtggactctgtgaagggcagattcaccatcagccgggacaacgccaagaagtccctgtacctccagatgaacagcctgagagccgaggacaccgccgtgtactattgtgcctctggcgtgtacagcttcgactacagaggccagggcaccctggtcacagtctcttctggtaccggcggaggcggatctggcggcggaggtagcggtggcggaggatctgaattccagatcgtgctgacacagagccctgccctgatgagcgccagccctggcgagaaagtgaccatgacctgtagcgccagcagcagcgtgcgctacatgtactggtatcagcagaagcccagaagcagccccaagccctggattcacctgaccagcaatctggcctctggcgtgcccgctagattttccggctctggcagcggcaccagctacagcctgaccatcagcagcatggaagccgaggacgccgccacctactactgccagcagtggtccagccaccccttcacatttggctccggcaccaagctggaaatcaagctcgagggacagcctaaggccaatcctaccgtgacactgttccctccaagcagcgaagaactccaggccaacaaggccacacttgtgtgcctgatctccgacttctaccctggggctgtgacagtggcttggaaggccgatggatctcctgtgaaagccggcgtggaaaccaccaagccatccaagcagagcaacaacaaatacgccgccagctcctacctgagcctgacacctgagcagtggaagtcccacagatcctacagctgccaagtgacccacgaaggcagcaccgtggaaaagacagtggcccctacagagtgcagccccatcaagaccgatgtgattacaatggaccccaaggacaactgctccaaggacgccaacgataccctgctgctccagctgaccaacaccagcgcctactacatgtacttgttgctgctgctgaagtccgtggtgtacttcgccatcatcacatgctgcctgctgcggagaaccgccttctgctgcaacggcgagaagtctagggccaagcgatctggatctggagcaacaaacttctcactactcaaacaagcaggtgacgtggaggagaatcccgggcctactagtatggactggatttggcgcatccttttccttgtcggcgctgctaccggcgcgcattccgggccccagctccagctgcaagagtctggacctggcctggtcaagcctagcgagacactgagcctgacctgtaccgtgtccggcgatagcatcagcagcggcgattactactggggctggatcagacagcctcctggcaaaggactggaatggatcggccacatctactacagcggcgtgacctactacaaccccagcctgaagtccagagtgaccatcagcgtggacaccagccggaaccagttctccctgaagctgtctagcgtgacagccgccgataccgccgtgtactactgcaccagagaggacagcagcaactggcggagtagaggccagggaacactggtcacagttagctctggatccggcggaggcggaagtggaggcggaggatctggcggcggaggctctttcgaagatgtgcaactccaggaaagcggccctggccttgtgaagcctagccagagcctgtccctgacctgtaccgtgaccggcttcagcatcaccagcgactactcttggaactggatcagacagttccctggcaacaaactggaatggatgggctacatcagctactccggccacacctcctacaaccccagcctggaaagccggatctccatcaccagagacaccagcaagaaccagttcttcttgcaactgaacagcgtgaccaccgaggataccgccacatattactgtaccagaggcaactgggacgtggtgtactggggccagggcacacttgtgaccgtgtctgctacgcgtgcctctacaaagggaccctccgtgtttcctctggctcccagcagcaagtctacaagcggaggaacagccgctctgggctgcctggtcaaggattactttcccgagcctgtgaccgtgtcctggaatagcggagcactgacaagcggcgtgcacacctttccagccgtgctgcaaagcagcggcctgtactctctgagcagcgtggtcacagtgcctagctctagcctgggcacccagacctacatctgcaatgtgaaccacaagcctagcaacaccaaggtggacaagagagtggaacccaagagctgtgaagtgaaaaccgactccaccgaccacgtgaagcccaaagagacagagaacaccaagcagcccagcaagagctgccacaagcccaaggccatcgtgcacaccgagaaagtgaacatgatgagcctgaccgtgctgggcctgcggatgctgttcgccaaaaccgtggccgtgaacttcctgctgaccgccaagctgttcttcctc

SEQ ID NO: 3036 - DNA, 2769 bp, Artificial Sequence
  Synthetic Polynucloetide
atggccttaccagtgaccgccttgctcctgccgctggccttgctgctccacgccgccaggccggaagtgcagctggttgaatctggcggaggactggttcagcctggcggatctctgagactgtcttgtgccgccagcggcttcagcttcagcgacttttggatgagctgggtccgacaggcccctggcaaaggacttgaatgggtcgccacaatcagccaggccggcagcgagaaggactacgtggactctgtgaagggcagattcaccatcagccgggacaacgccaagaagtccctgtacctccagatgaacagcctgagagccgaggacaccgccgtgtactattgtgcctctggcgtgtacagcttcgactacagaggccagggcaccctggtcacagtctcttctggtaccggcggaggcggatctggcggcggaggtagcggtggcggaggatctgaattcgacgtcgtgatgacccagagccctctgagcctgcctgtgacactgggacagcctgccagcatctcctgtcggagcagccagagcatcgtgcacagcgacggcaacacctacctggaatggtatcagcagcggccaggccagagccccagacggctgatctacaaggtgtccaacagattcagcggcgtgcccgacagattctccggcagcggctctggcaccgacttcaccctgaagatcagcagagtggaagccgaggacgtgggcgtgtactactgttttcaaggcagccacgccccctggacctttggcggaggaacaaaggtggaaatcaagctcgagggacagcctaaggccaatcctaccgtgacactgttccctccaagcagcgaagaactccaggccaacaaggccacacttgtgtgcctgatctccgacttctaccctggggctgtgacagtggcttggaaggccgatggatctcctgtgaaagccggcgtggaaaccaccaagccatccaagcagagcaacaacaaatacgccgccagctcctacctgagcctgacacctgagcagtggaagtcccacagatcctacagctgccaagtgacccacgaaggcagcaccgtggaaaagacagtggcccctacagagtgcagccccatcaagaccgatgtgattacaatggaccccaaggacaactgctccaaggacgccaacgataccctgctgctccagctgaccaacaccagcgcctactacatgtacttgttgctgctgctgaagtccgtggtgtacttcgccatcatcacatgctgcctgctgcggagaaccgccttctgctgcaacggcgagaagtctagggccaagcgatctggatctggagcaacaaacttctcactactcaaacaagcaggtgacgtggaggagaatcccgggcctactagtatggactggatttggcgcatccttttccttgtcggcgctgctaccggcgcgcattccgggccccagctccagctgcaagagtctggacctggcctggtcaagcctagcgagacactgagcctgacctgtaccgtgtccggcgatagcatcagcagcggcgattactactggggctggatcagacagcctcctggcaaaggactggaatggatcggccacatctactacagcggcgtgacctactacaaccccagcctgaagtccagagtgaccatcagcgtggacaccagccggaaccagttctccctgaagctgtctagcgtgacagccgccgataccgccgtgtactactgcaccagagaggacagcagcaactggcggagtagaggccagggaacactggtcacagttagctctggatccggcggaggcggaagtggaggcggaggatctggcggcggaggctctttcgaagaagtgcaactggtggaatcaggcggcggactggtgcagcctggcggatctctgagactgagctgtgccgccagcggcttcaccttcagcagctacggaatgcactgggtgcgccaggcccctggcaaaggactggaatgggtggcctacatcaccaccagaagcagcaccatctactacgccgacagcgtgaagggccggttcaccatctccagagacaacgccaagaacagcctgtacctccagatgaactccctgcgggccgaggacaccgccgtgtactattgcaccagagagcccctgaccggctactacgctatggactattggggccagggcaccagcgtgaccgtgtctagtacgcgtgcctctacaaagggaccctccgtgtttcctctggctcccagcagcaagtctacaagcggaggaacagccgctctgggctgcctggtcaaggattactttcccgagcctgtgaccgtgtcctggaatagcggagcactgacaagcggcgtgcacacctttccagccgtgctgcaaagcagcggcctgtactctctgagcagcgtggtcacagtgcctagctctagcctgggcacccagacctacatctgcaatgtgaaccacaagcctagcaacaccaaggtggacaagagagtggaacccaagagctgtgaagtgaaaaccgactccaccgaccacgtgaagcccaaagagacagagaacaccaagcagcccagcaagagctgccacaagcccaaggccatcgtgcacaccgagaaagtgaacatgatgagcctgaccgtgctgggcctgcggatgctgttcgccaaaaccgtggccgtgaacttcctgctgaccgccaagctgttcttcctc

SEQ ID NO: 3037 - DNA, 2745 bp, Artificial Sequence
  Synthetic Polynucloetide
atggccttaccagtgaccgccttgctcctgccgctggccttgctgctccacgccgccaggccggaagtgcagctggttgaatctggcggaggactggttcagcctggcggatctctgagactgtcttgtgccgccagcggcttcagcttcagcgacttttggatgagctgggtccgacaggcccctggcaaaggacttgaatgggtcgccacaatcagccaggccggcagcgagaaggactacgtggactctgtgaagggcagattcaccatcagccgggacaacgccaagaagtccctgtacctccagatgaacagcctgagagccgaggacaccgccgtgtactattgtgcctctggcgtgtacagcttcgactacagaggccagggcaccctggtcacagtctcttctggtaccggcggaggcggatctggcggcggaggtagcggtggcggaggatctgaattcgacatccagatgacccagagccccagcagcctgtctgccagcgtgggcgacagagtgaccatcacctgtagagccagccagagcatcagcctgtggctgaactggtatcagcagaagcccggcaaggcccccaagctgctgatctacgccgccagcacactccagagcggcgtgccaagcagattttccggcagcggctccggcaccgacttcaccctgacaatcagctccctccagcccgaggacttcgccacctactactgccagcagtactacaccagcccctacaccttcggccagggcaccaaggtggaaatcaagagactcgagggacagcctaaggccaatcctaccgtgacactgttccctccaagcagcgaagaactccaggccaacaaggccacacttgtgtgcctgatctccgacttctaccctggggctgtgacagtggcttggaaggccgatggatctcctgtgaaagccggcgtggaaaccaccaagccatccaagcagagcaacaacaaatacgccgccagctcctacctgagcctgacacctgagcagtggaagtcccacagatcctacagctgccaagtgacccacgaaggcagcaccgtggaaaagacagtggcccctacagagtgcagccccatcaagaccgatgtgattacaatggaccccaaggacaactgctccaaggacgccaacgataccctgctgctccagctgaccaacaccagcgcctactacatgtacttgttgctgctgctgaagtccgtggtgtacttcgccatcatcacatgctgcctgctgcggagaaccgccttctgctgcaacggcgagaagtctagggccaagcgatctggatctggagcaacaaacttctcactactcaaacaagcaggtgacgtggaggagaatcccgggcctactagtatggactggatttggcgcatccttttccttgtcggcgctgctaccggcgcgcattccgggccccagctccagctgcaagagtctggacctggcctggtcaagcctagcgagacactgagcctgacctgtaccgtgtccggcgatagcatcagcagcggcgattactactggggctggatcagacagcctcctggcaaaggactggaatggatcggccacatctactacagcggcgtgacctactacaaccccagcctgaagtccagagtgaccatcagcgtggacaccagccggaaccagttctccctgaagctgtctagcgtgacagccgccgataccgccgtgtactactgcaccagagaggacagcagcaactggcggagtagaggccagggaacactggtcacagttagctctggatccggcggaggcggaagtggaggcggaggatctggcggcggaggctctttcgaacaggtgcaactgctggaatctggcggcggactggtgcagcctggcggatctctgagactgagctgtgccgccagcggcttcaccttcagcagctacgccatgagctgggtgcgccaggcccctggaaaaggactggaatgggtgtccgtgatccggtccagcggcagcagcacctattacgccgatagcgtgaagggccggttcaccatcagccgggacaacagcaagaacaccctgtacctccagatgaacagcctgcgggccgaggacaccgccgtgtactattgtgctaggggaggcggctacttcgactactggggccagggaacactcgtgaccgtgtcctctacgcgtgcctctacaaagggaccctccgtgtttcctctggctcccagcagcaagtctacaagcggaggaacagccgctctgggctgcctggtcaaggattactttcccgagcctgtgaccgtgtcctggaatagcggagcactgacaagcggcgtgcacacctttccagccgtgctgcaaagcagcggcctgtactctctgagcagcgtggtcacagtgcctagctctagcctgggcacccagacctacatctgcaatgtgaaccacaagcctagcaacaccaaggtggacaagagagtggaacccaagagctgtgaagtgaaaaccgactccaccgaccacgtgaagcccaaagagacagagaacaccaagcagcccagcaagagctgccacaagcccaaggccatcgtgcacaccgagaaagtgaacatgatgagcctgaccgtgctgggcctgcggatgctgttcgccaaaaccgtggccgtgaacttcctgctgaccgccaagctgttcttcctc

SEQ ID NO: 3038 - DNA, 2754 bp, Artificial Sequence
  Synthetic Polynucloetide
atggccttaccagtgaccgccttgctcctgccgctggccttgctgctccacgccgccaggccggaagtgcagctggttgaatctggcggaggactggttcagcctggcggatctctgagactgtcttgtgccgccagcggcttcagcttcagcgacttttggatgagctgggtccgacaggcccctggcaaaggacttgaatgggtcgccacaatcagccaggccggcagcgagaaggactacgtggactctgtgaagggcagattcaccatcagccgggacaacgccaagaagtccctgtacctccagatgaacagcctgagagccgaggacaccgccgtgtactattgtgcctctggcgtgtacagcttcgactacagaggccagggcaccctggtcacagtctcttctggtaccggcggaggcggatctggcggcggaggtagcggtggcggaggatctgaattcgacatccagatgacccagagccccagcagcctgtctgccagcgtgggcgacagagtgaccatcacctgtagagccagccagagcatcagcagctacctgaactggtatcagcagaagcccggcaaggcccccaaactgctgatctacgccgtgtccacactccagagcggcgtgcccagcagattttctggcagcggctccggcaccgacttcaccctgacaatcagctccctccagcccgaggacttcgccacctactactgtcagcagagcggcaccttccctcccaccacatttggacagggcaccaaggtggaaatcaagagactcgagggacagcctaaggccaatcctaccgtgacactgttccctccaagcagcgaagaactccaggccaacaaggccacacttgtgtgcctgatctccgacttctaccctggggctgtgacagtggcttggaaggccgatggatctcctgtgaaagccggcgtggaaaccaccaagccatccaagcagagcaacaacaaatacgccgccagctcctacctgagcctgacacctgagcagtggaagtcccacagatcctacagctgccaagtgacccacgaaggcagcaccgtggaaaagacagtggcccctacagagtgcagccccatcaagaccgatgtgattacaatggaccccaaggacaactgctccaaggacgccaacgataccctgctgctccagctgaccaacaccagcgcctactacatgtacttgttgctgctgctgaagtccgtggtgtacttcgccatcatcacatgctgcctgctgcggagaaccgccttctgctgcaacggcgagaagtctagggccaagcgatctggatctggagcaacaaacttctcactactcaaacaagcaggtgacgtggaggagaatcccgggcctactagtatggactggatttggcgcatccttttccttgtcggcgctgctaccggcgcgcattccgggccccagctccagctgcaagagtctggacctggcctggtcaagcctagcgagacactgagcctgacctgtaccgtgtccggcgatagcatcagcagcggcgattactactggggctggatcagacagcctcctggcaaaggactggaatggatcggccacatctactacagcggcgtgacctactacaaccccagcctgaagtccagagtgaccatcagcgtggacaccagccggaaccagttctccctgaagctgtctagcgtgacagccgccgataccgccgtgtactactgcaccagagaggacagcagcaactggcggagtagaggccagggaacactggtcacagttagctctggatccggcggaggcggaagtggaggcggaggatctggcggcggaggctctttcgaacaggtgcaactgctggaatctggcggcggactggtgcagcctggcggatctctgagactgagctgtgccgccagcggcttcaccttcagcagccacggaatgcactgggtgcgccaggcccctggaaagggactggaatgggtgtccgtgatctccggcagcggcagcaataccggctacgccgatagcgtgaagggccggttcaccatcagccgggacaacagcaagaacaccctgtacctccagatgaacagcctgcgggccgaggacaccgccgtgtactattgtgccagacagtggggcagctacgccttcgattcttggggccagggcaccctcgtgaccgtgtcatctacgcgtgcctctacaaagggaccctccgtgtttcctctggctcccagcagcaagtctacaagcggaggaacagccgctctgggctgcctggtcaaggattactttcccgagcctgtgaccgtgtcctggaatagcggagcactgacaagcggcgtgcacacctttccagccgtgctgcaaagcagcggcctgtactctctgagcagcgtggtcacagtgcctagctctagcctgggcacccagacctacatctgcaatgtgaaccacaagcctagcaacaccaaggtggacaagagagtggaacccaagagctgtgaagtgaaaaccgactccaccgaccacgtgaagcccaaagagacagagaacaccaagcagcccagcaagagctgccacaagcccaaggccatcgtgcacaccgagaaagtgaacatgatgagcctgaccgtgctgggcctgcggatgctgttcgccaaaaccgtggccgtgaacttcctgctgaccgccaagctgttcttcctc

SEQ ID NO: 3039 - DNA, 2784 bp, Artificial Sequence
  Synthetic Polynucloetide
atggccttaccagtgaccgccttgctcctgccgctggccttgctgctccacgccgccaggccggaagtgcagctggttgaatctggcggaggactggttcagcctggcggatctctgagactgtcttgtgccgccagcggcttcagcttcagcgacttttggatgagctgggtccgacaggcccctggcaaaggacttgaatgggtcgccacaatcagccaggccggcagcgagaaggactacgtggactctgtgaagggcagattcaccatcagccgggacaacgccaagaagtccctgtacctccagatgaacagcctgagagccgaggacaccgccgtgtactattgtgcctctggcgtgtacagcttcgactacagaggccagggcaccctggtcacagtctcttctggtaccggcggaggcggatctggcggcggaggtagcggtggcggaggatctgaattcgacatcgtgatgagccagagccctagcagcctggccgtgtccgtgggcgagaaagtgaccatgagctgcaagagcagccagtccctgctgcacagcagcaaccagaagaactacctggcctggtatcagcagaagcccggccagtcccccaaggtgctgatctactgggccagcaccagagaaagcggcgtgcccgatagattcaccggcagcggctctggcaccgacttcaccctgaccatcaccagcgtgaagtccgaggacctggctgtgtactactgccagcagtattacagctacccctggaccttcggcggaggcacccggctggaaatcaaaagactcgagggacagcctaaggccaatcctaccgtgacactgttccctccaagcagcgaagaactccaggccaacaaggccacacttgtgtgcctgatctccgacttctaccctggggctgtgacagtggcttggaaggccgatggatctcctgtgaaagccggcgtggaaaccaccaagccatccaagcagagcaacaacaaatacgccgccagctcctacctgagcctgacacctgagcagtggaagtcccacagatcctacagctgccaagtgacccacgaaggcagcaccgtggaaaagacagtggcccctacagagtgcagccccatcaagaccgatgtgattacaatggaccccaaggacaactgctccaaggacgccaacgataccctgctgctccagctgaccaacaccagcgcctactacatgtacttgttgctgctgctgaagtccgtggtgtacttcgccatcatcacatgctgcctgctgcggagaaccgccttctgctgcaacggcgagaagtctagggccaagcgatctggatctggagcaacaaacttctcactactcaaacaagcaggtgacgtggaggagaatcccgggcctactagtatggactggatttggcgcatccttttccttgtcggcgctgctaccggcgcgcattccgggccccagctccagctgcaagagtctggacctggcctggtcaagcctagcgagacactgagcctgacctgtaccgtgtccggcgatagcatcagcagcggcgattactactggggctggatcagacagcctcctggcaaaggactggaatggatcggccacatctactacagcggcgtgacctactacaaccccagcctgaagtccagagtgaccatcagcgtggacaccagccggaaccagttctccctgaagctgtctagcgtgacagccgccgataccgccgtgtactactgcaccagagaggacagcagcaactggcggagtagaggccagggaacactggtcacagttagctctggatccggcggaggcggaagtggaggcggaggatctggcggcggaggctctttcgaagaagtgcaactccagcagagcgtggccgagcttgtgaagcctggcgcttccgtgaagatgtcctgcaaggtgtccggctacaccctgacagaccacaccatccactggatgaagcagcggcctgagcagggcctggaatggatcggctacatctaccccagggacggcatcaccggctacaacgagaagttcaagggcaaggccacactgaccgccgacaccagcagcagcacagcctacatgcaactgaacagcctgaccagcgaggacagcgccgtgtacttctgtgccagatggggctacagctacagaaactacgcctactactacgactactggggccagggcacaaccctgaccgtgtctagtacgcgtgcctctacaaagggaccctccgtgtttcctctggctcccagcagcaagtctacaagcggaggaacagccgctctgggctgcctggtcaaggattactttcccgagcctgtgaccgtgtcctggaatagcggagcactgacaagcggcgtgcacacctttccagccgtgctgcaaagcagcggcctgtactctctgagcagcgtggtcacagtgcctagctctagcctgggcacccagacctacatctgcaatgtgaaccacaagcctagcaacaccaaggtggacaagagagtggaacccaagagctgtgaagtgaaaaccgactccaccgaccacgtgaagcccaaagagacagagaacaccaagcagcccagcaagagctgccacaagcccaaggccatcgtgcacaccgagaaagtgaacatgatgagcctgaccgtgctgggcctgcggatgctgttcgccaaaaccgtggccgtgaacttcctgctgaccgccaagctgttcttcctc

SEQ ID NO: 3040 - DNA, 2775 bp, Artificial Sequence
  Synthetic Polynucloetide
atggccttaccagtgaccgccttgctcctgccgctggccttgctgctccacgccgccaggccggaagtgcagctggttgaatctggcggaggactggttcagcctggcggatctctgagactgtcttgtgccgccagcggcttcagcttcagcgacttttggatgagctgggtccgacaggcccctggcaaaggacttgaatgggtcgccacaatcagccaggccggcagcgagaaggactacgtggactctgtgaagggcagattcaccatcagccgggacaacgccaagaagtccctgtacctccagatgaacagcctgagagccgaggacaccgccgtgtactattgtgcctctggcgtgtacagcttcgactacagaggccagggcaccctggtcacagtctcttctggtaccggcggaggcggatctggcggcggaggtagcggtggcggaggatctgaattcgagatcgtgctgacacagagccctggcaccctgagcctgtctccaggcgaaagagccacactgagctgtcgggccagccagagcgtgtccagctcttacctggcctggtatcagcagaagcccggccaggctccccggctgctgatctacggaacaagcagcagagccaccggcatccccgacagattttctggcagcggctccggcaccgacttcaccctgacaatcagcagactggaacccgaggacttcgccgtgtactactgccagcagtacggcagcagccccttcacctttggcggaggcaccaaggtggaaatcaagagactcgagggacagcctaaggccaatcctaccgtgacactgttccctccaagcagcgaagaactccaggccaacaaggccacacttgtgtgcctgatctccgacttctaccctggggctgtgacagtggcttggaaggccgatggatctcctgtgaaagccggcgtggaaaccaccaagccatccaagcagagcaacaacaaatacgccgccagctcctacctgagcctgacacctgagcagtggaagtcccacagatcctacagctgccaagtgacccacgaaggcagcaccgtggaaaagacagtggcccctacagagtgcagccccatcaagaccgatgtgattacaatggaccccaaggacaactgctccaaggacgccaacgataccctgctgctccagctgaccaacaccagcgcctactacatgtacttgttgctgctgctgaagtccgtggtgtacttcgccatcatcacatgctgcctgctgcggagaaccgccttctgctgcaacggcgagaagtctagggccaagcgatctggatctggagcaacaaacttctcactactcaaacaagcaggtgacgtggaggagaatcccgggcctactagtatggactggatttggcgcatccttttccttgtcggcgctgctaccggcgcgcattccgggccccagctccagctgcaagagtctggacctggcctggtcaagcctagcgagacactgagcctgacctgtaccgtgtccggcgatagcatcagcagcggcgattactactggggctggatcagacagcctcctggcaaaggactggaatggatcggccacatctactacagcggcgtgacctactacaaccccagcctgaagtccagagtgaccatcagcgtggacaccagccggaaccagttctccctgaagctgtctagcgtgacagccgccgataccgccgtgtactactgcaccagagaggacagcagcaactggcggagtagaggccagggaacactggtcacagttagctctggatccggcggaggcggaagtggaggcggaggatctggcggcggaggctctttcgaacaggtgcaactccaggaatctggccccggactggctaagcccagcgagacactgagcctgacctgtaccgtgtccggcgacagcatcaccagctactactggtcctggatcagacagccccctggcaagggcctggaatggatcggctacatctactacagcggcagcaccaactacaaccccagcctgaagtccagagtgaccatcagcgtggacaccagcaagaaccagttctccctgaagctgagcagcgtgacagccgccgacaccgccgtgtattattgcgccagagatcagcggagaatcgccgctgccggcacccacttttacggcatggatgtgtggggccagggcaccaccgtgaccgtgtcatctacgcgtgcctctacaaagggaccctccgtgtttcctctggctcccagcagcaagtctacaagcggaggaacagccgctctgggctgcctggtcaaggattactttcccgagcctgtgaccgtgtcctggaatagcggagcactgacaagcggcgtgcacacctttccagccgtgctgcaaagcagcggcctgtactctctgagcagcgtggtcacagtgcctagctctagcctgggcacccagacctacatctgcaatgtgaaccacaagcctagcaacaccaaggtggacaagagagtggaacccaagagctgtgaagtgaaaaccgactccaccgaccacgtgaagcccaaagagacagagaacaccaagcagcccagcaagagctgccacaagcccaaggccatcgtgcacaccgagaaagtgaacatgatgagcctgaccgtgctgggcctgcggatgctgttcgccaaaaccgtggccgtgaacttcctgctgaccgccaagctgttcttcctc

SEQ ID NO: 3041 - DNA, 2751 bp, Artificial Sequence
  Synthetic Polynucloetide
atggccttaccagtgaccgccttgctcctgccgctggccttgctgctccacgccgccaggccggaagtgcagctggttgaatctggcggaggactggttcagcctggcggatctctgagactgtcttgtgccgccagcggcttcagcttcagcgacttttggatgagctgggtccgacaggcccctggcaaaggacttgaatgggtcgccacaatcagccaggccggcagcgagaaggactacgtggactctgtgaagggcagattcaccatcagccgggacaacgccaagaagtccctgtacctccagatgaacagcctgagagccgaggacaccgccgtgtactattgtgcctctggcgtgtacagcttcgactacagaggccagggcaccctggtcacagtctcttctggtaccggcggaggcggatctggcggcggaggtagcggtggcggaggatctgaattcgacatcctgctgacccagagccccgtgatcctgtccgtgtctcctggcgagagagtgtccttcagctgtcgggccagccagagcatcggcaccaacatccactggtatcagcagcggaccaacggcagccccagactgctgattaagtacgccagcgagtccatcagcggcatccccagcagattttccggcagcggctccggcaccgacttcaccctgagcatcaacagcgtggaaagcgaggacattgccgactactactgccagcagaacaacaactggcccaccaccttcggagccggcaccaagctggaactgaagctcgagggacagcctaaggccaatcctaccgtgacactgttccctccaagcagcgaagaactccaggccaacaaggccacacttgtgtgcctgatctccgacttctaccctggggctgtgacagtggcttggaaggccgatggatctcctgtgaaagccggcgtggaaaccaccaagccatccaagcagagcaacaacaaatacgccgccagctcctacctgagcctgacacctgagcagtggaagtcccacagatcctacagctgccaagtgacccacgaaggcagcaccgtggaaaagacagtggcccctacagagtgcagccccatcaagaccgatgtgattacaatggaccccaaggacaactgctccaaggacgccaacgataccctgctgctccagctgaccaacaccagcgcctactacatgtacttgttgctgctgctgaagtccgtggtgtacttcgccatcatcacatgctgcctgctgcggagaaccgccttctgctgcaacggcgagaagtctagggccaagcgatctggatctggagcaacaaacttctcactactcaaacaagcaggtgacgtggaggagaatcccgggcctactagtatggactggatttggcgcatccttttccttgtcggcgctgctaccggcgcgcattccgggccccagctccagctgcaagagtctggacctggcctggtcaagcctagcgagacactgagcctgacctgtaccgtgtccggcgatagcatcagcagcggcgattactactggggctggatcagacagcctcctggcaaaggactggaatggatcggccacatctactacagcggcgtgacctactacaaccccagcctgaagtccagagtgaccatcagcgtggacaccagccggaaccagttctccctgaagctgtctagcgtgacagccgccgataccgccgtgtactactgcaccagagaggacagcagcaactggcggagtagaggccagggaacactggtcacagttagctctggatccggcggaggcggaagtggaggcggaggatctggcggcggaggctctttcgaacaggtgcagctgaagcagagcggacctggcctggtgcagcctagccagagcctgtccatcacctgtaccgtgtccggcttcagcctgaccaactacggcgtgcactgggtgcgccagagccctggaaaaggactggaatggctgggagtgatttggagcggcggcaacaccgactacaacacccccttcaccagcagactgtctatcaacaaggacaacagcaagagccaggtgttcttcaagatgaacagcctccagagcaacgacaccgccatctactactgtgctagagccctgacctactatgactacgagttcgcctactggggccagggcacactcgtgacagtgtctgctacgcgtgcctctacaaagggaccctccgtgtttcctctggctcccagcagcaagtctacaagcggaggaacagccgctctgggctgcctggtcaaggattactttcccgagcctgtgaccgtgtcctggaatagcggagcactgacaagcggcgtgcacacctttccagccgtgctgcaaagcagcggcctgtactctctgagcagcgtggtcacagtgcctagctctagcctgggcacccagacctacatctgcaatgtgaaccacaagcctagcaacaccaaggtggacaagagagtggaacccaagagctgtgaagtgaaaaccgactccaccgaccacgtgaagcccaaagagacagagaacaccaagcagcccagcaagagctgccacaagcccaaggccatcgtgcacaccgagaaagtgaacatgatgagcctgaccgtgctgggcctgcggatgctgttcgccaaaaccgtggccgtgaacttcctgctgaccgccaagctgttcttcctc

SEQ ID NO: 3042 - DNA, 2730 bp, Artificial Sequence
  Synthetic Polynucloetide
atggccttaccagtgaccgccttgctcctgccgctggccttgctgctccacgccgccaggccggaagtgcagctggttgaatctggcggaggactggttcagcctggcggatctctgagactgtcttgtgccgccagcggcttcagcttcagcgacttttggatgagctgggtccgacaggcccctggcaaaggacttgaatgggtcgccacaatcagccaggccggcagcgagaaggactacgtggactctgtgaagggcagattcaccatcagccgggacaacgccaagaagtccctgtacctccagatgaacagcctgagagccgaggacaccgccgtgtactattgtgcctctggcgtgtacagcttcgactacagaggccagggcaccctggtcacagtctcttctggtaccggcggaggcggatctggcggcggaggtagcggtggcggaggatctgaattcatgacccagagccccaagttcctgctggtgtctgccggcgacagagtgaccctgacatgcaaggccagccagagcgtgaacaacgacgtgtactggtatcagcaggaacccggccagtcccccaagctgctgatctactgggccagcaccagagaaagcggcgtgcccgatagattcaccggcagcggctctggcaccgacttcaccctgacaatcagcagcgtgcaggccgaggacctggccgtgtactactgcaagcagagctacaacctgtacaccttcggcggaggcaccaagctggaaatcaagagactcgagggacagcctaaggccaatcctaccgtgacactgttccctccaagcagcgaagaactccaggccaacaaggccacacttgtgtgcctgatctccgacttctaccctggggctgtgacagtggcttggaaggccgatggatctcctgtgaaagccggcgtggaaaccaccaagccatccaagcagagcaacaacaaatacgccgccagctcctacctgagcctgacacctgagcagtggaagtcccacagatcctacagctgccaagtgacccacgaaggcagcaccgtggaaaagacagtggcccctacagagtgcagccccatcaagaccgatgtgattacaatggaccccaaggacaactgctccaaggacgccaacgataccctgctgctccagctgaccaacaccagcgcctactacatgtacttgttgctgctgctgaagtccgtggtgtacttcgccatcatcacatgctgcctgctgcggagaaccgccttctgctgcaacggcgagaagtctagggccaagcgatctggatctggagcaacaaacttctcactactcaaacaagcaggtgacgtggaggagaatcccgggcctactagtatggactggatttggcgcatccttttccttgtcggcgctgctaccggcgcgcattccgggccccagctccagctgcaagagtctggacctggcctggtcaagcctagcgagacactgagcctgacctgtaccgtgtccggcgatagcatcagcagcggcgattactactggggctggatcagacagcctcctggcaaaggactggaatggatcggccacatctactacagcggcgtgacctactacaaccccagcctgaagtccagagtgaccatcagcgtggacaccagccggaaccagttctccctgaagctgtctagcgtgacagccgccgataccgccgtgtactactgcaccagagaggacagcagcaactggcggagtagaggccagggaacactggtcacagttagctctggatccggcggaggcggaagtggaggcggaggatctggcggcggaggctctttcgaagaatctggaagaggactggtgcagcctggcggcagcagaaagctgtcttgtgccgccagcggcttcaccttcagcaccagcggaatgcactgggtgcgccaggcccctgagaagggactggaatgggtggcctacatcagctccggcagcaccaccatctaccacgccgataccgtgaagggccggttcaccatcagccgggacaaccccaagaataccctgttcctccagatgaccagcctgcggagcgaggacaccgccatgtactattgctgcgccagaagcggccagttcggcaactacttcgactactggggccagggcaccaccctgaccgtgtcatctacgcgtgcctctacaaagggaccctccgtgtttcctctggctcccagcagcaagtctacaagcggaggaacagccgctctgggctgcctggtcaaggattactttcccgagcctgtgaccgtgtcctggaatagcggagcactgacaagcggcgtgcacacctttccagccgtgctgcaaagcagcggcctgtactctctgagcagcgtggtcacagtgcctagctctagcctgggcacccagacctacatctgcaatgtgaaccacaagcctagcaacaccaaggtggacaagagagtggaacccaagagctgtgaagtgaaaaccgactccaccgaccacgtgaagcccaaagagacagagaacaccaagcagcccagcaagagctgccacaagcccaaggccatcgtgcacaccgagaaagtgaacatgatgagcctgaccgtgctgggcctgcggatgctgttcgccaaaaccgtggccgtgaacttcctgctgaccgccaagctgttcttcctc

SEQ ID NO: 3043 - DNA, 2745 bp, Artificial Sequence
  Synthetic Polynucloetide
atggccttaccagtgaccgccttgctcctgccgctggccttgctgctccacgccgccaggccggaagtgcagctggttgaatctggcggaggactggttcagcctggcggatctctgagactgtcttgtgccgccagcggcttcagcttcagcgacttttggatgagctgggtccgacaggcccctggcaaaggacttgaatgggtcgccacaatcagccaggccggcagcgagaaggactacgtggactctgtgaagggcagattcaccatcagccgggacaacgccaagaagtccctgtacctccagatgaacagcctgagagccgaggacaccgccgtgtactattgtgcctctggcgtgtacagcttcgactacagaggccagggcaccctggtcacagtctcttctggtaccggcggaggcggatctggcggcggaggtagcggtggcggaggatctgaattccagagcccatctagcctggctgtgtctgccggcgagaaagtgaccatgagctgcaagagcagccagagcctgctgaacagccggacccggaagaactacctggcctggtatcagcagaagcccggccagagccccaagctgctgatctactgggccagcaccagagaaagcggcgtgcccgatagattcaccggctctggcagcggcaccgacttcaccctgacaatcagcagcgtgcaggccgaggacctggccgtgtactactgcaagcagagcaacctgtacaccttcggcggaggcaccaagctggaaatcaagctcgagggacagcctaaggccaatcctaccgtgacactgttccctccaagcagcgaagaactccaggccaacaaggccacacttgtgtgcctgatctccgacttctaccctggggctgtgacagtggcttggaaggccgatggatctcctgtgaaagccggcgtggaaaccaccaagccatccaagcagagcaacaacaaatacgccgccagctcctacctgagcctgacacctgagcagtggaagtcccacagatcctacagctgccaagtgacccacgaaggcagcaccgtggaaaagacagtggcccctacagagtgcagccccatcaagaccgatgtgattacaatggaccccaaggacaactgctccaaggacgccaacgataccctgctgctccagctgaccaacaccagcgcctactacatgtacttgttgctgctgctgaagtccgtggtgtacttcgccatcatcacatgctgcctgctgcggagaaccgccttctgctgcaacggcgagaagtctagggccaagcgatctggatctggagcaacaaacttctcactactcaaacaagcaggtgacgtggaggagaatcccgggcctactagtatggactggatttggcgcatccttttccttgtcggcgctgctaccggcgcgcattccgggccccagctccagctgcaagagtctggacctggcctggtcaagcctagcgagacactgagcctgacctgtaccgtgtccggcgatagcatcagcagcggcgattactactggggctggatcagacagcctcctggcaaaggactggaatggatcggccacatctactacagcggcgtgacctactacaaccccagcctgaagtccagagtgaccatcagcgtggacaccagccggaaccagttctccctgaagctgtctagcgtgacagccgccgataccgccgtgtactactgcaccagagaggacagcagcaactggcggagtagaggccagggaacactggtcacagttagctctggatccggcggaggcggaagtggaggcggaggatctggcggcggaggctctttcgaacaggtgcagctggaagagtctggacccgagcttgtgaagcctggggccagcgtgaagctgtcctgtaaagccagcggctacaccttcaccgagtacatcatccactgggtcaagcagcggagcggccagggcctggaatggatcggctggttttaccctggctccggcagcatcaagtacaacgagaagttcaaggacaaggccaccctgaccgccgacaagtccagcagcaccgtgtacatggaactgagcggcctgaccagcgaggacagcgccgtgtatttctgcgccagacacgacggctacagctacttcgactattggggccagggcaccacactgaccgtgtcctctacgcgtgcctctacaaagggaccctccgtgtttcctctggctcccagcagcaagtctacaagcggaggaacagccgctctgggctgcctggtcaaggattactttcccgagcctgtgaccgtgtcctggaatagcggagcactgacaagcggcgtgcacacctttccagccgtgctgcaaagcagcggcctgtactctctgagcagcgtggtcacagtgcctagctctagcctgggcacccagacctacatctgcaatgtgaaccacaagcctagcaacaccaaggtggacaagagagtggaacccaagagctgtgaagtgaaaaccgactccaccgaccacgtgaagcccaaagagacagagaacaccaagcagcccagcaagagctgccacaagcccaaggccatcgtgcacaccgagaaagtgaacatgatgagcctgaccgtgctgggcctgcggatgctgttcgccaaaaccgtggccgtgaacttcctgctgaccgccaagctgttcttcctc

SEQ ID NO: 3044 - DNA, 2754 bp, Artificial Sequence
  Synthetic Polynucloetide
atggccttaccagtgaccgccttgctcctgccgctggccttgctgctccacgccgccaggccggaagtgcagctggttgaatctggcggaggactggttcagcctggcggatctctgagactgtcttgtgccgccagcggcttcagcttcagcgacttttggatgagctgggtccgacaggcccctggcaaaggacttgaatgggtcgccacaatcagccaggccggcagcgagaaggactacgtggactctgtgaagggcagattcaccatcagccgggacaacgccaagaagtccctgtacctccagatgaacagcctgagagccgaggacaccgccgtgtactattgtgcctctggcgtgtacagcttcgactacagaggccagggcaccctggtcacagtctcttctggtaccggcggaggcggatctggcggcggaggtagcggtggcggaggatctgaattcgacatccagatgacccagagccccagcagcctgtctgcctctctgggcgagagagtgtccctgacctgtcgggccacacaggaactgagcggctacctgtcttggctgcagcagaagcccgacggcaccatcaagcggctgatctacgccgccagcaccctggatagcggcgtgcccaagagattcagcggcaacagaagcggcagcgactacagcctgaccatcagctccctggaaagcgaggacttcgccgactactactgcctgcagtacgccatctacccctacaccttcggcggaggcaccaagctggaaatcaagctcgagggacagcctaaggccaatcctaccgtgacactgttccctccaagcagcgaagaactccaggccaacaaggccacacttgtgtgcctgatctccgacttctaccctggggctgtgacagtggcttggaaggccgatggatctcctgtgaaagccggcgtggaaaccaccaagccatccaagcagagcaacaacaaatacgccgccagctcctacctgagcctgacacctgagcagtggaagtcccacagatcctacagctgccaagtgacccacgaaggcagcaccgtggaaaagacagtggcccctacagagtgcagccccatcaagaccgatgtgattacaatggaccccaaggacaactgctccaaggacgccaacgataccctgctgctccagctgaccaacaccagcgcctactacatgtacttgttgctgctgctgaagtccgtggtgtacttcgccatcatcacatgctgcctgctgcggagaaccgccttctgctgcaacggcgagaagtctagggccaagcgatctggatctggagcaacaaacttctcactactcaaacaagcaggtgacgtggaggagaatcccgggcctactagtatggactggatttggcgcatccttttccttgtcggcgctgctaccggcgcgcattccgggccccagctccagctgcaagagtctggacctggcctggtcaagcctagcgagacactgagcctgacctgtaccgtgtccggcgatagcatcagcagcggcgattactactggggctggatcagacagcctcctggcaaaggactggaatggatcggccacatctactacagcggcgtgacctactacaaccccagcctgaagtccagagtgaccatcagcgtggacaccagccggaaccagttctccctgaagctgtctagcgtgacagccgccgataccgccgtgtactactgcaccagagaggacagcagcaactggcggagtagaggccagggaacactggtcacagttagctctggatccggcggaggcggaagtggaggcggaggatctggcggcggaggctctttcgaagaggtgcaactgcagcagtctggccccgagcttgtgaagcctggcgcctccgtgaagatgagctgcaaggccagcggctacacctttaccagctacttcatccactgggtcaagcagaaacccggccagggcctggaatggatcggcttcatcaacccttacaacgacggcagcaagtacaacgagaagttcaagggcaaggccaccctgaccagcgacaagagcagcagcaccgcctacatggaactgtccagcctgacatccgaggacagcgccgtgtactactgcaccagggacgacggctactacggctacgccatggactactggggccagggaacaagcgtcaccgtgtcctctacgcgtgcctctacaaagggaccctccgtgtttcctctggctcccagcagcaagtctacaagcggaggaacagccgctctgggctgcctggtcaaggattactttcccgagcctgtgaccgtgtcctggaatagcggagcactgacaagcggcgtgcacacctttccagccgtgctgcaaagcagcggcctgtactctctgagcagcgtggtcacagtgcctagctctagcctgggcacccagacctacatctgcaatgtgaaccacaagcctagcaacaccaaggtggacaagagagtggaacccaagagctgtgaagtgaaaaccgactccaccgaccacgtgaagcccaaagagacagagaacaccaagcagcccagcaagagctgccacaagcccaaggccatcgtgcacaccgagaaagtgaacatgatgagcctgaccgtgctgggcctgcggatgctgttcgccaaaaccgtggccgtgaacttcctgctgaccgccaagctgttcttcctc

SEQ ID NO: 3045 - DNA, 2769 bp, Artificial Sequence
  Synthetic Polynucloetide
atggccttaccagtgaccgccttgctcctgccgctggccttgctgctccacgccgccaggccggaagtgcagctggttgaatctggcggaggactggttcagcctggcggatctctgagactgtcttgtgccgccagcggcttcagcttcagcgacttttggatgagctgggtccgacaggcccctggcaaaggacttgaatgggtcgccacaatcagccaggccggcagcgagaaggactacgtggactctgtgaagggcagattcaccatcagccgggacaacgccaagaagtccctgtacctccagatgaacagcctgagagccgaggacaccgccgtgtactattgtgcctctggcgtgtacagcttcgactacagaggccagggcaccctggtcacagtctcttctggtaccggcggaggcggatctggcggcggaggtagcggtggcggaggatctgaattcgacaccatcgtgctgacacagagccctgcttccctggccgtgtccctgggacagagagccaccatctcttgcagagccagcgagagcgtggacagctacggcaacagcttcatgcactggtatcagcagaagcccggccagccccccaagctgctgatctacctggcctccaacctggaaagcggcgtgcccgccagattttctggcagcggcagcagaaccgacttcaccctgaccatcgaccccgtggaagccgatgatgccgccacctactactgccagcagaacaactacgacccctggaccttcggcggaggcaccaagctggaaatcaagctcgagggacagcctaaggccaatcctaccgtgacactgttccctccaagcagcgaagaactccaggccaacaaggccacacttgtgtgcctgatctccgacttctaccctggggctgtgacagtggcttggaaggccgatggatctcctgtgaaagccggcgtggaaaccaccaagccatccaagcagagcaacaacaaatacgccgccagctcctacctgagcctgacacctgagcagtggaagtcccacagatcctacagctgccaagtgacccacgaaggcagcaccgtggaaaagacagtggcccctacagagtgcagccccatcaagaccgatgtgattacaatggaccccaaggacaactgctccaaggacgccaacgataccctgctgctccagctgaccaacaccagcgcctactacatgtacttgttgctgctgctgaagtccgtggtgtacttcgccatcatcacatgctgcctgctgcggagaaccgccttctgctgcaacggcgagaagtctagggccaagcgatctggatctggagcaacaaacttctcactactcaaacaagcaggtgacgtggaggagaatcccgggcctactagtatggactggatttggcgcatccttttccttgtcggcgctgctaccggcgcgcattccgggccccagctccagctgcaagagtctggacctggcctggtcaagcctagcgagacactgagcctgacctgtaccgtgtccggcgatagcatcagcagcggcgattactactggggctggatcagacagcctcctggcaaaggactggaatggatcggccacatctactacagcggcgtgacctactacaaccccagcctgaagtccagagtgaccatcagcgtggacaccagccggaaccagttctccctgaagctgtctagcgtgacagccgccgataccgccgtgtactactgcaccagagaggacagcagcaactggcggagtagaggccagggaacactggtcacagttagctctggatccggcggaggcggaagtggaggcggaggatctggcggcggaggctctttcgaagaagtgcaactccagcagagcggccctgagcttgtgaagcctggcgcttccgtgaagatgagctgcaaggccagcggctacaccttcaccagctacgtgatgcactgggtcaagcagaaacctggacagggcctggaatggatcggctacatcaacccctacaacgacggcaccaagtacaacgagaagttcaagggcaaggccaccctgacaagcgacaccagcagcagcaccgcctacatggaactgaacagcctgaccagcgaggacagcgccgtgtacttctgcgccagacccatctacttcgacaacgactacttcgattactggggccagggcaccaccctgaaggtgtcctctacgcgtgcctctacaaagggaccctccgtgtttcctctggctcccagcagcaagtctacaagcggaggaacagccgctctgggctgcctggtcaaggattactttcccgagcctgtgaccgtgtcctggaatagcggagcactgacaagcggcgtgcacacctttccagccgtgctgcaaagcagcggcctgtactctctgagcagcgtggtcacagtgcctagctctagcctgggcacccagacctacatctgcaatgtgaaccacaagcctagcaacaccaaggtggacaagagagtggaacccaagagctgtgaagtgaaaaccgactccaccgaccacgtgaagcccaaagagacagagaacaccaagcagcccagcaagagctgccacaagcccaaggccatcgtgcacaccgagaaagtgaacatgatgagcctgaccgtgctgggcctgcggatgctgttcgccaaaaccgtggccgtgaacttcctgctgaccgccaagctgttcttcctc

SEQ ID NO: 3046 - DNA, 2754 bp, Artificial Sequence
  Synthetic Polynucloetide
atggccttaccagtgaccgccttgctcctgccgctggccttgctgctccacgccgccaggccggaagtgcagctggttgaatctggcggaggactggttcagcctggcggatctctgagactgtcttgtgccgccagcggcttcagcttcagcgacttttggatgagctgggtccgacaggcccctggcaaaggacttgaatgggtcgccacaatcagccaggccggcagcgagaaggactacgtggactctgtgaagggcagattcaccatcagccgggacaacgccaagaagtccctgtacctccagatgaacagcctgagagccgaggacaccgccgtgtactattgtgcctctggcgtgtacagcttcgactacagaggccagggcaccctggtcacagtctcttctggtaccggcggaggcggatctggcggcggaggtagcggtggcggaggatctgaattcgacatccagatgacccagagccccagcagcctgtctgccagcgtgggcgacagagtgaccatcacatgcaaggccagccaggacgtgggaatcgccgtggcctggtatcagcagaaacccggcaaggtgcccaagctgctgatctactgggccagcaccagacacaccggcgtgcccgatagattttccggcagcggctccggcaccgacttcaccctgacaatcagctccctccagcccgaggacgtggcaacctactactgccagcagtacagcagctacccctacaccttcggccagggcaccaaggtggaaatcaagagactcgagggacagcctaaggccaatcctaccgtgacactgttccctccaagcagcgaagaactccaggccaacaaggccacacttgtgtgcctgatctccgacttctaccctggggctgtgacagtggcttggaaggccgatggatctcctgtgaaagccggcgtggaaaccaccaagccatccaagcagagcaacaacaaatacgccgccagctcctacctgagcctgacacctgagcagtggaagtcccacagatcctacagctgccaagtgacccacgaaggcagcaccgtggaaaagacagtggcccctacagagtgcagccccatcaagaccgatgtgattacaatggaccccaaggacaactgctccaaggacgccaacgataccctgctgctccagctgaccaacaccagcgcctactacatgtacttgttgctgctgctgaagtccgtggtgtacttcgccatcatcacatgctgcctgctgcggagaaccgccttctgctgcaacggcgagaagtctagggccaagcgatctggatctggagcaacaaacttctcactactcaaacaagcaggtgacgtggaggagaatcccgggcctactagtatggactggatttggcgcatccttttccttgtcggcgctgctaccggcgcgcattccgggccccagctccagctgcaagagtctggacctggcctggtcaagcctagcgagacactgagcctgacctgtaccgtgtccggcgatagcatcagcagcggcgattactactggggctggatcagacagcctcctggcaaaggactggaatggatcggccacatctactacagcggcgtgacctactacaaccccagcctgaagtccagagtgaccatcagcgtggacaccagccggaaccagttctccctgaagctgtctagcgtgacagccgccgataccgccgtgtactactgcaccagagaggacagcagcaactggcggagtagaggccagggaacactggtcacagttagctctggatccggcggaggcggaagtggaggcggaggatctggcggcggaggctctttcgaagaagtgcaactggtggaatcaggcggcggactggtgcagcctggcggatctctgagactgagctgtgccgccagcggcttcgacttcagccggtactggatgagctgggtgcgccaggcccctggcaaaggactggaatggatcggcgagatcaaccccgacagcagcaccatcaactacgcccccagcctgaaggacaagttcatcatcagccgggacaacgccaagaacagcctgtacctccagatgaactccctgcgggccgaggacaccgccgtgtactattgcgccagacccgacggcaactactggtacttcgacgtgtggggccagggaaccctcgtgaccgtgtcatctacgcgtgcctctacaaagggaccctccgtgtttcctctggctcccagcagcaagtctacaagcggaggaacagccgctctgggctgcctggtcaaggattactttcccgagcctgtgaccgtgtcctggaatagcggagcactgacaagcggcgtgcacacctttccagccgtgctgcaaagcagcggcctgtactctctgagcagcgtggtcacagtgcctagctctagcctgggcacccagacctacatctgcaatgtgaaccacaagcctagcaacaccaaggtggacaagagagtggaacccaagagctgtgaagtgaaaaccgactccaccgaccacgtgaagcccaaagagacagagaacaccaagcagcccagcaagagctgccacaagcccaaggccatcgtgcacaccgagaaagtgaacatgatgagcctgaccgtgctgggcctgcggatgctgttcgccaaaaccgtggccgtgaacttcctgctgaccgccaagctgttcttcctc

SEQ ID NO: 3047 - DNA, 2754 bp, Artificial Sequence
  Synthetic Polynucloetide
atggccttaccagtgaccgccttgctcctgccgctggccttgctgctccacgccgccaggccggaagtgcagctggttgaatctggcggaggactggttcagcctggcggatctctgagactgtcttgtgccgccagcggcttcagcttcagcgacttttggatgagctgggtccgacaggcccctggcaaaggacttgaatgggtcgccacaatcagccaggccggcagcgagaaggactacgtggactctgtgaagggcagattcaccatcagccgggacaacgccaagaagtccctgtacctccagatgaacagcctgagagccgaggacaccgccgtgtactattgtgcctctggcgtgtacagcttcgactacagaggccagggcaccctggtcacagtctcttctggtaccggcggaggcggatctggcggcggaggtagcggtggcggaggatctgaattcgacatcgtgatgacccagagccagaagagcatgagcaccagcgtgggcgacagagtgagcatcacctgcaaggccagccaggacgtgatcaccggcgtggcctggtaccagcagaagcccggccagagccccaagctgctgatctacagcgccagctacagatacaccggcgtgcccgacagattcaccggcagcggcagcggcaccgacttcaccttcaccatcagcaacgtgcaggccgaggacctggccgtgtactactgccagcagcactacagcacccccctgaccttcggcgccggcaccaagctggagctgaagctcgagggacagcctaaggccaatcctaccgtgacactgttccctccaagcagcgaagaactccaggccaacaaggccacacttgtgtgcctgatctccgacttctaccctggggctgtgacagtggcttggaaggccgatggatctcctgtgaaagccggcgtggaaaccaccaagccatccaagcagagcaacaacaaatacgccgccagctcctacctgagcctgacacctgagcagtggaagtcccacagatcctacagctgccaagtgacccacgaaggcagcaccgtggaaaagacagtggcccctacagagtgcagccccatcaagaccgatgtgattacaatggaccccaaggacaactgctccaaggacgccaacgataccctgctgctccagctgaccaacaccagcgcctactacatgtacttgttgctgctgctgaagtccgtggtgtacttcgccatcatcacatgctgcctgctgcggagaaccgccttctgctgcaacggcgagaagtctagggccaagcgatctggatctggagcaacaaacttctcactactcaaacaagcaggtgacgtggaggagaatcccgggcctactagtatggactggatttggcgcatccttttccttgtcggcgctgctaccggcgcgcattccgggccccagctccagctgcaagagtctggacctggcctggtcaagcctagcgagacactgagcctgacctgtaccgtgtccggcgatagcatcagcagcggcgattactactggggctggatcagacagcctcctggcaaaggactggaatggatcggccacatctactacagcggcgtgacctactacaaccccagcctgaagtccagagtgaccatcagcgtggacaccagccggaaccagttctccctgaagctgtctagcgtgacagccgccgataccgccgtgtactactgcaccagagaggacagcagcaactggcggagtagaggccagggaacactggtcacagttagctctggatccggcggaggcggaagtggaggcggaggatctggcggcggaggctctttcgaacaggtgcagctgcagcagcccggcgccgagctggtgagacccggcgccagcgtgaagctgagctgcaaggccagcggctacagcttcaccacctactggatgaactgggtgaagcagagacccggccagggcctggagtggatcggcatgatccaccccagcgacagcgagaccagactgaaccagaagttcaaggacaaggccaccctgaccgtggacaagagcagcagcaccgcctacatgcagctgagcagccccaccagcgaggacagcgccgtgtactactgcgccagaagcaccatgatcgccaccagagccatggactactggggccagggcaccagcgtgaccgtgagcagcacgcgtgcctctacaaagggaccctccgtgtttcctctggctcccagcagcaagtctacaagcggaggaacagccgctctgggctgcctggtcaaggattactttcccgagcctgtgaccgtgtcctggaatagcggagcactgacaagcggcgtgcacacctttccagccgtgctgcaaagcagcggcctgtactctctgagcagcgtggtcacagtgcctagctctagcctgggcacccagacctacatctgcaatgtgaaccacaagcctagcaacaccaaggtggacaagagagtggaacccaagagctgtgaagtgaaaaccgactccaccgaccacgtgaagcccaaagagacagagaacaccaagcagcccagcaagagctgccacaagcccaaggccatcgtgcacaccgagaaagtgaacatgatgagcctgaccgtgctgggcctgcggatgctgttcgccaaaaccgtggccgtgaacttcctgctgaccgccaagctgttcttcctc

SEQ ID NO: 3048 - DNA, 2772 bp, Artificial Sequence
  Synthetic Polynucloetide
atggccttaccagtgaccgccttgctcctgccgctggccttgctgctccacgccgccaggccggaagtgcagctggttgaatctggcggaggactggttcagcctggcggatctctgagactgtcttgtgccgccagcggcttcagcttcagcgacttttggatgagctgggtccgacaggcccctggcaaaggacttgaatgggtcgccacaatcagccaggccggcagcgagaaggactacgtggactctgtgaagggcagattcaccatcagccgggacaacgccaagaagtccctgtacctccagatgaacagcctgagagccgaggacaccgccgtgtactattgtgcctctggcgtgtacagcttcgactacagaggccagggcaccctggtcacagtctcttctggtaccggcggaggcggatctggcggcggaggtagcggtggcggaggatctgaattccagagcgtgctgacacagcctccatccgtgtctggcgctccaggccagagagtgaccatctcctgtaccggcagcggcagcaacatcggagccccctacgacgtgtcctggtatcagcaactgcctggcaccgcccccaagctgctgatctaccacaacaacaagcggcccagcggcgtgcccgatagattcagcggctctaagagcggcaccagcgccagcctggctatcactggactccaggccgaggacgaggccgactactactgtgccacagtggaagccggcctgagcggctctgtgtttggcggcggaacaaagctgaccgtgctgggagctctcgagggacagcctaaggccaatcctaccgtgacactgttccctccaagcagcgaagaactccaggccaacaaggccacacttgtgtgcctgatctccgacttctaccctggggctgtgacagtggcttggaaggccgatggatctcctgtgaaagccggcgtggaaaccaccaagccatccaagcagagcaacaacaaatacgccgccagctcctacctgagcctgacacctgagcagtggaagtcccacagatcctacagctgccaagtgacccacgaaggcagcaccgtggaaaagacagtggcccctacagagtgcagccccatcaagaccgatgtgattacaatggaccccaaggacaactgctccaaggacgccaacgataccctgctgctccagctgaccaacaccagcgcctactacatgtacttgttgctgctgctgaagtccgtggtgtacttcgccatcatcacatgctgcctgctgcggagaaccgccttctgctgcaacggcgagaagtctagggccaagcgatctggatctggagcaacaaacttctcactactcaaacaagcaggtgacgtggaggagaatcccgggcctactagtatggactggatttggcgcatccttttccttgtcggcgctgctaccggcgcgcattccgggccccagctccagctgcaagagtctggacctggcctggtcaagcctagcgagacactgagcctgacctgtaccgtgtccggcgatagcatcagcagcggcgattactactggggctggatcagacagcctcctggcaaaggactggaatggatcggccacatctactacagcggcgtgacctactacaaccccagcctgaagtccagagtgaccatcagcgtggacaccagccggaaccagttctccctgaagctgtctagcgtgacagccgccgataccgccgtgtactactgcaccagagaggacagcagcaactggcggagtagaggccagggaacactggtcacagttagctctggatccggcggaggcggaagtggaggcggaggatctggcggcggaggctctttcgaacaggtgcaactggtgcagagcggagccgaagtgaagaaacctggggccagcgtgaaggtgtcctgcaaggtgtccggctacaccctgaccgagctgagcattcactgggtgcgccaggcccctggcaagggactggaatggatgggcggcttcgaccccgaagagaacgagatcgtgtacgcccagcggttccagggcagagtgacaatgaccgaggacaccagcaccgacaccgcctacatggaactgagcagcctgcggagcgaggataccgccgtgtactactgcgccatcgtgggcagcttcagccctctgacactgggcctgtggggccagggaactatggtcaccgtgtccagcacgcgtgcctctacaaagggaccctccgtgtttcctctggctcccagcagcaagtctacaagcggaggaacagccgctctgggctgcctggtcaaggattactttcccgagcctgtgaccgtgtcctggaatagcggagcactgacaagcggcgtgcacacctttccagccgtgctgcaaagcagcggcctgtactctctgagcagcgtggtcacagtgcctagctctagcctgggcacccagacctacatctgcaatgtgaaccacaagcctagcaacaccaaggtggacaagagagtggaacccaagagctgtgaagtgaaaaccgactccaccgaccacgtgaagcccaaagagacagagaacaccaagcagcccagcaagagctgccacaagcccaaggccatcgtgcacaccgagaaagtgaacatgatgagcctgaccgtgctgggcctgcggatgctgttcgccaaaaccgtggccgtgaacttcctgctgaccgccaagctgttcttcctc

SEQ ID NO: 3049 - DNA, 2772 bp, Artificial Sequence
  Synthetic Polynucloetide
atggccttaccagtgaccgccttgctcctgccgctggccttgctgctccacgccgccaggccggaagtgcagctggttgaatctggcggaggactggttcagcctggcggatctctgagactgtcttgtgccgccagcggcttcagcttcagcgacttttggatgagctgggtccgacaggcccctggcaaaggacttgaatgggtcgccacaatcagccaggccggcagcgagaaggactacgtggactctgtgaagggcagattcaccatcagccgggacaacgccaagaagtccctgtacctccagatgaacagcctgagagccgaggacaccgccgtgtactattgtgcctctggcgtgtacagcttcgactacagaggccagggcaccctggtcacagtctcttctggtaccggcggaggcggatctggcggcggaggtagcggtggcggaggatctgaattccagagcgtgctgacacagcctccatccgtgtctggcgctccaggccagagagtgaccatctcctgtaccggcagcggcagcaacatcggagccccctacgacgtgtcctggtatcagcaactgcctggcaccgcccccaagctgctgatctaccacaacaacaagcggcccagcggcgtgcccgatagattcagcggctctaagagcggcaccagcgccagcctggctatcactggactccaggccgaggacgaggccgactactactgccagagctacgacagcagcagcatcagcaccatcttcggcggaggcaccaagctgacagtgctgggagctctcgagggacagcctaaggccaatcctaccgtgacactgttccctccaagcagcgaagaactccaggccaacaaggccacacttgtgtgcctgatctccgacttctaccctggggctgtgacagtggcttggaaggccgatggatctcctgtgaaagccggcgtggaaaccaccaagccatccaagcagagcaacaacaaatacgccgccagctcctacctgagcctgacacctgagcagtggaagtcccacagatcctacagctgccaagtgacccacgaaggcagcaccgtggaaaagacagtggcccctacagagtgcagccccatcaagaccgatgtgattacaatggaccccaaggacaactgctccaaggacgccaacgataccctgctgctccagctgaccaacaccagcgcctactacatgtacttgttgctgctgctgaagtccgtggtgtacttcgccatcatcacatgctgcctgctgcggagaaccgccttctgctgcaacggcgagaagtctagggccaagcgatctggatctggagcaacaaacttctcactactcaaacaagcaggtgacgtggaggagaatcccgggcctactagtatggactggatttggcgcatccttttccttgtcggcgctgctaccggcgcgcattccgggccccagctccagctgcaagagtctggacctggcctggtcaagcctagcgagacactgagcctgacctgtaccgtgtccggcgatagcatcagcagcggcgattactactggggctggatcagacagcctcctggcaaaggactggaatggatcggccacatctactacagcggcgtgacctactacaaccccagcctgaagtccagagtgaccatcagcgtggacaccagccggaaccagttctccctgaagctgtctagcgtgacagccgccgataccgccgtgtactactgcaccagagaggacagcagcaactggcggagtagaggccagggaacactggtcacagttagctctggatccggcggaggcggaagtggaggcggaggatctggcggcggaggctctttcgaacaggtgcaactggtgcagagcggagccgaagtgaagaaacctggggccagcgtgaaggtgtcctgcaaggtgtccggctacaccctgaccgagctgagcattcactgggtgcgccaggcccctggcaagggactggaatggatgggcggcttcgaccccgaagagaacgagatcgtgtacgcccagcggttccagggcagagtgacaatgaccgaggacaccagcaccgacaccgcctacatggaactgagcagcctgcggagcgaggataccgccgtgtactactgtgccatcgtgggcagcttcagcggaatcgcctacagaccttggggccagggcacaatggtcaccgtgtctagcacgcgtgcctctacaaagggaccctccgtgtttcctctggctcccagcagcaagtctacaagcggaggaacagccgctctgggctgcctggtcaaggattactttcccgagcctgtgaccgtgtcctggaatagcggagcactgacaagcggcgtgcacacctttccagccgtgctgcaaagcagcggcctgtactctctgagcagcgtggtcacagtgcctagctctagcctgggcacccagacctacatctgcaatgtgaaccacaagcctagcaacaccaaggtggacaagagagtggaacccaagagctgtgaagtgaaaaccgactccaccgaccacgtgaagcccaaagagacagagaacaccaagcagcccagcaagagctgccacaagcccaaggccatcgtgcacaccgagaaagtgaacatgatgagcctgaccgtgctgggcctgcggatgctgttcgccaaaaccgtggccgtgaacttcctgctgaccgccaagctgttcttcctc

SEQ ID NO: 3050 - DNA, 2736 bp, Artificial Sequence
  Synthetic Polynucloetide
atggccttaccagtgaccgccttgctcctgccgctggccttgctgctccacgccgccaggccggaagtgcagctggttgaatctggcggaggactggttcagcctggcggatctctgagactgtcttgtgccgccagcggcttcagcttcagcgacttttggatgagctgggtccgacaggcccctggcaaaggacttgaatgggtcgccacaatcagccaggccggcagcgagaaggactacgtggactctgtgaagggcagattcaccatcagccgggacaacgccaagaagtccctgtacctccagatgaacagcctgagagccgaggacaccgccgtgtactattgtgcctctggcgtgtacagcttcgactacagaggccagggcaccctggtcacagtctcttctggtaccggcggaggcggatctggcggcggaggtagcggtggcggaggatctgaattcgacatccagatgacccagagccccagcagcctgtctgccagcgtgggcgacagagtgaccatcacctgtagagccagccagggcatcagaaacaacctggcctggtatcagcagaagcccggcaaggcccccaagcggctgatctacgccgccagcaatctccagagcggcgtgcccagcagattcacaggctctggcagcggcaccgagttcaccctgatcgtgtctagcctccagcccgaggacttcgccacctactactgcctccagcaccacagctaccccctgacatctggcggaggcaccaaggtggaactcgagggacagcctaaggccaatcctaccgtgacactgttccctccaagcagcgaagaactccaggccaacaaggccacacttgtgtgcctgatctccgacttctaccctggggctgtgacagtggcttggaaggccgatggatctcctgtgaaagccggcgtggaaaccaccaagccatccaagcagagcaacaacaaatacgccgccagctcctacctgagcctgacacctgagcagtggaagtcccacagatcctacagctgccaagtgacccacgaaggcagcaccgtggaaaagacagtggcccctacagagtgcagccccatcaagaccgatgtgattacaatggaccccaaggacaactgctccaaggacgccaacgataccctgctgctccagctgaccaacaccagcgcctactacatgtacttgttgctgctgctgaagtccgtggtgtacttcgccatcatcacatgctgcctgctgcggagaaccgccttctgctgcaacggcgagaagtctagggccaagcgatctggatctggagcaacaaacttctcactactcaaacaagcaggtgacgtggaggagaatcccgggcctactagtatggactggatttggcgcatccttttccttgtcggcgctgctaccggcgcgcattccgggccccagctccagctgcaagagtctggacctggcctggtcaagcctagcgagacactgagcctgacctgtaccgtgtccggcgatagcatcagcagcggcgattactactggggctggatcagacagcctcctggcaaaggactggaatggatcggccacatctactacagcggcgtgacctactacaaccccagcctgaagtccagagtgaccatcagcgtggacaccagccggaaccagttctccctgaagctgtctagcgtgacagccgccgataccgccgtgtactactgcaccagagaggacagcagcaactggcggagtagaggccagggaacactggtcacagttagctctggatccggcggaggcggaagtggaggcggaggatctggcggcggaggctctttcgaagaggtgcaggtgctggaaagtggcggaggactggtgcagcctggcggctctctgagactgtcttgtgccgccagcggcttcaccttcagcagctacgccatgagctgggtgcgccaggcccctggaaaaggactggaatgggtgtccgccatcagcggctctggcgggtctaccaactacgccgatagcgtgaagggccggttcaccatcagccgggacaacagcaagaacaccctgtacctccagatgaacagcctgcgggccgaggacaccgccgtgtattattgtgccggcagcagcgggtggagcgagtattggggacagggcaccctcgtgaccgtgtcctctacgcgtgcctctacaaagggaccctccgtgtttcctctggctcccagcagcaagtctacaagcggaggaacagccgctctgggctgcctggtcaaggattactttcccgagcctgtgaccgtgtcctggaatagcggagcactgacaagcggcgtgcacacctttccagccgtgctgcaaagcagcggcctgtactctctgagcagcgtggtcacagtgcctagctctagcctgggcacccagacctacatctgcaatgtgaaccacaagcctagcaacaccaaggtggacaagagagtggaacccaagagctgtgaagtgaaaaccgactccaccgaccacgtgaagcccaaagagacagagaacaccaagcagcccagcaagagctgccacaagcccaaggccatcgtgcacaccgagaaagtgaacatgatgagcctgaccgtgctgggcctgcggatgctgttcgccaaaaccgtggccgtgaacttcctgctgaccgccaagctgttcttcctc

SEQ ID NO: 3051 - DNA, 2754 bp, Artificial Sequence
  Synthetic Polynucloetide
atggccttaccagtgaccgccttgctcctgccgctggccttgctgctccacgccgccaggccggaagtgcagctggttgaatctggcggaggactggttcagcctggcggatctctgagactgtcttgtgccgccagcggcttcagcttcagcgacttttggatgagctgggtccgacaggcccctggcaaaggacttgaatgggtcgccacaatcagccaggccggcagcgagaaggactacgtggactctgtgaagggcagattcaccatcagccgggacaacgccaagaagtccctgtacctccagatgaacagcctgagagccgaggacaccgccgtgtactattgtgcctctggcgtgtacagcttcgactacagaggccagggcaccctggtcacagtctcttctggtaccggcggaggcggatctggcggcggaggtagcggtggcggaggatctgaattcgacgagatccagctggtgcagagcggagccgaagtgaagaagcctggcgagagcctgcggatcagctgcaagggcagcggcttcaacatcgaggactactacatccactgggtgcgccagatgcccggcaagggcctggaatggatgggcagaatcgaccccgagaacgacgagactaagtacggccccatcttccagggccacgtgaccatcagcgccgacaccagcatcaacaccgtgtacctccagtggtccagcctgaaggccagcgacaccgccatgtactactgcgcctttagaggcggcgtgtactggggccagggcaccacagtgacagtgtctagcctcgagggacagcctaaggccaatcctaccgtgacactgttccctccaagcagcgaagaactccaggccaacaaggccacacttgtgtgcctgatctccgacttctaccctggggctgtgacagtggcttggaaggccgatggatctcctgtgaaagccggcgtggaaaccaccaagccatccaagcagagcaacaacaaatacgccgccagctcctacctgagcctgacacctgagcagtggaagtcccacagatcctacagctgccaagtgacccacgaaggcagcaccgtggaaaagacagtggcccctacagagtgcagccccatcaagaccgatgtgattacaatggaccccaaggacaactgctccaaggacgccaacgataccctgctgctccagctgaccaacaccagcgcctactacatgtacttgttgctgctgctgaagtccgtggtgtacttcgccatcatcacatgctgcctgctgcggagaaccgccttctgctgcaacggcgagaagtctagggccaagcgatctggatctggagcaacaaacttctcactactcaaacaagcaggtgacgtggaggagaatcccgggcctactagtatggactggatttggcgcatccttttccttgtcggcgctgctaccggcgcgcattccgggccccagctccagctgcaagagtctggacctggcctggtcaagcctagcgagacactgagcctgacctgtaccgtgtccggcgatagcatcagcagcggcgattactactggggctggatcagacagcctcctggcaaaggactggaatggatcggccacatctactacagcggcgtgacctactacaaccccagcctgaagtccagagtgaccatcagcgtggacaccagccggaaccagttctccctgaagctgtctagcgtgacagccgccgataccgccgtgtactactgcaccagagaggacagcagcaactggcggagtagaggccagggaacactggtcacagttagctctggatccggcggaggcggaagtggaggcggaggatctggcggcggaggctctttcgaagatgtcgtgatgacccagagccccgacagcctggctgtgtctctgggagagagagccaccatcaactgcaagtccagccagtccctgctggacagcgacggcaagacctacctgaactggctccagcagaagcccggccagccccccaagagactgatctccctggtgtccaagctggactccggcgtgcccgatagattttccggctctggcagcggcaccgacttcaccctgacaatcagctcccttcaggccgaggacgtggccgtgtactattgctggcagggcacacacttccccggcacctttggcggaggcaccaaggtggaaatcaagacgcgtgcctctacaaagggaccctccgtgtttcctctggctcccagcagcaagtctacaagcggaggaacagccgctctgggctgcctggtcaaggattactttcccgagcctgtgaccgtgtcctggaatagcggagcactgacaagcggcgtgcacacctttccagccgtgctgcaaagcagcggcctgtactctctgagcagcgtggtcacagtgcctagctctagcctgggcacccagacctacatctgcaatgtgaaccacaagcctagcaacaccaaggtggacaagagagtggaacccaagagctgtgaagtgaaaaccgactccaccgaccacgtgaagcccaaagagacagagaacaccaagcagcccagcaagagctgccacaagcccaaggccatcgtgcacaccgagaaagtgaacatgatgagcctgaccgtgctgggcctgcggatgctgttcgccaaaaccgtggccgtgaacttcctgctgaccgccaagctgttcttcctc

SEQ ID NO: 3052 - DNA, 2775 bp, Artificial Sequence
  Synthetic Polynucloetide
atggccttaccagtgaccgccttgctcctgccgctggccttgctgctccacgccgccaggccggaagtgcagctggttgaatctggcggaggactggttcagcctggcggatctctgagactgtcttgtgccgccagcggcttcagcttcagcgacttttggatgagctgggtccgacaggcccctggcaaaggacttgaatgggtcgccacaatcagccaggccggcagcgagaaggactacgtggactctgtgaagggcagattcaccatcagccgggacaacgccaagaagtccctgtacctccagatgaacagcctgagagccgaggacaccgccgtgtactattgtgcctctggcgtgtacagcttcgactacagaggccagggcaccctggtcacagtctcttctggtaccggcggaggcggatctggcggcggaggtagcggtggcggaggatctgaattcgacgagcttgtgatgacccagagccccagcagcctgacagtgacagccggcgagaaagtgaccatgagctgcaagagcagccagagcctgctgaacagcggcaaccagaagaactacctgacctggtatcagcagaagcccggccagccccccaagctgctgatctactgggccagcaccagagaaagcggcgtgcccgatagattcaccggctctggcagcggcaccgacttcaccctgacaatcagcagcgtgcaggccgaggacctggccgtgtactactgccagaacgactacagctaccccctgaccttcggagccggcaccaagctggaaatcaagctcgagggacagcctaaggccaatcctaccgtgacactgttccctccaagcagcgaagaactccaggccaacaaggccacacttgtgtgcctgatctccgacttctaccctggggctgtgacagtggcttggaaggccgatggatctcctgtgaaagccggcgtggaaaccaccaagccatccaagcagagcaacaacaaatacgccgccagctcctacctgagcctgacacctgagcagtggaagtcccacagatcctacagctgccaagtgacccacgaaggcagcaccgtggaaaagacagtggcccctacagagtgcagccccatcaagaccgatgtgattacaatggaccccaaggacaactgctccaaggacgccaacgataccctgctgctccagctgaccaacaccagcgcctactacatgtacttgttgctgctgctgaagtccgtggtgtacttcgccatcatcacatgctgcctgctgcggagaaccgccttctgctgcaacggcgagaagtctagggccaagcgatctggatctggagcaacaaacttctcactactcaaacaagcaggtgacgtggaggagaatcccgggcctactagtatggactggatttggcgcatccttttccttgtcggcgctgctaccggcgcgcattccgggccccagctccagctgcaagagtctggacctggcctggtcaagcctagcgagacactgagcctgacctgtaccgtgtccggcgatagcatcagcagcggcgattactactggggctggatcagacagcctcctggcaaaggactggaatggatcggccacatctactacagcggcgtgacctactacaaccccagcctgaagtccagagtgaccatcagcgtggacaccagccggaaccagttctccctgaagctgtctagcgtgacagccgccgataccgccgtgtactactgcaccagagaggacagcagcaactggcggagtagaggccagggaacactggtcacagttagctctggatccggcggaggcggaagtggaggcggaggatctggcggcggaggctctttcgaagaagtgcagctgctggaacagtctggcgccgaacttgtgcggcctggcaccagcgtgaagatcagctgtaaagccagcggctacgccttcaccaactactggctgggctgggtcaagcagaggcctggacacggcctggaatggatcggcgacatctttcccggctccggcaacatccactacaacgagaagttcaagggcaaggccaccctgaccgccgacaagtctagcagcaccgcctacatgcagctgtccagcctgacctttgaggacagcgccgtgtatttctgtgcccggctgcggaactgggacgagcccatggattattggggccagggcaccaccgtgaccgtgtctagtacgcgtgcctctacaaagggaccctccgtgtttcctctggctcccagcagcaagtctacaagcggaggaacagccgctctgggctgcctggtcaaggattactttcccgagcctgtgaccgtgtcctggaatagcggagcactgacaagcggcgtgcacacctttccagccgtgctgcaaagcagcggcctgtactctctgagcagcgtggtcacagtgcctagctctagcctgggcacccagacctacatctgcaatgtgaaccacaagcctagcaacaccaaggtggacaagagagtggaacccaagagctgtgaagtgaaaaccgactccaccgaccacgtgaagcccaaagagacagagaacaccaagcagcccagcaagagctgccacaagcccaaggccatcgtgcacaccgagaaagtgaacatgatgagcctgaccgtgctgggcctgcggatgctgttcgccaaaaccgtggccgtgaacttcctgctgaccgccaagctgttcttcctc

SEQ ID NO: 3053 - DNA, 2778 bp, Artificial Sequence
  Synthetic Polynucloetide
atggccttaccagtgaccgccttgctcctgccgctggccttgctgctccacgccgccaggccggaagtgcagctggttgaatctggcggaggactggttcagcctggcggatctctgagactgtcttgtgccgccagcggcttcagcttcagcgacttttggatgagctgggtccgacaggcccctggcaaaggacttgaatgggtcgccacaatcagccaggccggcagcgagaaggactacgtggactctgtgaagggcagattcaccatcagccgggacaacgccaagaagtccctgtacctccagatgaacagcctgagagccgaggacaccgccgtgtactattgtgcctctggcgtgtacagcttcgactacagaggccagggcaccctggtcacagtctcttctggtaccggcggaggcggatctggcggcggaggtagcggtggcggaggatctgaattcgacgagctgcagatgacccagagccctagcagcctgtctgccagcgtgggcgacagagtgaccatcacctgtagagccagccagagcatcagcagctacctgaactggtatcagcagaagcccggccagccccccaaactgctgatctactgggccagcaccagagaaagcggcgtgcccgatagattcagcggcagcgagagcggcaccaactacaccctgaccatcagctccctgcagcccgaggacttcgccacctacttttgccagcagagcgacagcctgcccatcacctttggacagggcacccggctggacattcagctcgagggacagcctaaggccaatcctaccgtgacactgttccctccaagcagcgaagaactccaggccaacaaggccacacttgtgtgcctgatctccgacttctaccctggggctgtgacagtggcttggaaggccgatggatctcctgtgaaagccggcgtggaaaccaccaagccatccaagcagagcaacaacaaatacgccgccagctcctacctgagcctgacacctgagcagtggaagtcccacagatcctacagctgccaagtgacccacgaaggcagcaccgtggaaaagacagtggcccctacagagtgcagccccatcaagaccgatgtgattacaatggaccccaaggacaactgctccaaggacgccaacgataccctgctgctccagctgaccaacaccagcgcctactacatgtacttgttgctgctgctgaagtccgtggtgtacttcgccatcatcacatgctgcctgctgcggagaaccgccttctgctgcaacggcgagaagtctagggccaagcgatctggatctggagcaacaaacttctcactactcaaacaagcaggtgacgtggaggagaatcccgggcctactagtatggactggatttggcgcatccttttccttgtcggcgctgctaccggcgcgcattccgggccccagctccagctgcaagagtctggacctggcctggtcaagcctagcgagacactgagcctgacctgtaccgtgtccggcgatagcatcagcagcggcgattactactggggctggatcagacagcctcctggcaaaggactggaatggatcggccacatctactacagcggcgtgacctactacaaccccagcctgaagtccagagtgaccatcagcgtggacaccagccggaaccagttctccctgaagctgtctagcgtgacagccgccgataccgccgtgtactactgcaccagagaggacagcagcaactggcggagtagaggccagggaacactggtcacagttagctctggatccggcggaggcggaagtggaggcggaggatctggcggcggaggctctttcgaagaggtgcaactgctggaatctgggggcggagtggtgcagcctggcagaagcctgagactgagctgtgccgccagcggcttcaccttcagctcctacggaatgcactgggtgcgccaggcccctggcaaaggactggaatgggtggccgtgatctcctacgacggcagcaacaagtactacgccgacagcgtgaagggccggttcaccatcagccgggacaacagcaagaacaccctgtacctgcagatgaacagcctgcgggccgaggacaccgccgtgtactactgcgccaaggatatgggctggggcagcggctggcggccttactactactacggcatggacgtgtggggccagggcaccaccgtgacagtgtcatctacgcgtgcctctacaaagggaccctccgtgtttcctctggctcccagcagcaagtctacaagcggaggaacagccgctctgggctgcctggtcaaggattactttcccgagcctgtgaccgtgtcctggaatagcggagcactgacaagcggcgtgcacacctttccagccgtgctgcaaagcagcggcctgtactctctgagcagcgtggtcacagtgcctagctctagcctgggcacccagacctacatctgcaatgtgaaccacaagcctagcaacaccaaggtggacaagagagtggaacccaagagctgtgaagtgaaaaccgactccaccgaccacgtgaagcccaaagagacagagaacaccaagcagcccagcaagagctgccacaagcccaaggccatcgtgcacaccgagaaagtgaacatgatgagcctgaccgtgctgggcctgcggatgctgttcgccaaaaccgtggccgtgaacttcctgctgaccgccaagctgttcttcctc

SEQ ID NO: 3054 - DNA, 2769 bp, Artificial Sequence
  Synthetic Polynucloetide
atggccttaccagtgaccgccttgctcctgccgctggccttgctgctccacgccgccaggccggaagtgcagctggttgaatctggcggaggactggttcagcctggcggatctctgagactgtcttgtgccgccagcggcttcagcttcagcgacttttggatgagctgggtccgacaggcccctggcaaaggacttgaatgggtcgccacaatcagccaggccggcagcgagaaggactacgtggactctgtgaagggcagattcaccatcagccgggacaacgccaagaagtccctgtacctccagatgaacagcctgagagccgaggacaccgccgtgtactattgtgcctctggcgtgtacagcttcgactacagaggccagggcaccctggtcacagtctcttctggtaccggcggaggcggatctggcggcggaggtagcggtggcggaggatctgaattcgacgacatccaaatgacacagagtccttctagtttgagtgcgagcgtgggggacagggtgaccattacctgcagggccagccagagcataagctcataccttaattggtaccagcaaaaaccaggtaaggcccctaagctcctgatctacgcggcctcttcacttcaatctggggtcccttcccgcttcagtggctccggcagcggcaccgacttcacgctcactatatcaagtctgcagcctgaggatctcgccacctattactgtcaacaaagttattccacccctttcacctttggaccgggcacgaaagtggatattaagctcgagggacagcctaaggccaatcctaccgtgacactgttccctccaagcagcgaagaactccaggccaacaaggccacacttgtgtgcctgatctccgacttctaccctggggctgtgacagtggcttggaaggccgatggatctcctgtgaaagccggcgtggaaaccaccaagccatccaagcagagcaacaacaaatacgccgccagctcctacctgagcctgacacctgagcagtggaagtcccacagatcctacagctgccaagtgacccacgaaggcagcaccgtggaaaagacagtggcccctacagagtgcagccccatcaagaccgatgtgattacaatggaccccaaggacaactgctccaaggacgccaacgataccctgctgctccagctgaccaacaccagcgcctactacatgtacttgttgctgctgctgaagtccgtggtgtacttcgccatcatcacatgctgcctgctgcggagaaccgccttctgctgcaacggcgagaagtctagggccaagcgatctggatctggagcaacaaacttctcactactcaaacaagcaggtgacgtggaggagaatcccgggcctactagtatggactggatttggcgcatccttttccttgtcggcgctgctaccggcgcgcattccgggccccagctccagctgcaagagtctggacctggcctggtcaagcctagcgagacactgagcctgacctgtaccgtgtccggcgatagcatcagcagcggcgattactactggggctggatcagacagcctcctggcaaaggactggaatggatcggccacatctactacagcggcgtgacctactacaaccccagcctgaagtccagagtgaccatcagcgtggacaccagccggaaccagttctccctgaagctgtctagcgtgacagccgccgataccgccgtgtactactgcaccagagaggacagcagcaactggcggagtagaggccagggaacactggtcacagttagctctggatccggcggaggcggaagtggaggcggaggatctggcggcggaggctctttcgaagtgcacgaggtccagcttgtgcagtccggggcagaggtcaagaagcctggttctagcgtaaaagtgagttgcaaagcctcaggtgggacattttcatcctacgcgatcagttgggttagacaggctcctggtcaagggctggaatggatgggcggaattattccaatcttcggaacagcgaattacgcgcagaagttccagggtagagtaaccatcactgctgacaagtccacctccaccgcatacatggaattgtctagtctccggagcgaggatacggcggtgtattattgtgctacgttcgccctgtttggcttccgcgaacaggctttcgacatctgggggcagggcacgacagtcacggttagtagtacgcgtgcctctacaaagggaccctccgtgtttcctctggctcccagcagcaagtctacaagcggaggaacagccgctctgggctgcctggtcaaggattactttcccgagcctgtgaccgtgtcctggaatagcggagcactgacaagcggcgtgcacacctttccagccgtgctgcaaagcagcggcctgtactctctgagcagcgtggtcacagtgcctagctctagcctgggcacccagacctacatctgcaatgtgaaccacaagcctagcaacaccaaggtggacaagagagtggaacccaagagctgtgaagtgaaaaccgactccaccgaccacgtgaagcccaaagagacagagaacaccaagcagcccagcaagagctgccacaagcccaaggccatcgtgcacaccgagaaagtgaacatgatgagcctgaccgtgctgggcctgcggatgctgttcgccaaaaccgtggccgtgaacttcctgctgaccgccaagctgttcttcctc

SEQ ID NO: 3055 - DNA, 2763 bp, Artificial Sequence
  Synthetic Polynucloetide
atggccttaccagtgaccgccttgctcctgccgctggccttgctgctccacgccgccaggccggaagtgcagctggttgaatctggcggaggactggttcagcctggcggatctctgagactgtcttgtgccgccagcggcttcagcttcagcgacttttggatgagctgggtccgacaggcccctggcaaaggacttgaatgggtcgccacaatcagccaggccggcagcgagaaggactacgtggactctgtgaagggcagattcaccatcagccgggacaacgccaagaagtccctgtacctccagatgaacagcctgagagccgaggacaccgccgtgtactattgtgcctctggcgtgtacagcttcgactacagaggccagggcaccctggtcacagtctcttctggtaccggcggaggcggatctggcggcggaggtagcggtggcggaggatctgaattcgacatcgtgctgacccagagccctctgagcctggccgtgtctctgggacagcctgccatcatcagctgcaaggccagccagagcgtgtcctttgccggcacctctctgatgcactggtatcaccagaagcccggccagcagcccagactgctgatctacagagccagcaacctggaagccggcgtgcccgatagattttccggcagcggcagcaagaccgacttcaccctgaccatcagccccgtggaagccgaagatgccgccacctactactgccagcagagcagagagtacccctacaccttcggcggaggcaccaagctggaaatcaagaggctcgagggacagcctaaggccaatcctaccgtgacactgttccctccaagcagcgaagaactccaggccaacaaggccacacttgtgtgcctgatctccgacttctaccctggggctgtgacagtggcttggaaggccgatggatctcctgtgaaagccggcgtggaaaccaccaagccatccaagcagagcaacaacaaatacgccgccagctcctacctgagcctgacacctgagcagtggaagtcccacagatcctacagctgccaagtgacccacgaaggcagcaccgtggaaaagacagtggcccctacagagtgcagccccatcaagaccgatgtgattacaatggaccccaaggacaactgctccaaggacgccaacgataccctgctgctccagctgaccaacaccagcgcctactacatgtacttgttgctgctgctgaagtccgtggtgtacttcgccatcatcacatgctgcctgctgcggagaaccgccttctgctgcaacggcgagaagtctagggccaagcgatctggatctggagcaacaaacttctcactactcaaacaagcaggtgacgtggaggagaatcccgggcctactagtatggactggatttggcgcatccttttccttgtcggcgctgctaccggcgcgcattccgggccccagctccagctgcaagagtctggacctggcctggtcaagcctagcgagacactgagcctgacctgtaccgtgtccggcgatagcatcagcagcggcgattactactggggctggatcagacagcctcctggcaaaggactggaatggatcggccacatctactacagcggcgtgacctactacaaccccagcctgaagtccagagtgaccatcagcgtggacaccagccggaaccagttctccctgaagctgtctagcgtgacagccgccgataccgccgtgtactactgcaccagagaggacagcagcaactggcggagtagaggccagggaacactggtcacagttagctctggatccggcggaggcggaagtggaggcggaggatctggcggcggaggctctttcgaacaggtccaactggtgcagagcggagccgaggtcgtgaagcctggcgcttccgtgaagattagctgcaaagccagcggctacacctttaccggctactttatgaactgggtcaagcagagccctggccagagcctggaatggatcggcagaatccacccctacgacggcgacaccttctacaaccagaagttccagggcaaggccaccctgacagtggacaagagcagcaacaccgcccacatggaactgctgagcctgaccagcgaggacttcgccgtgtactactgcaccagatacgacggcagccgggctatggactattggggccagggcaccaccgtgaccgtgtctagtacgcgtgcctctacaaagggaccctccgtgtttcctctggctcccagcagcaagtctacaagcggaggaacagccgctctgggctgcctggtcaaggattactttcccgagcctgtgaccgtgtcctggaatagcggagcactgacaagcggcgtgcacacctttccagccgtgctgcaaagcagcggcctgtactctctgagcagcgtggtcacagtgcctagctctagcctgggcacccagacctacatctgcaatgtgaaccacaagcctagcaacaccaaggtggacaagagagtggaacccaagagctgtgaagtgaaaaccgactccaccgaccacgtgaagcccaaagagacagagaacaccaagcagcccagcaagagctgccacaagcccaaggccatcgtgcacaccgagaaagtgaacatgatgagcctgaccgtgctgggcctgcggatgctgttcgccaaaaccgtggccgtgaacttcctgctgaccgccaagctgttcttcctc

SEQ ID NO: 3056 - DNA, 2754 bp, Artificial Sequence
  Synthetic Polynucloetide
atggccttaccagtgaccgccttgctcctgccgctggccttgctgctccacgccgccaggccggaagtgcagctggttgaatctggcggaggactggttcagcctggcggatctctgagactgtcttgtgccgccagcggcttcagcttcagcgacttttggatgagctgggtccgacaggcccctggcaaaggacttgaatgggtcgccacaatcagccaggccggcagcgagaaggactacgtggactctgtgaagggcagattcaccatcagccgggacaacgccaagaagtccctgtacctccagatgaacagcctgagagccgaggacaccgccgtgtactattgtgcctctggcgtgtacagcttcgactacagaggccagggcaccctggtcacagtctcttctggtaccggcggaggcggatctggcggcggaggtagcggtggcggaggatctgaattcgacgacgttgtgatgacccagacccccctgagcctgcctgtgacacctggcgaacctgccagcatcagctgtcggagcagccagagcctggtgcacagaaacggcaacacctacctgcactggtatctccagaagcccggccagagccccaagctgctgatccacaaggtgtccaacagattcagcggcgtgcccgacagattctccggcagcggctctggcaccgacttcaccctgaagatcagccgggtggaagccgaggacctgggcgtgtacttctgtagccagagcacccatgtgccccccctgacatttggagccggcaccaagctggaactgaagctcgagggacagcctaaggccaatcctaccgtgacactgttccctccaagcagcgaagaactccaggccaacaaggccacacttgtgtgcctgatctccgacttctaccctggggctgtgacagtggcttggaaggccgatggatctcctgtgaaagccggcgtggaaaccaccaagccatccaagcagagcaacaacaaatacgccgccagctcctacctgagcctgacacctgagcagtggaagtcccacagatcctacagctgccaagtgacccacgaaggcagcaccgtggaaaagacagtggcccctacagagtgcagccccatcaagaccgatgtgattacaatggaccccaaggacaactgctccaaggacgccaacgataccctgctgctccagctgaccaacaccagcgcctactacatgtacttgttgctgctgctgaagtccgtggtgtacttcgccatcatcacatgctgcctgctgcggagaaccgccttctgctgcaacggcgagaagtctagggccaagcgatctggatctggagcaacaaacttctcactactcaaacaagcaggtgacgtggaggagaatcccgggcctactagtatggactggatttggcgcatccttttccttgtcggcgctgctaccggcgcgcattccgggccccagctccagctgcaagagtctggacctggcctggtcaagcctagcgagacactgagcctgacctgtaccgtgtccggcgatagcatcagcagcggcgattactactggggctggatcagacagcctcctggcaaaggactggaatggatcggccacatctactacagcggcgtgacctactacaaccccagcctgaagtccagagtgaccatcagcgtggacaccagccggaaccagttctccctgaagctgtctagcgtgacagccgccgataccgccgtgtactactgcaccagagaggacagcagcaactggcggagtagaggccagggaacactggtcacagttagctctggatccggcggaggcggaagtggaggcggaggatctggcggcggaggctctttcgaagaagtgcagctggtgcagtctggcgctgaggtggaaaagcctggggccagcgtgaagattagctgcaaggccagcggcagcagcttcaccggctacaacatgaactgggtgcgccagaacatcggcaagagcctggaatggatcggagccatcgacccctactacggcggcaccagctacaaccagaagttcaagggcagagccaccctgaccgtggacaagagcaccagcaccgcctacatgcacctgaagtccctgcggagcgaggacaccgccgtgtactactgtgtgtccggcatggaatattggggccagggcaccagcgtgaccgtgtctagtacgcgtgcctctacaaagggaccctccgtgtttcctctggctcccagcagcaagtctacaagcggaggaacagccgctctgggctgcctggtcaaggattactttcccgagcctgtgaccgtgtcctggaatagcggagcactgacaagcggcgtgcacacctttccagccgtgctgcaaagcagcggcctgtactctctgagcagcgtggtcacagtgcctagctctagcctgggcacccagacctacatctgcaatgtgaaccacaagcctagcaacaccaaggtggacaagagagtggaacccaagagctgtgaagtgaaaaccgactccaccgaccacgtgaagcccaaagagacagagaacaccaagcagcccagcaagagctgccacaagcccaaggccatcgtgcacaccgagaaagtgaacatgatgagcctgaccgtgctgggcctgcggatgctgttcgccaaaaccgtggccgtgaacttcctgctgaccgccaagctgttcttcctc

SEQ ID NO: 3057 - DNA, 2748 bp, Artificial Sequence
  Synthetic Polynucloetide
atggccttaccagtgaccgccttgctcctgccgctggccttgctgctccacgccgccaggccggaagtgcagctggttgaatctggcggaggactggttcagcctggcggatctctgagactgtcttgtgccgccagcggcttcagcttcagcgacttttggatgagctgggtccgacaggcccctggcaaaggacttgaatgggtcgccacaatcagccaggccggcagcgagaaggactacgtggactctgtgaagggcagattcaccatcagccgggacaacgccaagaagtccctgtacctccagatgaacagcctgagagccgaggacaccgccgtgtactattgtgcctctggcgtgtacagcttcgactacagaggccagggcaccctggtcacagtctcttctggtaccggcggaggcggatctggcggcggaggtagcggtggcggaggatctgaattcgacgagatcgtgatgacccagacccctgccaccctgtctgtgtctgccggcgagagagtgaccattacctgcaaggccagccagagcgtgtccaacgacgtgacctggtatcagcagaagcccggccaggcccccagactgctgatctacagcgccagcaacagatacagcggcgtgcccgccagattttccggcagcggctacggcaccgagttcaccttcaccatcagcagcgtgcagagcgaggacttcgccgtgtacttctgtcagcaagactacagcagcttcggccagggcaccaagctggaaatcaagaggctcgagggacagcctaaggccaatcctaccgtgacactgttccctccaagcagcgaagaactccaggccaacaaggccacacttgtgtgcctgatctccgacttctaccctggggctgtgacagtggcttggaaggccgatggatctcctgtgaaagccggcgtggaaaccaccaagccatccaagcagagcaacaacaaatacgccgccagctcctacctgagcctgacacctgagcagtggaagtcccacagatcctacagctgccaagtgacccacgaaggcagcaccgtggaaaagacagtggcccctacagagtgcagccccatcaagaccgatgtgattacaatggaccccaaggacaactgctccaaggacgccaacgataccctgctgctccagctgaccaacaccagcgcctactacatgtacttgttgctgctgctgaagtccgtggtgtacttcgccatcatcacatgctgcctgctgcggagaaccgccttctgctgcaacggcgagaagtctagggccaagcgatctggatctggagcaacaaacttctcactactcaaacaagcaggtgacgtggaggagaatcccgggcctactagtatggactggatttggcgcatccttttccttgtcggcgctgctaccggcgcgcattccgggccccagctccagctgcaagagtctggacctggcctggtcaagcctagcgagacactgagcctgacctgtaccgtgtccggcgatagcatcagcagcggcgattactactggggctggatcagacagcctcctggcaaaggactggaatggatcggccacatctactacagcggcgtgacctactacaaccccagcctgaagtccagagtgaccatcagcgtggacaccagccggaaccagttctccctgaagctgtctagcgtgacagccgccgataccgccgtgtactactgcaccagagaggacagcagcaactggcggagtagaggccagggaacactggtcacagttagctctggatccggcggaggcggaagtggaggcggaggatctggcggcggaggctctttcgaacaggtgcagctggtggaatctggacctggcgtggtgcagcctggcagaagcctgagaatcagctgtgccgtgtccggcttcagcgtgaccaactacggcgtgcactgggtgcgccagccacctggaaaaggactggaatggctgggcgtgatctgggctggcggcatcaccaactacaacagcgccttcatgtcccggctgaccatctccaaggacaacagcaagaacaccgtgtacctccagatgaacagcctgcgggccgaggacaccgccatgtactactgtgcttccagaggcggccactacggctacgccctggattattggggccagggaaccctcgtgaccgtgtcctctacgcgtgcctctacaaagggaccctccgtgtttcctctggctcccagcagcaagtctacaagcggaggaacagccgctctgggctgcctggtcaaggattactttcccgagcctgtgaccgtgtcctggaatagcggagcactgacaagcggcgtgcacacctttccagccgtgctgcaaagcagcggcctgtactctctgagcagcgtggtcacagtgcctagctctagcctgggcacccagacctacatctgcaatgtgaaccacaagcctagcaacaccaaggtggacaagagagtggaacccaagagctgtgaagtgaaaaccgactccaccgaccacgtgaagcccaaagagacagagaacaccaagcagcccagcaagagctgccacaagcccaaggccatcgtgcacaccgagaaagtgaacatgatgagcctgaccgtgctgggcctgcggatgctgttcgccaaaaccgtggccgtgaacttcctgctgaccgccaagctgttcttcctc

SEQ ID NO: 3058 - DNA, 2754 bp, Artificial Sequence
  Synthetic Polynucloetide
atggccttaccagtgaccgccttgctcctgccgctggccttgctgctccacgccgccaggccggaagtgcagctggttgaatctggcggaggactggttcagcctggcggatctctgagactgtcttgtgccgccagcggcttcagcttcagcgacttttggatgagctgggtccgacaggcccctggcaaaggacttgaatgggtcgccacaatcagccaggccggcagcgagaaggactacgtggactctgtgaagggcagattcaccatcagccgggacaacgccaagaagtccctgtacctccagatgaacagcctgagagccgaggacaccgccgtgtactattgtgcctctggcgtgtacagcttcgactacagaggccagggcaccctggtcacagtctcttctggtaccggcggaggcggatctggcggcggaggtagcggtggcggaggatctgaattcgacatccagatgacccagaccgccagcagcctgcctgcctctctgggcgacagagtgaccatctcctgtagcgccagccaggacatcagcaactacctgaactggtatcagcagaaacccgacggcaccgtgaagctgctgatcttctacagcagcaacctgcacagcggcgtgcccagcagattttctggcggcggaagcggcaccgactacagcctgaccatcagcaatctggaacccgaggacattgccacctacttttgccaccagtacagcaagctgccctggacctttggcggaggcaccaagctggaaatcaagagactcgagggacagcctaaggccaatcctaccgtgacactgttccctccaagcagcgaagaactccaggccaacaaggccacacttgtgtgcctgatctccgacttctaccctggggctgtgacagtggcttggaaggccgatggatctcctgtgaaagccggcgtggaaaccaccaagccatccaagcagagcaacaacaaatacgccgccagctcctacctgagcctgacacctgagcagtggaagtcccacagatcctacagctgccaagtgacccacgaaggcagcaccgtggaaaagacagtggcccctacagagtgcagccccatcaagaccgatgtgattacaatggaccccaaggacaactgctccaaggacgccaacgataccctgctgctccagctgaccaacaccagcgcctactacatgtacttgttgctgctgctgaagtccgtggtgtacttcgccatcatcacatgctgcctgctgcggagaaccgccttctgctgcaacggcgagaagtctagggccaagcgatctggatctggagcaacaaacttctcactactcaaacaagcaggtgacgtggaggagaatcccgggcctactagtatggactggatttggcgcatccttttccttgtcggcgctgctaccggcgcgcattccgggccccagctccagctgcaagagtctggacctggcctggtcaagcctagcgagacactgagcctgacctgtaccgtgtccggcgatagcatcagcagcggcgattactactggggctggatcagacagcctcctggcaaaggactggaatggatcggccacatctactacagcggcgtgacctactacaaccccagcctgaagtccagagtgaccatcagcgtggacaccagccggaaccagttctccctgaagctgtctagcgtgacagccgccgataccgccgtgtactactgcaccagagaggacagcagcaactggcggagtagaggccagggaacactggtcacagttagctctggatccggcggaggcggaagtggaggcggaggatctggcggcggaggctctttcgaagaagtgaccctggtggaaagcggcggagacttcgtgaagcctggcggctctctgaaggtgtcctgtgccgccagcggcttcgcctttagccactacgccatgagctgggtgcgccagacccctgccaagagactggaatgggtggcctacatcagcagcggcggctccggcacctactactccgatagcgtgaagggccggttcaccatcagccgggacaacgccaagaacaccctgtacctccagatgcggagcctgcggagcgaggacagcgccatgtatttctgcaccagagtgaagctgggcacctattacttcgactcttggggccagggcaccaccctgaccgtgtcatctacgcgtgcctctacaaagggaccctccgtgtttcctctggctcccagcagcaagtctacaagcggaggaacagccgctctgggctgcctggtcaaggattactttcccgagcctgtgaccgtgtcctggaatagcggagcactgacaagcggcgtgcacacctttccagccgtgctgcaaagcagcggcctgtactctctgagcagcgtggtcacagtgcctagctctagcctgggcacccagacctacatctgcaatgtgaaccacaagcctagcaacaccaaggtggacaagagagtggaacccaagagctgtgaagtgaaaaccgactccaccgaccacgtgaagcccaaagagacagagaacaccaagcagcccagcaagagctgccacaagcccaaggccatcgtgcacaccgagaaagtgaacatgatgagcctgaccgtgctgggcctgcggatgctgttcgccaaaaccgtggccgtgaacttcctgctgaccgccaagctgttcttcctc

SEQ ID NO: 3059 - DNA, 2760 bp, Artificial Sequence
  Synthetic Polynucloetide
atggccttaccagtgaccgccttgctcctgccgctggccttgctgctccacgccgccaggccggaagtgcagctggttgaatctggcggaggactggttcagcctggcggatctctgagactgtcttgtgccgccagcggcttcagcttcagcgacttttggatgagctgggtccgacaggcccctggcaaaggacttgaatgggtcgccacaatcagccaggccggcagcgagaaggactacgtggactctgtgaagggcagattcaccatcagccgggacaacgccaagaagtccctgtacctccagatgaacagcctgagagccgaggacaccgccgtgtactattgtgcctctggcgtgtacagcttcgactacagaggccagggcaccctggtcacagtctcttctggtaccggcggaggcggatctggcggcggaggtagcggtggcggaggatctgaattccagttcgtgctgacccagagcccttctgcctctgctgccctgggagcctctgccaagctgacctgtacactgagcagcgcccacaagacctacaccatcgactggtatcagcagcagaagggaaaggcccccagatacctgatccaagtgaagtccgacggcacctacacaaaggccaccggcgtgcccgatagattcagcggcagtagcagcggagccgatagatacctgattatccccagcgtgcaggccgacgacgaggccgattactactgcggcaccgattacaccggcggctacgtgttcggcggaggcacacaactgaccgtgacactcgagggacagcctaaggccaatcctaccgtgacactgttccctccaagcagcgaagaactccaggccaacaaggccacacttgtgtgcctgatctccgacttctaccctggggctgtgacagtggcttggaaggccgatggatctcctgtgaaagccggcgtggaaaccaccaagccatccaagcagagcaacaacaaatacgccgccagctcctacctgagcctgacacctgagcagtggaagtcccacagatcctacagctgccaagtgacccacgaaggcagcaccgtggaaaagacagtggcccctacagagtgcagccccatcaagaccgatgtgattacaatggaccccaaggacaactgctccaaggacgccaacgataccctgctgctccagctgaccaacaccagcgcctactacatgtacttgttgctgctgctgaagtccgtggtgtacttcgccatcatcacatgctgcctgctgcggagaaccgccttctgctgcaacggcgagaagtctagggccaagcgatctggatctggagcaacaaacttctcactactcaaacaagcaggtgacgtggaggagaatcccgggcctactagtatggactggatttggcgcatccttttccttgtcggcgctgctaccggcgcgcattccgggccccagctccagctgcaagagtctggacctggcctggtcaagcctagcgagacactgagcctgacctgtaccgtgtccggcgatagcatcagcagcggcgattactactggggctggatcagacagcctcctggcaaaggactggaatggatcggccacatctactacagcggcgtgacctactacaaccccagcctgaagtccagagtgaccatcagcgtggacaccagccggaaccagttctccctgaagctgtctagcgtgacagccgccgataccgccgtgtactactgcaccagagaggacagcagcaactggcggagtagaggccagggaacactggtcacagttagctctggatccggcggaggcggaagtggaggcggaggatctggcggcggaggctctttcgaagagcaactgaaagagtctggcggcggactgttcaagcccaccgataccctgaccctgacctgcaccgtgtccggcttcagcctgagctactacggcgtgaactgggtgcgccaggcccctggcaatggcctggaatggatcggcacaatcggcggcagcggcgacacctactatgcctcttgggccaagtccagaagcaccatcatcagaaacaccaacgagaacaccgtgaccctgaagatgaccagcctgacagccgccgacaccgccacctacttttgcgtcagatacgccaacatcggctacgagtatttcaacgtgtggggacccggcaccctcgtgaccgtgtcatctacgcgtgcctctacaaagggaccctccgtgtttcctctggctcccagcagcaagtctacaagcggaggaacagccgctctgggctgcctggtcaaggattactttcccgagcctgtgaccgtgtcctggaatagcggagcactgacaagcggcgtgcacacctttccagccgtgctgcaaagcagcggcctgtactctctgagcagcgtggtcacagtgcctagctctagcctgggcacccagacctacatctgcaatgtgaaccacaagcctagcaacaccaaggtggacaagagagtggaacccaagagctgtgaagtgaaaaccgactccaccgaccacgtgaagcccaaagagacagagaacaccaagcagcccagcaagagctgccacaagcccaaggccatcgtgcacaccgagaaagtgaacatgatgagcctgaccgtgctgggcctgcggatgctgttcgccaaaaccgtggccgtgaacttcctgctgaccgccaagctgttcttcctc

SEQ ID NO: 3060 - DNA, 2775 bp, Artificial Sequence
  Synthetic Polynucloetide
atggccttaccagtgaccgccttgctcctgccgctggccttgctgctccacgccgccaggccggaagtgcagctggttgaatctggcggaggactggttcagcctggcggatctctgagactgtcttgtgccgccagcggcttcagcttcagcgacttttggatgagctgggtccgacaggcccctggcaaaggacttgaatgggtcgccacaatcagccaggccggcagcgagaaggactacgtggactctgtgaagggcagattcaccatcagccgggacaacgccaagaagtccctgtacctccagatgaacagcctgagagccgaggacaccgccgtgtactattgtgcctctggcgtgtacagcttcgactacagaggccagggcaccctggtcacagtctcttctggtaccggcggaggcggatctggcggcggaggtagcggtggcggaggatctgaattccagttcgtgctgacccagagcccttctgtgtctgccgccctgggagcctctgccaagctgacctgtacactgagcagcgcccacaagacctacaccatcgactggtatcagcagcagcagggcgaggcccccagatacctgatgcaagtgaagtccgacggcagctacaccaagggcaccggcgtgcccgatagattcagcggcagtagcagcggagccgatagatacctgattatccccagcgtgcaggccgacgacgaggccggatatgtgtgcggcgctgacgacaatggcggctacgtgttcggcggaggcacccaactgacagtgacactcgagggacagcctaaggccaatcctaccgtgacactgttccctccaagcagcgaagaactccaggccaacaaggccacacttgtgtgcctgatctccgacttctaccctggggctgtgacagtggcttggaaggccgatggatctcctgtgaaagccggcgtggaaaccaccaagccatccaagcagagcaacaacaaatacgccgccagctcctacctgagcctgacacctgagcagtggaagtcccacagatcctacagctgccaagtgacccacgaaggcagcaccgtggaaaagacagtggcccctacagagtgcagccccatcaagaccgatgtgattacaatggaccccaaggacaactgctccaaggacgccaacgataccctgctgctccagctgaccaacaccagcgcctactacatgtacttgttgctgctgctgaagtccgtggtgtacttcgccatcatcacatgctgcctgctgcggagaaccgccttctgctgcaacggcgagaagtctagggccaagcgatctggatctggagcaacaaacttctcactactcaaacaagcaggtgacgtggaggagaatcccgggcctactagtatggactggatttggcgcatccttttccttgtcggcgctgctaccggcgcgcattccgggccccagctccagctgcaagagtctggacctggcctggtcaagcctagcgagacactgagcctgacctgtaccgtgtccggcgatagcatcagcagcggcgattactactggggctggatcagacagcctcctggcaaaggactggaatggatcggccacatctactacagcggcgtgacctactacaaccccagcctgaagtccagagtgaccatcagcgtggacaccagccggaaccagttctccctgaagctgtctagcgtgacagccgccgataccgccgtgtactactgcaccagagaggacagcagcaactggcggagtagaggccagggaacactggtcacagttagctctggatccggcggaggcggaagtggaggcggaggatctggcggcggaggctctttcgaacagagcgtgaaagagtctgagggcggcctgttcaagcccaccgataccctgaccctgacctgcaccgtgtccggcttcagcctgagcagacacgccctgacatgggtgcgccaggcccctggaaatggcctggaatggatcggagccatcgacaacgccggcaccacctactatgcctcttgggccaagtccagaagcaccatcacccggaacaccgacctgcacaccgtgaccctgaagatgaccagcctgaccgccagcgacaccgccacctacttttgcgccagagtgttctacgacatcaacagcggctactacctggacggcatggacctgtggggacctggcacacttgtgaccgtgtccagcacgcgtgcctctacaaagggaccctccgtgtttcctctggctcccagcagcaagtctacaagcggaggaacagccgctctgggctgcctggtcaaggattactttcccgagcctgtgaccgtgtcctggaatagcggagcactgacaagcggcgtgcacacctttccagccgtgctgcaaagcagcggcctgtactctctgagcagcgtggtcacagtgcctagctctagcctgggcacccagacctacatctgcaatgtgaaccacaagcctagcaacaccaaggtggacaagagagtggaacccaagagctgtgaagtgaaaaccgactccaccgaccacgtgaagcccaaagagacagagaacaccaagcagcccagcaagagctgccacaagcccaaggccatcgtgcacaccgagaaagtgaacatgatgagcctgaccgtgctgggcctgcggatgctgttcgccaaaaccgtggccgtgaacttcctgctgaccgccaagctgttcttcctc

SEQ ID NO: 3061 - DNA, 2757 bp, Artificial Sequence
  Synthetic Polynucloetide
atggccttaccagtgaccgccttgctcctgccgctggccttgctgctccacgccgccaggccggaagtgcagctggttgaatctggcggaggactggttcagcctggcggatctctgagactgtcttgtgccgccagcggcttcagcttcagcgacttttggatgagctgggtccgacaggcccctggcaaaggacttgaatgggtcgccacaatcagccaggccggcagcgagaaggactacgtggactctgtgaagggcagattcaccatcagccgggacaacgccaagaagtccctgtacctccagatgaacagcctgagagccgaggacaccgccgtgtactattgtgcctctggcgtgtacagcttcgactacagaggccagggcaccctggtcacagtctcttctggtaccggcggaggcggatctggcggcggaggtagcggtggcggaggatctgaattcgacatccagatgacccagagccccagcagcctgtctgccagcgtgggcgacagagtgaccatcacctgtagagccagccagggcatcagctcttggctggcctggtatcagcagaagcccgagaaggcccccaagagcctgatctacgccgcctctagtctccagagcggcgtgcccagcagattttctggcagcggctccggcaccgacttcaccctgacaatcagctccctccagcccgaggacttcgccacctactactgccagcagtacaacagctacccccccacctttggcggaggcaccaaggtggaaatcaagctcgagggacagcctaaggccaatcctaccgtgacactgttccctccaagcagcgaagaactccaggccaacaaggccacacttgtgtgcctgatctccgacttctaccctggggctgtgacagtggcttggaaggccgatggatctcctgtgaaagccggcgtggaaaccaccaagccatccaagcagagcaacaacaaatacgccgccagctcctacctgagcctgacacctgagcagtggaagtcccacagatcctacagctgccaagtgacccacgaaggcagcaccgtggaaaagacagtggcccctacagagtgcagccccatcaagaccgatgtgattacaatggaccccaaggacaactgctccaaggacgccaacgataccctgctgctccagctgaccaacaccagcgcctactacatgtacttgttgctgctgctgaagtccgtggtgtacttcgccatcatcacatgctgcctgctgcggagaaccgccttctgctgcaacggcgagaagtctagggccaagcgatctggatctggagcaacaaacttctcactactcaaacaagcaggtgacgtggaggagaatcccgggcctactagtatggactggatttggcgcatccttttccttgtcggcgctgctaccggcgcgcattccgggccccagctccagctgcaagagtctggacctggcctggtcaagcctagcgagacactgagcctgacctgtaccgtgtccggcgatagcatcagcagcggcgattactactggggctggatcagacagcctcctggcaaaggactggaatggatcggccacatctactacagcggcgtgacctactacaaccccagcctgaagtccagagtgaccatcagcgtggacaccagccggaaccagttctccctgaagctgtctagcgtgacagccgccgataccgccgtgtactactgcaccagagaggacagcagcaactggcggagtagaggccagggaacactggtcacagttagctctggatccggcggaggcggaagtggaggcggaggatctggcggcggaggctctttcgaagaagtgcaactggtggaatcaggcggcggactggtgcagcctggcgagtctctgagactgagctgtgtggcctccggcttcaccttcagccggtacaagatgaactgggtgcgccaggcccctggcaagggactggaatgggtgtcctacatcagccgcagcggcagagacatctactacgccgacagcgtgaagggccggttcaccatcagcagagacaacgccaagaacagcctgtacctccagatgaactccctgcgggacgaggacaccgccgtgtactactgtgccggaaccgtgaccacctattactacttcggcatggacgtgtggggccacggcaccaccgtgacagtgtcatctacgcgtgcctctacaaagggaccctccgtgtttcctctggctcccagcagcaagtctacaagcggaggaacagccgctctgggctgcctggtcaaggattactttcccgagcctgtgaccgtgtcctggaatagcggagcactgacaagcggcgtgcacacctttccagccgtgctgcaaagcagcggcctgtactctctgagcagcgtggtcacagtgcctagctctagcctgggcacccagacctacatctgcaatgtgaaccacaagcctagcaacaccaaggtggacaagagagtggaacccaagagctgtgaagtgaaaaccgactccaccgaccacgtgaagcccaaagagacagagaacaccaagcagcccagcaagagctgccacaagcccaaggccatcgtgcacaccgagaaagtgaacatgatgagcctgaccgtgctgggcctgcggatgctgttcgccaaaaccgtggccgtgaacttcctgctgaccgccaagctgttcttcctc

SEQ ID NO: 3062 - DNA, 2760 bp, Artificial Sequence
  Synthetic Polynucloetide
atggccttaccagtgaccgccttgctcctgccgctggccttgctgctccacgccgccaggccggaagtgcagctggttgaatctggcggaggactggttcagcctggcggatctctgagactgtcttgtgccgccagcggcttcagcttcagcgacttttggatgagctgggtccgacaggcccctggcaaaggacttgaatgggtcgccacaatcagccaggccggcagcgagaaggactacgtggactctgtgaagggcagattcaccatcagccgggacaacgccaagaagtccctgtacctccagatgaacagcctgagagccgaggacaccgccgtgtactattgtgcctctggcgtgtacagcttcgactacagaggccagggcaccctggtcacagtctcttctggtaccggcggaggcggatctggcggcggaggtagcggtggcggaggatctgaattcgacatccagatgacccagagccccagcagcctgtctgccagcgtgggcgacagagtgaccatcacctgtagagccagccagggcatcagctcttggctggcctggtatcagcagaagcccgagaaggcccccaagagcctgatctacgccgcctctagtctccagagcggcgtgcccagcagattttctggcagcggctccggcaccgacttcaccctgacaatcagctccctccagcccgaggacttcgccacctactactgccagcagtacaacagctaccctcccacctttggcggaggcaccaaggtggaaatcaagctcgagggacagcctaaggccaatcctaccgtgacactgttccctccaagcagcgaagaactccaggccaacaaggccacacttgtgtgcctgatctccgacttctaccctggggctgtgacagtggcttggaaggccgatggatctcctgtgaaagccggcgtggaaaccaccaagccatccaagcagagcaacaacaaatacgccgccagctcctacctgagcctgacacctgagcagtggaagtcccacagatcctacagctgccaagtgacccacgaaggcagcaccgtggaaaagacagtggcccctacagagtgcagccccatcaagaccgatgtgattacaatggaccccaaggacaactgctccaaggacgccaacgataccctgctgctccagctgaccaacaccagcgcctactacatgtacttgttgctgctgctgaagtccgtggtgtacttcgccatcatcacatgctgcctgctgcggagaaccgccttctgctgcaacggcgagaagtctagggccaagcgatctggatctggagcaacaaacttctcactactcaaacaagcaggtgacgtggaggagaatcccgggcctactagtatggactggatttggcgcatccttttccttgtcggcgctgctaccggcgcgcattccgggccccagctccagctgcaagagtctggacctggcctggtcaagcctagcgagacactgagcctgacctgtaccgtgtccggcgatagcatcagcagcggcgattactactggggctggatcagacagcctcctggcaaaggactggaatggatcggccacatctactacagcggcgtgacctactacaaccccagcctgaagtccagagtgaccatcagcgtggacaccagccggaaccagttctccctgaagctgtctagcgtgacagccgccgataccgccgtgtactactgcaccagagaggacagcagcaactggcggagtagaggccagggaacactggtcacagttagctctggatccggcggaggcggaagtggaggcggaggatctggcggcggaggctctttcgaagaagtgcaactggtggaatccgggggaggctctgtgcagcctggcgagtctctgagactgagctgtgtggcctccggcttcaccttcagccggtacaagatgaactgggtgcgccaggcccctggcaagggactggaatgggtgtcctacatcagccgcagcggcagagacatctactacgccgacagcgtgaagggccggttcaccatcagcagagacaacgccaagaacagcctgtacctccagatgaactccctgcgggacgaggacaccgccgtgtactactgtgccggaaccgtgaccacctattactacgacttcggcatggacgtgtggggccagggcacaaccgtgacagtgtctagcacgcgtgcctctacaaagggaccctccgtgtttcctctggctcccagcagcaagtctacaagcggaggaacagccgctctgggctgcctggtcaaggattactttcccgagcctgtgaccgtgtcctggaatagcggagcactgacaagcggcgtgcacacctttccagccgtgctgcaaagcagcggcctgtactctctgagcagcgtggtcacagtgcctagctctagcctgggcacccagacctacatctgcaatgtgaaccacaagcctagcaacaccaaggtggacaagagagtggaacccaagagctgtgaagtgaaaaccgactccaccgaccacgtgaagcccaaagagacagagaacaccaagcagcccagcaagagctgccacaagcccaaggccatcgtgcacaccgagaaagtgaacatgatgagcctgaccgtgctgggcctgcggatgctgttcgccaaaaccgtggccgtgaacttcctgctgaccgccaagctgttcttcctc

SEQ ID NO: 3063 - DNA, 2754 bp, Artificial Sequence
  Synthetic Polynucloetide
atggccttaccagtgaccgccttgctcctgccgctggccttgctgctccacgccgccaggccggaagtgcagctggttgaatctggcggaggactggttcagcctggcggatctctgagactgtcttgtgccgccagcggcttcagcttcagcgacttttggatgagctgggtccgacaggcccctggcaaaggacttgaatgggtcgccacaatcagccaggccggcagcgagaaggactacgtggactctgtgaagggcagattcaccatcagccgggacaacgccaagaagtccctgtacctccagatgaacagcctgagagccgaggacaccgccgtgtactattgtgcctctggcgtgtacagcttcgactacagaggccagggcaccctggtcacagtctcttctggtaccggcggaggcggatctggcggcggaggtagcggtggcggaggatctgaattccagtctgtgctgacacagcctccatctgcctctggcacacctggacagagagtgaccatcagctgtagcggcagcagaagcaacgtcggcggcaactacgtgttctggtatcagcaggtcccaggcgctacccctaagctgctgatctacagaagcaatcagcggcctagcggcgtgcccgatagatttgccggaagcaagagcggcagctctgccagccttgccatctctggactgagaagcgaggacgaggccgactactactgtgccacctgggatgatagcctgagcggcttcgtgtttggcaccggcaccaaagtgacagtgcttggtctcgagggacagcctaaggccaatcctaccgtgacactgttccctccaagcagcgaagaactccaggccaacaaggccacacttgtgtgcctgatctccgacttctaccctggggctgtgacagtggcttggaaggccgatggatctcctgtgaaagccggcgtggaaaccaccaagccatccaagcagagcaacaacaaatacgccgccagctcctacctgagcctgacacctgagcagtggaagtcccacagatcctacagctgccaagtgacccacgaaggcagcaccgtggaaaagacagtggcccctacagagtgcagccccatcaagaccgatgtgattacaatggaccccaaggacaactgctccaaggacgccaacgataccctgctgctccagctgaccaacaccagcgcctactacatgtacttgttgctgctgctgaagtccgtggtgtacttcgccatcatcacatgctgcctgctgcggagaaccgccttctgctgcaacggcgagaagtctagggccaagcgatctggatctggagcaacaaacttctcactactcaaacaagcaggtgacgtggaggagaatcccgggcctactagtatggactggatttggcgcatccttttccttgtcggcgctgctaccggcgcgcattccgggccccagctccagctgcaagagtctggacctggcctggtcaagcctagcgagacactgagcctgacctgtaccgtgtccggcgatagcatcagcagcggcgattactactggggctggatcagacagcctcctggcaaaggactggaatggatcggccacatctactacagcggcgtgacctactacaaccccagcctgaagtccagagtgaccatcagcgtggacaccagccggaaccagttctccctgaagctgtctagcgtgacagccgccgataccgccgtgtactactgcaccagagaggacagcagcaactggcggagtagaggccagggaacactggtcacagttagctctggatccggcggaggcggaagtggaggcggaggatctggcggcggaggctctttcgaagttcagctggttgaatctggcggcggactggttaagcctggcggatctctgagactgtcttgtgccgccagcggcttcaccttcagcgattactacatgagctggatcagacaggcccctggcaaaggactggaatgggtgtcctacatcagcagcagcggctccaccatctactacgccgatagcgtgaagggcagattcaccatcagccgggacaacgccaagaacagcctgtacctccagatgaactccctgagagccgaggacaccgccgtgtactattgcgccagaggctacggcaaagcctacgatcaatggggccagggcacactggtcaccgtttcttctacgcgtgcctctacaaagggaccctccgtgtttcctctggctcccagcagcaagtctacaagcggaggaacagccgctctgggctgcctggtcaaggattactttcccgagcctgtgaccgtgtcctggaatagcggagcactgacaagcggcgtgcacacctttccagccgtgctgcaaagcagcggcctgtactctctgagcagcgtggtcacagtgcctagctctagcctgggcacccagacctacatctgcaatgtgaaccacaagcctagcaacaccaaggtggacaagagagtggaacccaagagctgtgaagtgaaaaccgactccaccgaccacgtgaagcccaaagagacagagaacaccaagcagcccagcaagagctgccacaagcccaaggccatcgtgcacaccgagaaagtgaacatgatgagcctgaccgtgctgggcctgcggatgctgttcgccaaaaccgtggccgtgaacttcctgctgaccgccaagctgttcttcctc

SEQ ID NO: 3064 - DNA, 2751 bp, Artificial Sequence
  Synthetic Polynucloetide
atggccttaccagtgaccgccttgctcctgccgctggccttgctgctccacgccgccaggccggaagtgcagctggttgaatctggcggaggactggttcagcctggcggatctctgagactgtcttgtgccgccagcggcttcagcttcagcgacttttggatgagctgggtccgacaggcccctggcaaaggacttgaatgggtcgccacaatcagccaggccggcagcgagaaggactacgtggactctgtgaagggcagattcaccatcagccgggacaacgccaagaagtccctgtacctccagatgaacagcctgagagccgaggacaccgccgtgtactattgtgcctctggcgtgtacagcttcgactacagaggccagggcaccctggtcacagtctcttctggtaccggcggaggcggatctggcggcggaggtagcggtggcggaggatctgaattccagtctgtggtcacacagccacctagcatgtctgccgctccaggccagcaagtgaccatctcttgtagcggcggcaacagcaacatcgagcggaactacgtgtcctggtatctgcaactgcctggcacagcccctaagctggtcatcttcgacaacgacagacggcccagcggcatccccgatagattttctggcagcaagagcggcaccagcgccacactgggaattaccggacttcagacaggcgacgaggccgactactactgtggcacatgggactctagcctgagaggctgggttttcggcggaggcacaaagctgacagtgcttggtctcgagggacagcctaaggccaatcctaccgtgacactgttccctccaagcagcgaagaactccaggccaacaaggccacacttgtgtgcctgatctccgacttctaccctggggctgtgacagtggcttggaaggccgatggatctcctgtgaaagccggcgtggaaaccaccaagccatccaagcagagcaacaacaaatacgccgccagctcctacctgagcctgacacctgagcagtggaagtcccacagatcctacagctgccaagtgacccacgaaggcagcaccgtggaaaagacagtggcccctacagagtgcagccccatcaagaccgatgtgattacaatggaccccaaggacaactgctccaaggacgccaacgataccctgctgctccagctgaccaacaccagcgcctactacatgtacttgttgctgctgctgaagtccgtggtgtacttcgccatcatcacatgctgcctgctgcggagaaccgccttctgctgcaacggcgagaagtctagggccaagcgatctggatctggagcaacaaacttctcactactcaaacaagcaggtgacgtggaggagaatcccgggcctactagtatggactggatttggcgcatccttttccttgtcggcgctgctaccggcgcgcattccgggccccagctccagctgcaagagtctggacctggcctggtcaagcctagcgagacactgagcctgacctgtaccgtgtccggcgatagcatcagcagcggcgattactactggggctggatcagacagcctcctggcaaaggactggaatggatcggccacatctactacagcggcgtgacctactacaaccccagcctgaagtccagagtgaccatcagcgtggacaccagccggaaccagttctccctgaagctgtctagcgtgacagccgccgataccgccgtgtactactgcaccagagaggacagcagcaactggcggagtagaggccagggaacactggtcacagttagctctggatccggcggaggcggaagtggaggcggaggatctggcggcggaggctctttcgaagtgcagctcgttgagtctggcggcggactgattcaacctggcggaagcctgagactgagctgtgccgcttccggcttcaccttcagcaactacgccatgaactgggttcgacaggcccctggcaaaggactggaatgggtgtccaccatcaacggcagaggcagcagcaccatctacgccgattctgtgaagggcagattcaccatcagccgggacaacagcaagaacaccctgtacctccagatgaactccctgagagccgaggacaccgccacctattactgtgcccggtacatcagcagaggactgggcgattcttggggccagggcacactggttacagtgacgcgtgcctctacaaagggaccctccgtgtttcctctggctcccagcagcaagtctacaagcggaggaacagccgctctgggctgcctggtcaaggattactttcccgagcctgtgaccgtgtcctggaatagcggagcactgacaagcggcgtgcacacctttccagccgtgctgcaaagcagcggcctgtactctctgagcagcgtggtcacagtgcctagctctagcctgggcacccagacctacatctgcaatgtgaaccacaagcctagcaacaccaaggtggacaagagagtggaacccaagagctgtgaagtgaaaaccgactccaccgaccacgtgaagcccaaagagacagagaacaccaagcagcccagcaagagctgccacaagcccaaggccatcgtgcacaccgagaaagtgaacatgatgagcctgaccgtgctgggcctgcggatgctgttcgccaaaaccgtggccgtgaacttcctgctgaccgccaagctgttcttcctc

SEQ ID NO: 3065 - DNA, 2754 bp, Artificial Sequence
  Synthetic Polynucloetide
atggccttaccagtgaccgccttgctcctgccgctggccttgctgctccacgccgccaggccggaagtgcagctggttgaatctggcggaggactggttcagcctggcggatctctgagactgtcttgtgccgccagcggcttcagcttcagcgacttttggatgagctgggtccgacaggcccctggcaaaggacttgaatgggtcgccacaatcagccaggccggcagcgagaaggactacgtggactctgtgaagggcagattcaccatcagccgggacaacgccaagaagtccctgtacctccagatgaacagcctgagagccgaggacaccgccgtgtactattgtgcctctggcgtgtacagcttcgactacagaggccagggcaccctggtcacagtctcttctggtaccggcggaggcggatctggcggcggaggtagcggtggcggaggatctgaattcgacgtcgtgatgacccagacccctctgagcctgcctgtgtccctgggcgatcaggccagcatcagctgtagaagcagccagagcctggtgcacagcaacggcaacacctacctgcactggtatctccagaagcccggccagagccccaagctgctgatctacaaggtgtccaacagattcagcggcgtgcccgacagattctccggcagcggctctggcaccgacttcaccctgaagatcagccgggtggaagccgaggacctgggcgtgtacttctgtagccagaacacccccgtgccccccaagtttggcagcggcaccaagctggaaatcaagctcgagggacagcctaaggccaatcctaccgtgacactgttccctccaagcagcgaagaactccaggccaacaaggccacacttgtgtgcctgatctccgacttctaccctggggctgtgacagtggcttggaaggccgatggatctcctgtgaaagccggcgtggaaaccaccaagccatccaagcagagcaacaacaaatacgccgccagctcctacctgagcctgacacctgagcagtggaagtcccacagatcctacagctgccaagtgacccacgaaggcagcaccgtggaaaagacagtggcccctacagagtgcagccccatcaagaccgatgtgattacaatggaccccaaggacaactgctccaaggacgccaacgataccctgctgctccagctgaccaacaccagcgcctactacatgtacttgttgctgctgctgaagtccgtggtgtacttcgccatcatcacatgctgcctgctgcggagaaccgccttctgctgcaacggcgagaagtctagggccaagcgatctggatctggagcaacaaacttctcactactcaaacaagcaggtgacgtggaggagaatcccgggcctactagtatggactggatttggcgcatccttttccttgtcggcgctgctaccggcgcgcattccgggccccagctccagctgcaagagtctggacctggcctggtcaagcctagcgagacactgagcctgacctgtaccgtgtccggcgatagcatcagcagcggcgattactactggggctggatcagacagcctcctggcaaaggactggaatggatcggccacatctactacagcggcgtgacctactacaaccccagcctgaagtccagagtgaccatcagcgtggacaccagccggaaccagttctccctgaagctgtctagcgtgacagccgccgataccgccgtgtactactgcaccagagaggacagcagcaactggcggagtagaggccagggaacactggtcacagttagctctggatccggcggaggcggaagtggaggcggaggatctggcggcggaggctctttcgaacaggtgcagctccagcagtctggcgctgaactcgtgcggcctggcgcttctgtgaagctgtcttgcaaggccagcggctacaccttcaacgactacgagatgcactgggtcaagcagacccctgtgcacggcctgaagtggatcggagccctggaacccaagaccggcgataccgcctacagccagaagttcaagggcaaggccaccctgaccgccgacaagagcagcagcacagcctacatggaactgcggagcctgaccagcgaggacagcgccgtgtactactgcaccagctgctactactacacctacagcggccagggcaccctcgtgacagtgtctgctacgcgtgcctctacaaagggaccctccgtgtttcctctggctcccagcagcaagtctacaagcggaggaacagccgctctgggctgcctggtcaaggattactttcccgagcctgtgaccgtgtcctggaatagcggagcactgacaagcggcgtgcacacctttccagccgtgctgcaaagcagcggcctgtactctctgagcagcgtggtcacagtgcctagctctagcctgggcacccagacctacatctgcaatgtgaaccacaagcctagcaacaccaaggtggacaagagagtggaacccaagagctgtgaagtgaaaaccgactccaccgaccacgtgaagcccaaagagacagagaacaccaagcagcccagcaagagctgccacaagcccaaggccatcgtgcacaccgagaaagtgaacatgatgagcctgaccgtgctgggcctgcggatgctgttcgccaaaaccgtggccgtgaacttcctgctgaccgccaagctgttcttcctc

SEQ ID NO: 3066 - DNA, 2751 bp, Artificial Sequence
  Synthetic Polynucloetide
atggccttaccagtgaccgccttgctcctgccgctggccttgctgctccacgccgccaggccggaagtgcagctggttgaatctggcggaggactggttcagcctggcggatctctgagactgtcttgtgccgccagcggcttcagcttcagcgacttttggatgagctgggtccgacaggcccctggcaaaggacttgaatgggtcgccacaatcagccaggccggcagcgagaaggactacgtggactctgtgaagggcagattcaccatcagccgggacaacgccaagaagtccctgtacctccagatgaacagcctgagagccgaggacaccgccgtgtactattgtgcctctggcgtgtacagcttcgactacagaggccagggcaccctggtcacagtctcttctggtaccggcggaggcggatctggcggcggaggtagcggtggcggaggatctgaattcgacatccaactgacccagagccccagcagcctgtctgcctctgtgggcgacagagtgaccatcacctgtagagccagccagggcatcagaaacgacctgggctggtatcagcagaagcccggcaaggcccccaagcggctgatctatgctgccagctccctccagaatggcgtgcccagcagattttccggcagcggctctggcaccgagttcaccctgaccatcagctccctccagcccgaggacttcgccacctactactgcctccagcacaacacctaccccgccttcggccagggcaccaaggtggaaatcaagagactcgagggacagcctaaggccaatcctaccgtgacactgttccctccaagcagcgaagaactccaggccaacaaggccacacttgtgtgcctgatctccgacttctaccctggggctgtgacagtggcttggaaggccgatggatctcctgtgaaagccggcgtggaaaccaccaagccatccaagcagagcaacaacaaatacgccgccagctcctacctgagcctgacacctgagcagtggaagtcccacagatcctacagctgccaagtgacccacgaaggcagcaccgtggaaaagacagtggcccctacagagtgcagccccatcaagaccgatgtgattacaatggaccccaaggacaactgctccaaggacgccaacgataccctgctgctccagctgaccaacaccagcgcctactacatgtacttgttgctgctgctgaagtccgtggtgtacttcgccatcatcacatgctgcctgctgcggagaaccgccttctgctgcaacggcgagaagtctagggccaagcgatctggatctggagcaacaaacttctcactactcaaacaagcaggtgacgtggaggagaatcccgggcctactagtatggactggatttggcgcatccttttccttgtcggcgctgctaccggcgcgcattccgggccccagctccagctgcaagagtctggacctggcctggtcaagcctagcgagacactgagcctgacctgtaccgtgtccggcgatagcatcagcagcggcgattactactggggctggatcagacagcctcctggcaaaggactggaatggatcggccacatctactacagcggcgtgacctactacaaccccagcctgaagtccagagtgaccatcagcgtggacaccagccggaaccagttctccctgaagctgtctagcgtgacagccgccgataccgccgtgtactactgcaccagagaggacagcagcaactggcggagtagaggccagggaacactggtcacagttagctctggatccggcggaggcggaagtggaggcggaggatctggcggcggaggctctttcgaacaggtgcaactccaggaatctggccctggcctcgtgaagcctagccagaccctgagcctgacctgtaccgtgtctggcggcagcatcagcagcttcaactactactggtcctggatcagacaccaccctggcaagggcctggaatggatcggctacatctactacagcggcagcacctacagcaaccccagcctgaagtcccgcgtgaccatctccgtggacaccagcaagaaccagtttagcctgaccctgtccagcgtgacagccgccgataccgccgtgtactactgcgccagaggctacaactggaactacttcgactactggggccagggaaccctcgtgaccgtgtctagtacgcgtgcctctacaaagggaccctccgtgtttcctctggctcccagcagcaagtctacaagcggaggaacagccgctctgggctgcctggtcaaggattactttcccgagcctgtgaccgtgtcctggaatagcggagcactgacaagcggcgtgcacacctttccagccgtgctgcaaagcagcggcctgtactctctgagcagcgtggtcacagtgcctagctctagcctgggcacccagacctacatctgcaatgtgaaccacaagcctagcaacaccaaggtggacaagagagtggaacccaagagctgtgaagtgaaaaccgactccaccgaccacgtgaagcccaaagagacagagaacaccaagcagcccagcaagagctgccacaagcccaaggccatcgtgcacaccgagaaagtgaacatgatgagcctgaccgtgctgggcctgcggatgctgttcgccaaaaccgtggccgtgaacttcctgctgaccgccaagctgttcttcctc

SEQ ID NO: 3067 - DNA, 2757 bp, Artificial Sequence
  Synthetic Polynucloetide
atggccttaccagtgaccgccttgctcctgccgctggccttgctgctccacgccgccaggccggaagtgcagctggttgaatctggcggaggactggttcagcctggcggatctctgagactgtcttgtgccgccagcggcttcagcttcagcgacttttggatgagctgggtccgacaggcccctggcaaaggacttgaatgggtcgccacaatcagccaggccggcagcgagaaggactacgtggactctgtgaagggcagattcaccatcagccgggacaacgccaagaagtccctgtacctccagatgaacagcctgagagccgaggacaccgccgtgtactattgtgcctctggcgtgtacagcttcgactacagaggccagggcaccctggtcacagtctcttctggtaccggcggaggcggatctggcggcggaggtagcggtggcggaggatctgaattcgacgacatcgtgctgacccagagccccgccagcctggccgtgagcctgggccagagcgtgaccatcagctgcagagccagcgagagcgtggagtactacggcaccagcctgatgcagtggtaccagcagaagcccggccagccccccaagctgctgatctacgccaccagcaacgtggagagcggcgtgcccgccagattcagcggcagcggcagcggcaccgacttcagcctgaacatccaccccgtggaggaggacgacatcgccatgtacttctgccagcagagcagaaagctgcccagcaccttcggcggcggcaccaagctggagatcaagctcgagggacagcctaaggccaatcctaccgtgacactgttccctccaagcagcgaagaactccaggccaacaaggccacacttgtgtgcctgatctccgacttctaccctggggctgtgacagtggcttggaaggccgatggatctcctgtgaaagccggcgtggaaaccaccaagccatccaagcagagcaacaacaaatacgccgccagctcctacctgagcctgacacctgagcagtggaagtcccacagatcctacagctgccaagtgacccacgaaggcagcaccgtggaaaagacagtggcccctacagagtgcagccccatcaagaccgatgtgattacaatggaccccaaggacaactgctccaaggacgccaacgataccctgctgctccagctgaccaacaccagcgcctactacatgtacttgttgctgctgctgaagtccgtggtgtacttcgccatcatcacatgctgcctgctgcggagaaccgccttctgctgcaacggcgagaagtctagggccaagcgatctggatctggagcaacaaacttctcactactcaaacaagcaggtgacgtggaggagaatcccgggcctactagtatggactggatttggcgcatccttttccttgtcggcgctgctaccggcgcgcattccgggccccagctccagctgcaagagtctggacctggcctggtcaagcctagcgagacactgagcctgacctgtaccgtgtccggcgatagcatcagcagcggcgattactactggggctggatcagacagcctcctggcaaaggactggaatggatcggccacatctactacagcggcgtgacctactacaaccccagcctgaagtccagagtgaccatcagcgtggacaccagccggaaccagttctccctgaagctgtctagcgtgacagccgccgataccgccgtgtactactgcaccagagaggacagcagcaactggcggagtagaggccagggaacactggtcacagttagctctggatccggcggaggcggaagtggaggcggaggatctggcggcggaggctctttcgaagacgtgagactgcaggagagcggccccggccaggtgaagcccagccagaccgtgagcctgacctgcagcgtgaccggctacagcatcaccaacggcaaccactggtggaactggatcagacaggtgagcggcagcaagctggagtggatcggctacatcagcagcagcggcagcaccgacagcaaccccagcctgaagagcagaatcagcatcaccagagacaccagcaagaaccagctgttcctgcagctgaacagcgtgaccaccgaggacatcgccacctactactgcgccagaggctactacttcgactactggggccagggcaccaccctgaccgtgagcagcacgcgtgcctctacaaagggaccctccgtgtttcctctggctcccagcagcaagtctacaagcggaggaacagccgctctgggctgcctggtcaaggattactttcccgagcctgtgaccgtgtcctggaatagcggagcactgacaagcggcgtgcacacctttccagccgtgctgcaaagcagcggcctgtactctctgagcagcgtggtcacagtgcctagctctagcctgggcacccagacctacatctgcaatgtgaaccacaagcctagcaacaccaaggtggacaagagagtggaacccaagagctgtgaagtgaaaaccgactccaccgaccacgtgaagcccaaagagacagagaacaccaagcagcccagcaagagctgccacaagcccaaggccatcgtgcacaccgagaaagtgaacatgatgagcctgaccgtgctgggcctgcggatgctgttcgccaaaaccgtggccgtgaacttcctgctgaccgccaagctgttcttcctc

SEQ ID NO: 3068 - DNA, 2754 bp, Artificial Sequence
  Synthetic Polynucloetide
atggccttaccagtgaccgccttgctcctgccgctggccttgctgctccacgccgccaggccggaagtgcagctggttgaatctggcggaggactggttcagcctggcggatctctgagactgtcttgtgccgccagcggcttcagcttcagcgacttttggatgagctgggtccgacaggcccctggcaaaggacttgaatgggtcgccacaatcagccaggccggcagcgagaaggactacgtggactctgtgaagggcagattcaccatcagccgggacaacgccaagaagtccctgtacctccagatgaacagcctgagagccgaggacaccgccgtgtactattgtgcctctggcgtgtacagcttcgactacagaggccagggcaccctggtcacagtctcttctggtaccggcggaggcggatctggcggcggaggtagcggtggcggaggatctgaattcgacatccagatgacccagagccccagcagcctgtctgccagcgtgggcgacagagtgaccatcacctgtagagccagccaggacgtgaacaccgccgtggcctggtatcagcagaagcctggcaaggcccccaagctgctgatctacagcgccagcttcctggaaagcggcgtgcccagcagattcagcggaagcagaagcggcaccgacttcaccctgaccatcagctccctccagcccgaggacttcgccacctactactgccagcagcactacaccacccctcccaccttcggccagaccaaggtggaaatcaagagactcgagggacagcctaaggccaatcctaccgtgacactgttccctccaagcagcgaagaactccaggccaacaaggccacacttgtgtgcctgatctccgacttctaccctggggctgtgacagtggcttggaaggccgatggatctcctgtgaaagccggcgtggaaaccaccaagccatccaagcagagcaacaacaaatacgccgccagctcctacctgagcctgacacctgagcagtggaagtcccacagatcctacagctgccaagtgacccacgaaggcagcaccgtggaaaagacagtggcccctacagagtgcagccccatcaagaccgatgtgattacaatggaccccaaggacaactgctccaaggacgccaacgataccctgctgctccagctgaccaacaccagcgcctactacatgtacttgttgctgctgctgaagtccgtggtgtacttcgccatcatcacatgctgcctgctgcggagaaccgccttctgctgcaacggcgagaagtctagggccaagcgatctggatctggagcaacaaacttctcactactcaaacaagcaggtgacgtggaggagaatcccgggcctactagtatggactggatttggcgcatccttttccttgtcggcgctgctaccggcgcgcattccgggccccagctccagctgcaagagtctggacctggcctggtcaagcctagcgagacactgagcctgacctgtaccgtgtccggcgatagcatcagcagcggcgattactactggggctggatcagacagcctcctggcaaaggactggaatggatcggccacatctactacagcggcgtgacctactacaaccccagcctgaagtccagagtgaccatcagcgtggacaccagccggaaccagttctccctgaagctgtctagcgtgacagccgccgataccgccgtgtactactgcaccagagaggacagcagcaactggcggagtagaggccagggaacactggtcacagttagctctggatccggcggaggcggaagtggaggcggaggatctggcggcggaggctctttcgaagaagtgcaactggtggaatctggcggcggactggtgcagcctggcggatctctgagactgagctgtgccgccagcggcttcaacatcaaggacacctacatccactgggtgcgccaggcccctggaaagggactggaatgggtggcccggatctaccccaccaacggctacaccagatacgccgacagcgtgaagggccggttcaccatcagcgccgacaccagcaagaataccgcctacctccagatgaacagcctgcgggccgaggataccgccgtgtactactgctcaagatggggaggcgacggcttctacgctatggacgtgtggggccagggcacccttgtgaccgtgtcatctacgcgtgcctctacaaagggaccctccgtgtttcctctggctcccagcagcaagtctacaagcggaggaacagccgctctgggctgcctggtcaaggattactttcccgagcctgtgaccgtgtcctggaatagcggagcactgacaagcggcgtgcacacctttccagccgtgctgcaaagcagcggcctgtactctctgagcagcgtggtcacagtgcctagctctagcctgggcacccagacctacatctgcaatgtgaaccacaagcctagcaacaccaaggtggacaagagagtggaacccaagagctgtgaagtgaaaaccgactccaccgaccacgtgaagcccaaagagacagagaacaccaagcagcccagcaagagctgccacaagcccaaggccatcgtgcacaccgagaaagtgaacatgatgagcctgaccgtgctgggcctgcggatgctgttcgccaaaaccgtggccgtgaacttcctgctgaccgccaagctgttcttcctc

SEQ ID NO: 3069 - DNA, 2751 bp, Artificial Sequence
  Synthetic Polynucloetide
atggccttaccagtgaccgccttgctcctgccgctggccttgctgctccacgccgccaggccggaagtgcagctggttgaatctggcggaggactggttcagcctggcggatctctgagactgtcttgtgccgccagcggcttcagcttcagcgacttttggatgagctgggtccgacaggcccctggcaaaggacttgaatgggtcgccacaatcagccaggccggcagcgagaaggactacgtggactctgtgaagggcagattcaccatcagccgggacaacgccaagaagtccctgtacctccagatgaacagcctgagagccgaggacaccgccgtgtactattgtgcctctggcgtgtacagcttcgactacagaggccagggcaccctggtcacagtctcttctggtaccggcggaggcggatctggcggcggaggtagcggtggcggaggatctgaattcgaccagagcgtgctgacacagcctcctagcgtgtcagtggcccctggcaagaccgccagaatcccctgcgagggcaactacatcggcagcagcaacgtgcactggtatcagcagaagcccggccaggctcccgtgctcgtgatccacttcgacagcgacagacccagcggcatccccgacagattcagcggcagcaacagcggcaacatggctaccctgaccatcagcagagtggaagccggggacgaggccgactactactgtcaagtgtgggagaaccacggctgggtgttcggcggaggcaccaagctgacagtgctgtctctcgagggacagcctaaggccaatcctaccgtgacactgttccctccaagcagcgaagaactccaggccaacaaggccacacttgtgtgcctgatctccgacttctaccctggggctgtgacagtggcttggaaggccgatggatctcctgtgaaagccggcgtggaaaccaccaagccatccaagcagagcaacaacaaatacgccgccagctcctacctgagcctgacacctgagcagtggaagtcccacagatcctacagctgccaagtgacccacgaaggcagcaccgtggaaaagacagtggcccctacagagtgcagccccatcaagaccgatgtgattacaatggaccccaaggacaactgctccaaggacgccaacgataccctgctgctccagctgaccaacaccagcgcctactacatgtacttgttgctgctgctgaagtccgtggtgtacttcgccatcatcacatgctgcctgctgcggagaaccgccttctgctgcaacggcgagaagtctagggccaagcgatctggatctggagcaacaaacttctcactactcaaacaagcaggtgacgtggaggagaatcccgggcctactagtatggactggatttggcgcatccttttccttgtcggcgctgctaccggcgcgcattccgggccccagctccagctgcaagagtctggacctggcctggtcaagcctagcgagacactgagcctgacctgtaccgtgtccggcgatagcatcagcagcggcgattactactggggctggatcagacagcctcctggcaaaggactggaatggatcggccacatctactacagcggcgtgacctactacaaccccagcctgaagtccagagtgaccatcagcgtggacaccagccggaaccagttctccctgaagctgtctagcgtgacagccgccgataccgccgtgtactactgcaccagagaggacagcagcaactggcggagtagaggccagggaacactggtcacagttagctctggatccggcggaggcggaagtggaggcggaggatctggcggcggaggctctttcgaagaggtgcaactggtggaaacaggcggcggactggtgcagcctggcgagtctctgagactgagctgtgccgccagcggcttcaccttcagcgactacgagatgaactgggtgcgccaggcccctggaaagggcctggaatgggtgtcctacatcagcagctccggcagcaccatctactacgccgacagcgtgaagggccggtttaccatctaccgggacaacgccaagaacagcctgtacctccagatgaactccctgcgggccgaggacaccgccctgtactattgtgccagagcctggggcgtgggaccccctgattattggggacagggcaccctcgtgaccgtgtcctctacgcgtgcctctacaaagggaccctccgtgtttcctctggctcccagcagcaagtctacaagcggaggaacagccgctctgggctgcctggtcaaggattactttcccgagcctgtgaccgtgtcctggaatagcggagcactgacaagcggcgtgcacacctttccagccgtgctgcaaagcagcggcctgtactctctgagcagcgtggtcacagtgcctagctctagcctgggcacccagacctacatctgcaatgtgaaccacaagcctagcaacaccaaggtggacaagagagtggaacccaagagctgtgaagtgaaaaccgactccaccgaccacgtgaagcccaaagagacagagaacaccaagcagcccagcaagagctgccacaagcccaaggccatcgtgcacaccgagaaagtgaacatgatgagcctgaccgtgctgggcctgcggatgctgttcgccaaaaccgtggccgtgaacttcctgctgaccgccaagctgttcttcctc

SEQ ID NO: 3070 - DNA, 2775 bp, Artificial Sequence
  Synthetic Polynucloetide
atggccttaccagtgaccgccttgctcctgccgctggccttgctgctccacgccgccaggccggaagtgcagctggttgaatctggcggaggactggttcagcctggcggatctctgagactgtcttgtgccgccagcggcttcagcttcagcgacttttggatgagctgggtccgacaggcccctggcaaaggacttgaatgggtcgccacaatcagccaggccggcagcgagaaggactacgtggactctgtgaagggcagattcaccatcagccgggacaacgccaagaagtccctgtacctccagatgaacagcctgagagccgaggacaccgccgtgtactattgtgcctctggcgtgtacagcttcgactacagaggccagggcaccctggtcacagtctcttctggtaccggcggaggcggatctggcggcggaggtagcggtggcggaggatctgaattcgacatccagatgacccagagccccagcagcctgtctgccagcgtgggcgataccgtgaccatcacctgtcaggccaacggctacctgaactggtatcagcagcggagaggcaaggcccccaagctgctgatctacgacggcagcaagctggaaagaggcgtgcccagcagattcagcggcagaagatggggccaggagtacaacctgaccatcaacaacctccagcccgaggatattgccacatacttttgccaggtgtacgagttcgtggtgcccggcacacggctggacctgaagagaacagtggctgctcctctcgagggacagcctaaggccaatcctaccgtgacactgttccctccaagcagcgaagaactccaggccaacaaggccacacttgtgtgcctgatctccgacttctaccctggggctgtgacagtggcttggaaggccgatggatctcctgtgaaagccggcgtggaaaccaccaagccatccaagcagagcaacaacaaatacgccgccagctcctacctgagcctgacacctgagcagtggaagtcccacagatcctacagctgccaagtgacccacgaaggcagcaccgtggaaaagacagtggcccctacagagtgcagccccatcaagaccgatgtgattacaatggaccccaaggacaactgctccaaggacgccaacgataccctgctgctccagctgaccaacaccagcgcctactacatgtacttgttgctgctgctgaagtccgtggtgtacttcgccatcatcacatgctgcctgctgcggagaaccgccttctgctgcaacggcgagaagtctagggccaagcgatctggatctggagcaacaaacttctcactactcaaacaagcaggtgacgtggaggagaatcccgggcctactagtatggactggatttggcgcatccttttccttgtcggcgctgctaccggcgcgcattccgggccccagctccagctgcaagagtctggacctggcctggtcaagcctagcgagacactgagcctgacctgtaccgtgtccggcgatagcatcagcagcggcgattactactggggctggatcagacagcctcctggcaaaggactggaatggatcggccacatctactacagcggcgtgacctactacaaccccagcctgaagtccagagtgaccatcagcgtggacaccagccggaaccagttctccctgaagctgtctagcgtgacagccgccgataccgccgtgtactactgcaccagagaggacagcagcaactggcggagtagaggccagggaacactggtcacagttagctctggatccggcggaggcggaagtggaggcggaggatctggcggcggaggctctttcgaacaggtgcagctgctccagtctggcgctgccgtgacaaagcctggcgcttctgtgcgggtgtcctgtgaagccagcggctacaacatccgggactacttcatccactggtggcggcaggctccaggccagggactccagtgggtgggatggatcaaccccaagaccggccagcccaacaaccccagacagttccagggcagagtgtccctgaccagacacgccagctgggacttcgacaccttcagcttctacatggatctgaaggccctgcggagcgacgataccgccgtgtacttctgcgccagacagagaagcgactactgggatttcgacgtgtggggcagcggcacccaagtgacagtgtctagcgccagcaccaagggacccacgcgtgcctctacaaagggaccctccgtgtttcctctggctcccagcagcaagtctacaagcggaggaacagccgctctgggctgcctggtcaaggattactttcccgagcctgtgaccgtgtcctggaatagcggagcactgacaagcggcgtgcacacctttccagccgtgctgcaaagcagcggcctgtactctctgagcagcgtggtcacagtgcctagctctagcctgggcacccagacctacatctgcaatgtgaaccacaagcctagcaacaccaaggtggacaagagagtggaacccaagagctgtgaagtgaaaaccgactccaccgaccacgtgaagcccaaagagacagagaacaccaagcagcccagcaagagctgccacaagcccaaggccatcgtgcacaccgagaaagtgaacatgatgagcctgaccgtgctgggcctgcggatgctgttcgccaaaaccgtggccgtgaacttcctgctgaccgccaagctgttcttcctc

SEQ ID NO: 3071 - DNA, 2793 bp, Artificial Sequence
  Synthetic Polynucloetide
atggccttaccagtgaccgccttgctcctgccgctggccttgctgctccacgccgccaggccggaagtgcagctggttgaatctggcggaggactggttcagcctggcggatctctgagactgtcttgtgccgccagcggcttcagcttcagcgacttttggatgagctgggtccgacaggcccctggcaaaggacttgaatgggtcgccacaatcagccaggccggcagcgagaaggactacgtggactctgtgaagggcagattcaccatcagccgggacaacgccaagaagtccctgtacctccagatgaacagcctgagagccgaggacaccgccgtgtactattgtgcctctggcgtgtacagcttcgactacagaggccagggcaccctggtcacagtctcttctggtaccggcggaggcggatctggcggcggaggtagcggtggcggaggatctgaattccagtctgccctgacacagcctcctagcgcctctggctctcccggccagagcatcaccatcagctgtaccggcaccagcaacaacttcgtgtcctggtatcagcagcacgccggcaaggcccccaagctcgtgatctacgacgtgaacaagcggcccagcggcgtgcccgatagattcagcggcagcaagagcggcaacaccgccagcctgacagtgtctggcctccagaccgatgacgaggccgtgtactactgcggcagcctcgtgggcaactgggacgtgatctttggcggaggcaccaagctgaccgtgctgctcgagggacagcctaaggccaatcctaccgtgacactgttccctccaagcagcgaagaactccaggccaacaaggccacacttgtgtgcctgatctccgacttctaccctggggctgtgacagtggcttggaaggccgatggatctcctgtgaaagccggcgtggaaaccaccaagccatccaagcagagcaacaacaaatacgccgccagctcctacctgagcctgacacctgagcagtggaagtcccacagatcctacagctgccaagtgacccacgaaggcagcaccgtggaaaagacagtggcccctacagagtgcagccccatcaagaccgatgtgattacaatggaccccaaggacaactgctccaaggacgccaacgataccctgctgctccagctgaccaacaccagcgcctactacatgtacttgttgctgctgctgaagtccgtggtgtacttcgccatcatcacatgctgcctgctgcggagaaccgccttctgctgcaacggcgagaagtctagggccaagcgatctggatctggagcaacaaacttctcactactcaaacaagcaggtgacgtggaggagaatcccgggcctactagtatggactggatttggcgcatccttttccttgtcggcgctgctaccggcgcgcattccgggccccagctccagctgcaagagtctggacctggcctggtcaagcctagcgagacactgagcctgacctgtaccgtgtccggcgatagcatcagcagcggcgattactactggggctggatcagacagcctcctggcaaaggactggaatggatcggccacatctactacagcggcgtgacctactacaaccccagcctgaagtccagagtgaccatcagcgtggacaccagccggaaccagttctccctgaagctgtctagcgtgacagccgccgataccgccgtgtactactgcaccagagaggacagcagcaactggcggagtagaggccagggaacactggtcacagttagctctggatccggcggaggcggaagtggaggcggaggatctggcggcggaggctctttcgaacagccccagctccaggaatctggccccacactggtggaagccagcgagacactgagcctgacctgtgccgtgtccggcgattctaccgccgcctgcaatagcttctggggctgggtgcgccagcctcctggaaagggactggaatgggtgggaagcctgagccactgcgccagctattggaaccggggctggacctaccacaaccccagcctgaagtccagactgaccctggccctggacacccccaagaacctggtgttcctgaagctgaacagcgtgacagccgccgacaccgccacctactactgtgccagatttggcggcgaggtgctgcggtacaccgactggcctaaacctgcctgggtggacctgtggggcagaggaacactcgtgaccgtgtccagcacgcgtgcctctacaaagggaccctccgtgtttcctctggctcccagcagcaagtctacaagcggaggaacagccgctctgggctgcctggtcaaggattactttcccgagcctgtgaccgtgtcctggaatagcggagcactgacaagcggcgtgcacacctttccagccgtgctgcaaagcagcggcctgtactctctgagcagcgtggtcacagtgcctagctctagcctgggcacccagacctacatctgcaatgtgaaccacaagcctagcaacaccaaggtggacaagagagtggaacccaagagctgtgaagtgaaaaccgactccaccgaccacgtgaagcccaaagagacagagaacaccaagcagcccagcaagagctgccacaagcccaaggccatcgtgcacaccgagaaagtgaacatgatgagcctgaccgtgctgggcctgcggatgctgttcgccaaaaccgtggccgtgaacttcctgctgaccgccaagctgttcttcctc

SEQ ID NO: 3072 - DNA, 2748 bp, Artificial Sequence
  Synthetic Polynucloetide
atggccttaccagtgaccgccttgctcctgccgctggccttgctgctccacgccgccaggccggaagtgcagctggttgaatctggcggaggactggttcagcctggcggatctctgagactgtcttgtgccgccagcggcttcagcttcagcgacttttggatgagctgggtccgacaggcccctggcaaaggacttgaatgggtcgccacaatcagccaggccggcagcgagaaggactacgtggactctgtgaagggcagattcaccatcagccgggacaacgccaagaagtccctgtacctccagatgaacagcctgagagccgaggacaccgccgtgtactattgtgcctctggcgtgtacagcttcgactacagaggccagggcaccctggtcacagtctcttctggtaccggcggaggcggatctggcggcggaggtagcggtggcggaggatctgaattcgagatcgtgctgacacagagccctggcaccctgagcctgtctccaggcgagacagccatcatcagctgccggacaagccagtacggcagcctggcctggtatcagcagaggccaggacaggcccccagactcgtgatctacagcggcagcacaagagccgccggaatccccgatagattcagcggctccagatggggacccgactacaacctgaccatcagcaacctggaaagcggcgacttcggcgtgtactactgccagcagtacgagttcttcggccagggcaccaaggtgcaggtggacatcaaaagactcgagggacagcctaaggccaatcctaccgtgacactgttccctccaagcagcgaagaactccaggccaacaaggccacacttgtgtgcctgatctccgacttctaccctggggctgtgacagtggcttggaaggccgatggatctcctgtgaaagccggcgtggaaaccaccaagccatccaagcagagcaacaacaaatacgccgccagctcctacctgagcctgacacctgagcagtggaagtcccacagatcctacagctgccaagtgacccacgaaggcagcaccgtggaaaagacagtggcccctacagagtgcagccccatcaagaccgatgtgattacaatggaccccaaggacaactgctccaaggacgccaacgataccctgctgctccagctgaccaacaccagcgcctactacatgtacttgttgctgctgctgaagtccgtggtgtacttcgccatcatcacatgctgcctgctgcggagaaccgccttctgctgcaacggcgagaagtctagggccaagcgatctggatctggagcaacaaacttctcactactcaaacaagcaggtgacgtggaggagaatcccgggcctactagtatggactggatttggcgcatccttttccttgtcggcgctgctaccggcgcgcattccgggccccagctccagctgcaagagtctggacctggcctggtcaagcctagcgagacactgagcctgacctgtaccgtgtccggcgatagcatcagcagcggcgattactactggggctggatcagacagcctcctggcaaaggactggaatggatcggccacatctactacagcggcgtgacctactacaaccccagcctgaagtccagagtgaccatcagcgtggacaccagccggaaccagttctccctgaagctgtctagcgtgacagccgccgataccgccgtgtactactgcaccagagaggacagcagcaactggcggagtagaggccagggaacactggtcacagttagctctggatccggcggaggcggaagtggaggcggaggatctggcggcggaggctctttcgaacaggtgcagctggtgcagtctggcggccagatgaagaaacccggcgagagcatgagaatcagctgtcgggcctccggctacgagttcatcgactgcaccctgaactggatcagactggcccctggcaagcggcctgagtggatgggatggctgaagcctagaggcggagccgtgaactacgccagacctctccagggcagagtgaccatgaccagggacgtgtacagcgataccgccttcctggaactgcggagcctgaccgtggatgataccgccgtgtacttctgcaccagaggcaagaactgcgattacaactgggacttcgagcactggggcagaggcacccctgtgatcgtgtctagcacgcgtgcctctacaaagggaccctccgtgtttcctctggctcccagcagcaagtctacaagcggaggaacagccgctctgggctgcctggtcaaggattactttcccgagcctgtgaccgtgtcctggaatagcggagcactgacaagcggcgtgcacacctttccagccgtgctgcaaagcagcggcctgtactctctgagcagcgtggtcacagtgcctagctctagcctgggcacccagacctacatctgcaatgtgaaccacaagcctagcaacaccaaggtggacaagagagtggaacccaagagctgtgaagtgaaaaccgactccaccgaccacgtgaagcccaaagagacagagaacaccaagcagcccagcaagagctgccacaagcccaaggccatcgtgcacaccgagaaagtgaacatgatgagcctgaccgtgctgggcctgcggatgctgttcgccaaaaccgtggccgtgaacttcctgctgaccgccaagctgttcttcctc

SEQ ID NO: 3073 - DNA, 2778 bp, Artificial Sequence
  Synthetic Polynucloetide
atggccttaccagtgaccgccttgctcctgccgctggccttgctgctccacgccgccaggccggaagtgcagctggttgaatctggcggaggactggttcagcctggcggatctctgagactgtcttgtgccgccagcggcttcagcttcagcgacttttggatgagctgggtccgacaggcccctggcaaaggacttgaatgggtcgccacaatcagccaggccggcagcgagaaggactacgtggactctgtgaagggcagattcaccatcagccgggacaacgccaagaagtccctgtacctccagatgaacagcctgagagccgaggacaccgccgtgtactattgtgcctctggcgtgtacagcttcgactacagaggccagggcaccctggtcacagtctcttctggtaccggcggaggcggatctggcggcggaggtagcggtggcggaggatctgaattcgagctggtgctgacacagagccctggcaccctgtctctgtctgccggcgaaagagccaccctgagctgtagagccagccagagcgtgtcctctggcagcctggcttggtatcagcagaagccaggccaggcccccagactgctgatctacggcgcttctaccagagccaccggcatccccgatagattcagcggctctggctccggcaccgacttcaccctgacaatcggcagactggaacccgaggacctggccgtgtactactgccagcagtacggcaccagcccctacacattcggccagggcaccaagctggaaatcctcgagggacagcctaaggccaatcctaccgtgacactgttccctccaagcagcgaagaactccaggccaacaaggccacacttgtgtgcctgatctccgacttctaccctggggctgtgacagtggcttggaaggccgatggatctcctgtgaaagccggcgtggaaaccaccaagccatccaagcagagcaacaacaaatacgccgccagctcctacctgagcctgacacctgagcagtggaagtcccacagatcctacagctgccaagtgacccacgaaggcagcaccgtggaaaagacagtggcccctacagagtgcagccccatcaagaccgatgtgattacaatggaccccaaggacaactgctccaaggacgccaacgataccctgctgctccagctgaccaacaccagcgcctactacatgtacttgttgctgctgctgaagtccgtggtgtacttcgccatcatcacatgctgcctgctgcggagaaccgccttctgctgcaacggcgagaagtctagggccaagcgatctggatctggagcaacaaacttctcactactcaaacaagcaggtgacgtggaggagaatcccgggcctactagtatggactggatttggcgcatccttttccttgtcggcgctgctaccggcgcgcattccgggccccagctccagctgcaagagtctggacctggcctggtcaagcctagcgagacactgagcctgacctgtaccgtgtccggcgatagcatcagcagcggcgattactactggggctggatcagacagcctcctggcaaaggactggaatggatcggccacatctactacagcggcgtgacctactacaaccccagcctgaagtccagagtgaccatcagcgtggacaccagccggaaccagttctccctgaagctgtctagcgtgacagccgccgataccgccgtgtactactgcaccagagaggacagcagcaactggcggagtagaggccagggaacactggtcacagttagctctggatccggcggaggcggaagtggaggcggaggatctggcggcggaggctctttcgaactggaacagagcggagccgaagtgaagaaacccggcagcagcgtgcaggtgtcctgcaaagcaagcggcggcaccttctctatgtacggcttcaactgggtgcgccaggctcctggacacggcctggaatggatgggcggcatcatccccatcttcggcacctccaactacgcccagaaattccggggcagagtgaccttcaccgccgaccaggccacaagcaccgcctacatggaactgaccaacctgcggagcgacgacaccgccgtgtattattgcgccagagacttcggccccgactgggaggatggcgacagctacgatggcagcggcagaggcttcttcgacttctggggccagggaacccttgtgaccgtgtcctcaacgcgtgcctctacaaagggaccctccgtgtttcctctggctcccagcagcaagtctacaagcggaggaacagccgctctgggctgcctggtcaaggattactttcccgagcctgtgaccgtgtcctggaatagcggagcactgacaagcggcgtgcacacctttccagccgtgctgcaaagcagcggcctgtactctctgagcagcgtggtcacagtgcctagctctagcctgggcacccagacctacatctgcaatgtgaaccacaagcctagcaacaccaaggtggacaagagagtggaacccaagagctgtgaagtgaaaaccgactccaccgaccacgtgaagcccaaagagacagagaacaccaagcagcccagcaagagctgccacaagcccaaggccatcgtgcacaccgagaaagtgaacatgatgagcctgaccgtgctgggcctgcggatgctgttcgccaaaaccgtggccgtgaacttcctgctgaccgccaagctgttcttcctc

SEQ ID NO: 3074 - DNA, 2718 bp, Artificial Sequence
  Synthetic Polynucloetide
atggccttaccagtgaccgccttgctcctgccgctggccttgctgctccacgccgccaggccggaagtgcagctggttgaatctggcggaggactggttcagcctggcggatctctgagactgtcttgtgccgccagcggcttcagcttcagcgacttttggatgagctgggtccgacaggcccctggcaaaggacttgaatgggtcgccacaatcagccaggccggcagcgagaaggactacgtggactctgtgaagggcagattcaccatcagccgggacaacgccaagaagtccctgtacctccagatgaacagcctgagagccgaggacaccgccgtgtactattgtgcctctggcgtgtacagcttcgactacagaggccagggcaccctggtcacagtctcttctggtaccggcggaggcggatctggcggcggaggtagcggtggcggaggatctgaattcgacatccagatgacccagagccccagcagcctgtctgccagcgtgggcgacagagtgaccatcacctgtcaggccagccaggacatcaacaactacctgaactggtatcagcagaagcccggcaaggcccccaagctgctgatctacgacgccagcaatctgcagaccggcgtgcccagcagattttccggctctggcagcggcaccgacttcaccttcaccatcgaggacattgccacctactactgccagcagtacaccttcggccctggcaccaaggtggacatcaaactcgagggacagcctaaggccaatcctaccgtgacactgttccctccaagcagcgaagaactccaggccaacaaggccacacttgtgtgcctgatctccgacttctaccctggggctgtgacagtggcttggaaggccgatggatctcctgtgaaagccggcgtggaaaccaccaagccatccaagcagagcaacaacaaatacgccgccagctcctacctgagcctgacacctgagcagtggaagtcccacagatcctacagctgccaagtgacccacgaaggcagcaccgtggaaaagacagtggcccctacagagtgcagccccatcaagaccgatgtgattacaatggaccccaaggacaactgctccaaggacgccaacgataccctgctgctccagctgaccaacaccagcgcctactacatgtacttgttgctgctgctgaagtccgtggtgtacttcgccatcatcacatgctgcctgctgcggagaaccgccttctgctgcaacggcgagaagtctagggccaagcgatctggatctggagcaacaaacttctcactactcaaacaagcaggtgacgtggaggagaatcccgggcctactagtatggactggatttggcgcatccttttccttgtcggcgctgctaccggcgcgcattccgggccccagctccagctgcaagagtctggacctggcctggtcaagcctagcgagacactgagcctgacctgtaccgtgtccggcgatagcatcagcagcggcgattactactggggctggatcagacagcctcctggcaaaggactggaatggatcggccacatctactacagcggcgtgacctactacaaccccagcctgaagtccagagtgaccatcagcgtggacaccagccggaaccagttctccctgaagctgtctagcgtgacagccgccgataccgccgtgtactactgcaccagagaggacagcagcaactggcggagtagaggccagggaacactggtcacagttagctctggatccggcggaggcggaagtggaggcggaggatctggcggcggaggctctttcgaagaagtgcaactgctggaatctggcggcggactggtgcagcctggcggatctctgagactgagctgtgccgccagcggcttcacctttagctggtacagcatgacctgggtgcgccaggcccctggcaaaggactggaatgggtgtccagcatcgtgccctggggcgatttcacccagtacgccgatagcgtgaagggccggttcaccatcagccgggacaacagcaagaacaccctgtacctgcagatgaacagcctgcgggccgaggacaccgccgtgtactattgtgccaagggacctggctggggcagcttcgatctgtggggcagaggaacccttgtgaccgtgtccagcacgcgtgcctctacaaagggaccctccgtgtttcctctggctcccagcagcaagtctacaagcggaggaacagccgctctgggctgcctggtcaaggattactttcccgagcctgtgaccgtgtcctggaatagcggagcactgacaagcggcgtgcacacctttccagccgtgctgcaaagcagcggcctgtactctctgagcagcgtggtcacagtgcctagctctagcctgggcacccagacctacatctgcaatgtgaaccacaagcctagcaacaccaaggtggacaagagagtggaacccaagagctgtgaagtgaaaaccgactccaccgaccacgtgaagcccaaagagacagagaacaccaagcagcccagcaagagctgccacaagcccaaggccatcgtgcacaccgagaaagtgaacatgatgagcctgaccgtgctgggcctgcggatgctgttcgccaaaaccgtggccgtgaacttcctgctgaccgccaagctgttcttcctc

SEQ ID NO: 3075 - DNA, 2748 bp, Artificial Sequence
  Synthetic Polynucloetide
atggccttaccagtgaccgccttgctcctgccgctggccttgctgctccacgccgccaggccggaagtgcagctggttgaatctggcggaggactggttcagcctggcggatctctgagactgtcttgtgccgccagcggcttcagcttcagcgacttttggatgagctgggtccgacaggcccctggcaaaggacttgaatgggtcgccacaatcagccaggccggcagcgagaaggactacgtggactctgtgaagggcagattcaccatcagccgggacaacgccaagaagtccctgtacctccagatgaacagcctgagagccgaggacaccgccgtgtactattgtgcctctggcgtgtacagcttcgactacagaggccagggcaccctggtcacagtctcttctggtaccggcggaggcggatctggcggcggaggtagcggtggcggaggatctgaattcgacatccagatgacccagagccccagcagcctgtctgccagcgtgggcgacagagtgaccatcacctgtaccgccagcctgagcgtgtccagcacctacctgcactggtatcagcagaagcccggcagcagccccaagctgtggatctacagcaccagcaacctggcctccggcgtgcccagcagattttctggcagcggctctggcaccagctacaccctgaccatcagctccctccagcccgaggacttcgccacctactactgccaccagtaccacagaagccccctgacctttggcggaggcaccaaggtggaaatcaagagactcgagggacagcctaaggccaatcctaccgtgacactgttccctccaagcagcgaagaactccaggccaacaaggccacacttgtgtgcctgatctccgacttctaccctggggctgtgacagtggcttggaaggccgatggatctcctgtgaaagccggcgtggaaaccaccaagccatccaagcagagcaacaacaaatacgccgccagctcctacctgagcctgacacctgagcagtggaagtcccacagatcctacagctgccaagtgacccacgaaggcagcaccgtggaaaagacagtggcccctacagagtgcagccccatcaagaccgatgtgattacaatggaccccaaggacaactgctccaaggacgccaacgataccctgctgctccagctgaccaacaccagcgcctactacatgtacttgttgctgctgctgaagtccgtggtgtacttcgccatcatcacatgctgcctgctgcggagaaccgccttctgctgcaacggcgagaagtctagggccaagcgatctggatctggagcaacaaacttctcactactcaaacaagcaggtgacgtggaggagaatcccgggcctactagtatggactggatttggcgcatccttttccttgtcggcgctgctaccggcgcgcattccgggccccagctccagctgcaagagtctggacctggcctggtcaagcctagcgagacactgagcctgacctgtaccgtgtccggcgatagcatcagcagcggcgattactactggggctggatcagacagcctcctggcaaaggactggaatggatcggccacatctactacagcggcgtgacctactacaaccccagcctgaagtccagagtgaccatcagcgtggacaccagccggaaccagttctccctgaagctgtctagcgtgacagccgccgataccgccgtgtactactgcaccagagaggacagcagcaactggcggagtagaggccagggaacactggtcacagttagctctggatccggcggaggcggaagtggaggcggaggatctggcggcggaggctctttcgaagaagtgcaactggtggaatctggcggcggactggtgcagcctggcggatctctgagactgagctgtgccgccagcggcttcagcctgaccaaatacggcgtgcactgggtgcgccaggcccctggaaaaggactggaatgggtgggagtgaagtgggctggcggctccaccgactacaacagcgccctgatgagccggttcaccatcagcaaggacaacgccaagaacagcctgtacctccagatgaactccctgcgggccgaggacaccgccgtgtactactgtgccagagatcaccgggacgctatggactactggggccagggaacactcgtgaccgtgtcctctacgcgtgcctctacaaagggaccctccgtgtttcctctggctcccagcagcaagtctacaagcggaggaacagccgctctgggctgcctggtcaaggattactttcccgagcctgtgaccgtgtcctggaatagcggagcactgacaagcggcgtgcacacctttccagccgtgctgcaaagcagcggcctgtactctctgagcagcgtggtcacagtgcctagctctagcctgggcacccagacctacatctgcaatgtgaaccacaagcctagcaacaccaaggtggacaagagagtggaacccaagagctgtgaagtgaaaaccgactccaccgaccacgtgaagcccaaagagacagagaacaccaagcagcccagcaagagctgccacaagcccaaggccatcgtgcacaccgagaaagtgaacatgatgagcctgaccgtgctgggcctgcggatgctgttcgccaaaaccgtggccgtgaacttcctgctgaccgccaagctgttcttcctc

SEQ ID NO: 3076 - DNA, 2760 bp, Artificial Sequence
  Synthetic Polynucloetide
atggccttaccagtgaccgccttgctcctgccgctggccttgctgctccacgccgccaggccggaagtgcagctggttgaatctggcggaggactggttcagcctggcggatctctgagactgtcttgtgccgccagcggcttcagcttcagcgacttttggatgagctgggtccgacaggcccctggcaaaggacttgaatgggtcgccacaatcagccaggccggcagcgagaaggactacgtggactctgtgaagggcagattcaccatcagccgggacaacgccaagaagtccctgtacctccagatgaacagcctgagagccgaggacaccgccgtgtactattgtgcctctggcgtgtacagcttcgactacagaggccagggcaccctggtcacagtctcttctggtaccggcggaggcggatctggcggcggaggtagcggtggcggaggatctgaattcgacatccagatgacccagagccccagcagcctgtctgccagcgtgggcgacagagtgaccatcacatgcaaggccagccaggacgtgggaacagccgtggcctggtatcagcagaagcctggcaaggcccccaagctgctgatctacagcgccagctacagatccaccggcgtgcccagcagattttccggctctggcagcggcaccgacttcaccctgaccatctctagcctccagcccgaggacttcgccacctactactgccagcaccactactccgccccctggacatttggcggaggcaccaaggtggaaatcaagctcgagggacagcctaaggccaatcctaccgtgacactgttccctccaagcagcgaagaactccaggccaacaaggccacacttgtgtgcctgatctccgacttctaccctggggctgtgacagtggcttggaaggccgatggatctcctgtgaaagccggcgtggaaaccaccaagccatccaagcagagcaacaacaaatacgccgccagctcctacctgagcctgacacctgagcagtggaagtcccacagatcctacagctgccaagtgacccacgaaggcagcaccgtggaaaagacagtggcccctacagagtgcagccccatcaagaccgatgtgattacaatggaccccaaggacaactgctccaaggacgccaacgataccctgctgctccagctgaccaacaccagcgcctactacatgtacttgttgctgctgctgaagtccgtggtgtacttcgccatcatcacatgctgcctgctgcggagaaccgccttctgctgcaacggcgagaagtctagggccaagcgatctggatctggagcaacaaacttctcactactcaaacaagcaggtgacgtggaggagaatcccgggcctactagtatggactggatttggcgcatccttttccttgtcggcgctgctaccggcgcgcattccgggccccagctccagctgcaagagtctggacctggcctggtcaagcctagcgagacactgagcctgacctgtaccgtgtccggcgatagcatcagcagcggcgattactactggggctggatcagacagcctcctggcaaaggactggaatggatcggccacatctactacagcggcgtgacctactacaaccccagcctgaagtccagagtgaccatcagcgtggacaccagccggaaccagttctccctgaagctgtctagcgtgacagccgccgataccgccgtgtactactgcaccagagaggacagcagcaactggcggagtagaggccagggaacactggtcacagttagctctggatccggcggaggcggaagtggaggcggaggatctggcggcggaggctctttcgaagaagtgcaactggtggaatcaggcggcggactggtgcagcctggcggatctctgagactgagctgtgccgccagcggcttcaccttcagcagaaacggcatgagctgggtgcgccaggcccctggaaaaggactggaatgggtggcaaccgtgtccagcggcggcagctacatctactacgccgacagcgtgaagggccggttcaccatctccagagacaacgccaagaacagcctgtacctccagatgaactccctgcgggccgaggacaccgccgtgtactattgtgccagacagggcaccaccgccctggctaccagattcttcgatgtgtggggccagggcaccctcgtgaccgtgtcatctacgcgtgcctctacaaagggaccctccgtgtttcctctggctcccagcagcaagtctacaagcggaggaacagccgctctgggctgcctggtcaaggattactttcccgagcctgtgaccgtgtcctggaatagcggagcactgacaagcggcgtgcacacctttccagccgtgctgcaaagcagcggcctgtactctctgagcagcgtggtcacagtgcctagctctagcctgggcacccagacctacatctgcaatgtgaaccacaagcctagcaacaccaaggtggacaagagagtggaacccaagagctgtgaagtgaaaaccgactccaccgaccacgtgaagcccaaagagacagagaacaccaagcagcccagcaagagctgccacaagcccaaggccatcgtgcacaccgagaaagtgaacatgatgagcctgaccgtgctgggcctgcggatgctgttcgccaaaaccgtggccgtgaacttcctgctgaccgccaagctgttcttcctc

SEQ ID NO: 3077 - DNA, 2748 bp, Artificial Sequence
  Synthetic Polynucloetide
atggccttaccagtgaccgccttgctcctgccgctggccttgctgctccacgccgccaggccggaagtgcagctggttgaatctggcggaggactggttcagcctggcggatctctgagactgtcttgtgccgccagcggcttcagcttcagcgacttttggatgagctgggtccgacaggcccctggcaaaggacttgaatgggtcgccacaatcagccaggccggcagcgagaaggactacgtggactctgtgaagggcagattcaccatcagccgggacaacgccaagaagtccctgtacctccagatgaacagcctgagagccgaggacaccgccgtgtactattgtgcctctggcgtgtacagcttcgactacagaggccagggcaccctggtcacagtctcttctggtaccggcggaggcggatctggcggcggaggtagcggtggcggaggatctgaattcgacatccagatgacccagagcccccctagcctgtctgcctctgtgggcggcaaagtgaccatcacatgcaaggccagccaggacatcgaccgctacatggcctggtatcaggacaagcccggcaagggacccaagctgctgatccacgataccagcaccctccagcccggcatccccagcagattttctggcagcggctccggcagagactacagcttcagcatcagcaacctggaacccgaggacattgccacctactactgcctccagtacgacaacctgtggaccttcggcggaggcaccaagctggaaatcaagagactcgagggacagcctaaggccaatcctaccgtgacactgttccctccaagcagcgaagaactccaggccaacaaggccacacttgtgtgcctgatctccgacttctaccctggggctgtgacagtggcttggaaggccgatggatctcctgtgaaagccggcgtggaaaccaccaagccatccaagcagagcaacaacaaatacgccgccagctcctacctgagcctgacacctgagcagtggaagtcccacagatcctacagctgccaagtgacccacgaaggcagcaccgtggaaaagacagtggcccctacagagtgcagccccatcaagaccgatgtgattacaatggaccccaaggacaactgctccaaggacgccaacgataccctgctgctccagctgaccaacaccagcgcctactacatgtacttgttgctgctgctgaagtccgtggtgtacttcgccatcatcacatgctgcctgctgcggagaaccgccttctgctgcaacggcgagaagtctagggccaagcgatctggatctggagcaacaaacttctcactactcaaacaagcaggtgacgtggaggagaatcccgggcctactagtatggactggatttggcgcatccttttccttgtcggcgctgctaccggcgcgcattccgggccccagctccagctgcaagagtctggacctggcctggtcaagcctagcgagacactgagcctgacctgtaccgtgtccggcgatagcatcagcagcggcgattactactggggctggatcagacagcctcctggcaaaggactggaatggatcggccacatctactacagcggcgtgacctactacaaccccagcctgaagtccagagtgaccatcagcgtggacaccagccggaaccagttctccctgaagctgtctagcgtgacagccgccgataccgccgtgtactactgcaccagagaggacagcagcaactggcggagtagaggccagggaacactggtcacagttagctctggatccggcggaggcggaagtggaggcggaggatctggcggcggaggctctttcgaacaggtgcaactggtgcagagcggagccgagcttgtgaagcctggcgcttccgtgaagatgagctgcaaagccagcggctacatcttcaccaactacaacatccactgggtcaagaagtccccaggccagggcctggaatggatcggagccatctaccccggaaacggcgacgccccttacagccagaagttccaggacagagccaccctgaccgccgacaccagcagcagcaccacctacatggaactgagcagcctgaccagcgaggacagcgccgtgtactattgcgtgcgggccaactgggatgtggccttcgcctattggggccagggcacactggtgtccgtgtcctctacgcgtgcctctacaaagggaccctccgtgtttcctctggctcccagcagcaagtctacaagcggaggaacagccgctctgggctgcctggtcaaggattactttcccgagcctgtgaccgtgtcctggaatagcggagcactgacaagcggcgtgcacacctttccagccgtgctgcaaagcagcggcctgtactctctgagcagcgtggtcacagtgcctagctctagcctgggcacccagacctacatctgcaatgtgaaccacaagcctagcaacaccaaggtggacaagagagtggaacccaagagctgtgaagtgaaaaccgactccaccgaccacgtgaagcccaaagagacagagaacaccaagcagcccagcaagagctgccacaagcccaaggccatcgtgcacaccgagaaagtgaacatgatgagcctgaccgtgctgggcctgcggatgctgttcgccaaaaccgtggccgtgaacttcctgctgaccgccaagctgttcttcctc

SEQ ID NO: 3078 - DNA, 2751 bp, Artificial Sequence
  Synthetic Polynucloetide
atggccttaccagtgaccgccttgctcctgccgctggccttgctgctccacgccgccaggccggaagtgcagctggttgaatctggcggaggactggttcagcctggcggatctctgagactgtcttgtgccgccagcggcttcagcttcagcgacttttggatgagctgggtccgacaggcccctggcaaaggacttgaatgggtcgccacaatcagccaggccggcagcgagaaggactacgtggactctgtgaagggcagattcaccatcagccgggacaacgccaagaagtccctgtacctccagatgaacagcctgagagccgaggacaccgccgtgtactattgtgcctctggcgtgtacagcttcgactacagaggccagggcaccctggtcacagtctcttctggtaccggcggaggcggatctggcggcggaggtagcggtggcggaggatctgaattcgacatccagatgacccagagccctgccagcctgtctgcctctgtgggcgagacagtgaccatcacctgtcgggtgtccggcaacatccacaactacctggcctggtatcagcagaagcagggcaagagcccccaactgctggtgtacaacgccaagaccctggccgatggcgtgcccagcagattttctggctctggcagcggcacccagtacagcctgaagatcaacagcctccagcccgaggacttcggcagctactactgccagcacttctggtccaacccctacaccttcggcggaggcaccaagctggaaatcaagctcgagggacagcctaaggccaatcctaccgtgacactgttccctccaagcagcgaagaactccaggccaacaaggccacacttgtgtgcctgatctccgacttctaccctggggctgtgacagtggcttggaaggccgatggatctcctgtgaaagccggcgtggaaaccaccaagccatccaagcagagcaacaacaaatacgccgccagctcctacctgagcctgacacctgagcagtggaagtcccacagatcctacagctgccaagtgacccacgaaggcagcaccgtggaaaagacagtggcccctacagagtgcagccccatcaagaccgatgtgattacaatggaccccaaggacaactgctccaaggacgccaacgataccctgctgctccagctgaccaacaccagcgcctactacatgtacttgttgctgctgctgaagtccgtggtgtacttcgccatcatcacatgctgcctgctgcggagaaccgccttctgctgcaacggcgagaagtctagggccaagcgatctggatctggagcaacaaacttctcactactcaaacaagcaggtgacgtggaggagaatcccgggcctactagtatggactggatttggcgcatccttttccttgtcggcgctgctaccggcgcgcattccgggccccagctccagctgcaagagtctggacctggcctggtcaagcctagcgagacactgagcctgacctgtaccgtgtccggcgatagcatcagcagcggcgattactactggggctggatcagacagcctcctggcaaaggactggaatggatcggccacatctactacagcggcgtgacctactacaaccccagcctgaagtccagagtgaccatcagcgtggacaccagccggaaccagttctccctgaagctgtctagcgtgacagccgccgataccgccgtgtactactgcaccagagaggacagcagcaactggcggagtagaggccagggaacactggtcacagttagctctggatccggcggaggcggaagtggaggcggaggatctggcggcggaggctctttcgaacaggtgcaactccagcagtctggcgcttccgtgaaggtgtcctgcaaggccagcgaactcgtgcggcctggcacaggctacgccttcaccaattacctgatcgagtgggtcaagcagaggcccggacagggcctggaatggatcggagtgattaacccaggcagcggcggcaccaactacaacgagaagttcaagggcaaggccaccctgaccgccgacaagagcagcagcacagcctacatgcaactgagcagcctgaccagcgacgacagcgccgtgtacttctgcgcccggtacagaagctacgactggtacttcgacgtgtggggagccggcaccaccgtgacagtgtcatctacgcgtgcctctacaaagggaccctccgtgtttcctctggctcccagcagcaagtctacaagcggaggaacagccgctctgggctgcctggtcaaggattactttcccgagcctgtgaccgtgtcctggaatagcggagcactgacaagcggcgtgcacacctttccagccgtgctgcaaagcagcggcctgtactctctgagcagcgtggtcacagtgcctagctctagcctgggcacccagacctacatctgcaatgtgaaccacaagcctagcaacaccaaggtggacaagagagtggaacccaagagctgtgaagtgaaaaccgactccaccgaccacgtgaagcccaaagagacagagaacaccaagcagcccagcaagagctgccacaagcccaaggccatcgtgcacaccgagaaagtgaacatgatgagcctgaccgtgctgggcctgcggatgctgttcgccaaaaccgtggccgtgaacttcctgctgaccgccaagctgttcttcctc

SEQ ID NO: 3079 - DNA, 2748 bp, Artificial Sequence
  Synthetic Polynucloetide
atggccttaccagtgaccgccttgctcctgccgctggccttgctgctccacgccgccaggccggaagtgcagctggttgaatctggcggaggactggttcagcctggcggatctctgagactgtcttgtgccgccagcggcttcagcttcagcgacttttggatgagctgggtccgacaggcccctggcaaaggacttgaatgggtcgccacaatcagccaggccggcagcgagaaggactacgtggactctgtgaagggcagattcaccatcagccgggacaacgccaagaagtccctgtacctccagatgaacagcctgagagccgaggacaccgccgtgtactattgtgcctctggcgtgtacagcttcgactacagaggccagggcaccctggtcacagtctcttctggtaccggcggaggcggatctggcggcggaggtagcggtggcggaggatctgaattcgacatccagatgacccagagcttcagcagcctgagcgccagcgtgggcgacagagtgaccatcacctgtagagccagccaggacatcagcaactacctgaactggtatcagcagaagcccggcaaggcccccaagctgctgatctactacaccagcagactgcacagcggcgtgcccagcagattttctggcagcggctccggcaccgactacaccctgacaatcagctccctgcagcccgaggacttcgctacctacttctgtcagcaaggcaacaccctgccctggacctttggcggaggcaccaagctggaaatcaagagactcgagggacagcctaaggccaatcctaccgtgacactgttccctccaagcagcgaagaactccaggccaacaaggccacacttgtgtgcctgatctccgacttctaccctggggctgtgacagtggcttggaaggccgatggatctcctgtgaaagccggcgtggaaaccaccaagccatccaagcagagcaacaacaaatacgccgccagctcctacctgagcctgacacctgagcagtggaagtcccacagatcctacagctgccaagtgacccacgaaggcagcaccgtggaaaagacagtggcccctacagagtgcagccccatcaagaccgatgtgattacaatggaccccaaggacaactgctccaaggacgccaacgataccctgctgctccagctgaccaacaccagcgcctactacatgtacttgttgctgctgctgaagtccgtggtgtacttcgccatcatcacatgctgcctgctgcggagaaccgccttctgctgcaacggcgagaagtctagggccaagcgatctggatctggagcaacaaacttctcactactcaaacaagcaggtgacgtggaggagaatcccgggcctactagtatggactggatttggcgcatccttttccttgtcggcgctgctaccggcgcgcattccgggccccagctccagctgcaagagtctggacctggcctggtcaagcctagcgagacactgagcctgacctgtaccgtgtccggcgatagcatcagcagcggcgattactactggggctggatcagacagcctcctggcaaaggactggaatggatcggccacatctactacagcggcgtgacctactacaaccccagcctgaagtccagagtgaccatcagcgtggacaccagccggaaccagttctccctgaagctgtctagcgtgacagccgccgataccgccgtgtactactgcaccagagaggacagcagcaactggcggagtagaggccagggaacactggtcacagttagctctggatccggcggaggcggaagtggaggcggaggatctggcggcggaggctctttcgaagaagtgcaactggtgcagtccggcggagggctggtgcagagcggaggatctctgagactgagctgcagagccagcggctacaccttcacccggtactggatgctgtgggtgcgccagaggccaggcaagggactggaatgggtggccgagatcaacccccggaacgaccggaccaactacaacgagaagttcaagacccggttcaccatcagcgtggacagaagcaagaacaccctgtacctgcagatggacagcctgcgggccgaggataccgccgtgtacttttgtgctctgggaggcggctacgctatggactactggggccagggaacccttgtgaccgtgtcctctacgcgtgcctctacaaagggaccctccgtgtttcctctggctcccagcagcaagtctacaagcggaggaacagccgctctgggctgcctggtcaaggattactttcccgagcctgtgaccgtgtcctggaatagcggagcactgacaagcggcgtgcacacctttccagccgtgctgcaaagcagcggcctgtactctctgagcagcgtggtcacagtgcctagctctagcctgggcacccagacctacatctgcaatgtgaaccacaagcctagcaacaccaaggtggacaagagagtggaacccaagagctgtgaagtgaaaaccgactccaccgaccacgtgaagcccaaagagacagagaacaccaagcagcccagcaagagctgccacaagcccaaggccatcgtgcacaccgagaaagtgaacatgatgagcctgaccgtgctgggcctgcggatgctgttcgccaaaaccgtggccgtgaacttcctgctgaccgccaagctgttcttcctc

SEQ ID NO: 3080 - DNA, 2751 bp, Artificial Sequence
  Synthetic Polynucloetide
atggccttaccagtgaccgccttgctcctgccgctggccttgctgctccacgccgccaggccggaagtgcagctggttgaatctggcggaggactggttcagcctggcggatctctgagactgtcttgtgccgccagcggcttcagcttcagcgacttttggatgagctgggtccgacaggcccctggcaaaggacttgaatgggtcgccacaatcagccaggccggcagcgagaaggactacgtggactctgtgaagggcagattcaccatcagccgggacaacgccaagaagtccctgtacctccagatgaacagcctgagagccgaggacaccgccgtgtactattgtgcctctggcgtgtacagcttcgactacagaggccagggcaccctggtcacagtctcttctggtaccggcggaggcggatctggcggcggaggtagcggtggcggaggatctgaattcgacatccagatgacacagtctccggcgtcactgtccgcctccgtgggggagactgtgactattatttgtagggcatcagttaacatctactcttatttggcctggtaccagcagaagcaaggcaagagtcctcagctgctggtgtataatgcgaagatcctggcagagggcgtgccgagccggttctccggcagcggctcaggtacccaattttccctcaagatcaattcactgcagccagaggactttggcagttactattgtcaacaccactacggcacattcactttcgggtccggtacaaaattggagattaagcgactcgagggacagcctaaggccaatcctaccgtgacactgttccctccaagcagcgaagaactccaggccaacaaggccacacttgtgtgcctgatctccgacttctaccctggggctgtgacagtggcttggaaggccgatggatctcctgtgaaagccggcgtggaaaccaccaagccatccaagcagagcaacaacaaatacgccgccagctcctacctgagcctgacacctgagcagtggaagtcccacagatcctacagctgccaagtgacccacgaaggcagcaccgtggaaaagacagtggcccctacagagtgcagccccatcaagaccgatgtgattacaatggaccccaaggacaactgctccaaggacgccaacgataccctgctgctccagctgaccaacaccagcgcctactacatgtacttgttgctgctgctgaagtccgtggtgtacttcgccatcatcacatgctgcctgctgcggagaaccgccttctgctgcaacggcgagaagtctagggccaagcgatctggatctggagcaacaaacttctcactactcaaacaagcaggtgacgtggaggagaatcccgggcctactagtatggactggatttggcgcatccttttccttgtcggcgctgctaccggcgcgcattccgggccccagctccagctgcaagagtctggacctggcctggtcaagcctagcgagacactgagcctgacctgtaccgtgtccggcgatagcatcagcagcggcgattactactggggctggatcagacagcctcctggcaaaggactggaatggatcggccacatctactacagcggcgtgacctactacaaccccagcctgaagtccagagtgaccatcagcgtggacaccagccggaaccagttctccctgaagctgtctagcgtgacagccgccgataccgccgtgtactactgcaccagagaggacagcagcaactggcggagtagaggccagggaacactggtcacagttagctctggatccggcggaggcggaagtggaggcggaggatctggcggcggaggctctttcgaacaggtacagttgaaagaaagcgggcctggactggtagcgccttcccaatctctctccatcacgtgcaccatctctggcttctccctgacttcctatggagttcactgggtgaggcagccccccggcaagggactggaatggctggtcgtcatctggtccgacgggtccacaacctacaactccgctctgaaaagtcggctctctatttctaaagataatagcaagagccaggtgtttctgaaaatgaactctctgcagaccgatgatacggccatttactactgcgcttcacactatggctcaaccttggcattcgcttcctggggccacggaacactggtgaccgtttccgcagccacgcgtgcctctacaaagggaccctccgtgtttcctctggctcccagcagcaagtctacaagcggaggaacagccgctctgggctgcctggtcaaggattactttcccgagcctgtgaccgtgtcctggaatagcggagcactgacaagcggcgtgcacacctttccagccgtgctgcaaagcagcggcctgtactctctgagcagcgtggtcacagtgcctagctctagcctgggcacccagacctacatctgcaatgtgaaccacaagcctagcaacaccaaggtggacaagagagtggaacccaagagctgtgaagtgaaaaccgactccaccgaccacgtgaagcccaaagagacagagaacaccaagcagcccagcaagagctgccacaagcccaaggccatcgtgcacaccgagaaagtgaacatgatgagcctgaccgtgctgggcctgcggatgctgttcgccaaaaccgtggccgtgaacttcctgctgaccgccaagctgttcttcctc

SEQ ID NO: 3081 - DNA, 2775 bp, Artificial Sequence
  Synthetic Polynucloetide
atggccttaccagtgaccgccttgctcctgccgctggccttgctgctccacgccgccaggccggaagtgcagctggttgaatctggcggaggactggttcagcctggcggatctctgagactgtcttgtgccgccagcggcttcagcttcagcgacttttggatgagctgggtccgacaggcccctggcaaaggacttgaatgggtcgccacaatcagccaggccggcagcgagaaggactacgtggactctgtgaagggcagattcaccatcagccgggacaacgccaagaagtccctgtacctccagatgaacagcctgagagccgaggacaccgccgtgtactattgtgcctctggcgtgtacagcttcgactacagaggccagggcaccctggtcacagtctcttctggtaccggcggaggcggatctggcggcggaggtagcggtggcggaggatctgaattcgacattgtgatgacccagtctcacaaattcatgtccacatcagtaggagacagggtcagcgtcacctgcaaggccagtcagaatgtgggtaataatgtagcctggtatcaacagaaaccagggcaatctcctaaagtactgatttactcggcatcctaccggtacagtggagtccctgatcgcttcacaggcagtggatctgggacagatttcactctcaccatcagtaatgtgcagtctgaagacttggcagagtatttctgtcagcaatataacacctatccattcacgttcggctcggggacaaagttggaaataaaactcgagggacagcctaaggccaatcctaccgtgacactgttccctccaagcagcgaagaactccaggccaacaaggccacacttgtgtgcctgatctccgacttctaccctggggctgtgacagtggcttggaaggccgatggatctcctgtgaaagccggcgtggaaaccaccaagccatccaagcagagcaacaacaaatacgccgccagctcctacctgagcctgacacctgagcagtggaagtcccacagatcctacagctgccaagtgacccacgaaggcagcaccgtggaaaagacagtggcccctacagagtgcagccccatcaagaccgatgtgattacaatggaccccaaggacaactgctccaaggacgccaacgataccctgctgctccagctgaccaacaccagcgcctactacatgtacttgttgctgctgctgaagtccgtggtgtacttcgccatcatcacatgctgcctgctgcggagaaccgccttctgctgcaacggcgagaagtctagggccaagcgatctggatctggagcaacaaacttctcactactcaaacaagcaggtgacgtggaggagaatcccgggcctactagtatggactggatttggcgcatccttttccttgtcggcgctgctaccggcgcgcattccgggccccagctccagctgcaagagtctggacctggcctggtcaagcctagcgagacactgagcctgacctgtaccgtgtccggcgatagcatcagcagcggcgattactactggggctggatcagacagcctcctggcaaaggactggaatggatcggccacatctactacagcggcgtgacctactacaaccccagcctgaagtccagagtgaccatcagcgtggacaccagccggaaccagttctccctgaagctgtctagcgtgacagccgccgataccgccgtgtactactgcaccagagaggacagcagcaactggcggagtagaggccagggaacactggtcacagttagctctggatccggcggaggcggaagtggaggcggaggatctggcggcggaggctctttcgaagaggtacagctggaggaaagcggtggaggactggtgcaacctggagggtctatgaagctctcttgcgtagcttctgggttcacgttctccaattactggatgaactgggtgcggcagtcccccgagaaaggcctggaatgggtagcagaaattcggttcaagtcccataactatgctacacactttgccgagtctgtcaaaggccggttcactattagtcgagacgacagcaagtcttcagtctacctgcagatgaataacttgcgggcagaggacacaggtatctactactgcaccaggagaatcggcaactccgactatgactggtggtactttgacgtctggggagcaggcaccagcgtgacggtgagttcagcctcaacgcgtgcctctacaaagggaccctccgtgtttcctctggctcccagcagcaagtctacaagcggaggaacagccgctctgggctgcctggtcaaggattactttcccgagcctgtgaccgtgtcctggaatagcggagcactgacaagcggcgtgcacacctttccagccgtgctgcaaagcagcggcctgtactctctgagcagcgtggtcacagtgcctagctctagcctgggcacccagacctacatctgcaatgtgaaccacaagcctagcaacaccaaggtggacaagagagtggaacccaagagctgtgaagtgaaaaccgactccaccgaccacgtgaagcccaaagagacagagaacaccaagcagcccagcaagagctgccacaagcccaaggccatcgtgcacaccgagaaagtgaacatgatgagcctgaccgtgctgggcctgcggatgctgttcgccaaaaccgtggccgtgaacttcctgctgaccgccaagctgttcttcctc

SEQ ID NO: 3082 - DNA, 2754 bp, Artificial Sequence
  Synthetic Polynucloetide
atggccttaccagtgaccgccttgctcctgccgctggccttgctgctccacgccgccaggccggaagtgcagctggttgaatctggcggaggactggttcagcctggcggatctctgagactgtcttgtgccgccagcggcttcagcttcagcgacttttggatgagctgggtccgacaggcccctggcaaaggacttgaatgggtcgccacaatcagccaggccggcagcgagaaggactacgtggactctgtgaagggcagattcaccatcagccgggacaacgccaagaagtccctgtacctccagatgaacagcctgagagccgaggacaccgccgtgtactattgtgcctctggcgtgtacagcttcgactacagaggccagggcaccctggtcacagtctcttctggtaccggcggaggcggatctggcggcggaggtagcggtggcggaggatctgaattcgaccagatcgtgctgacccagtcccccgctattatgtccgcatcaccgggcgaaaaagtgacgatctcctgtagcgcttcatctagcgtctcctacatgtattggtatcaacagaaacctgggtctagcccaaagccgtggatctacagaaccagtaaccttgccagtggggtgccagcccgcttcagcggtagtggcagtggaacttcctatagcctcacaataagcaacatggaggctgaagatgccgctgcctattactgccagcagtaccacagttacccaaccacgttcggcgggggaactaagctcgaagtaaaactcgagggacagcctaaggccaatcctaccgtgacactgttccctccaagcagcgaagaactccaggccaacaaggccacacttgtgtgcctgatctccgacttctaccctggggctgtgacagtggcttggaaggccgatggatctcctgtgaaagccggcgtggaaaccaccaagccatccaagcagagcaacaacaaatacgccgccagctcctacctgagcctgacacctgagcagtggaagtcccacagatcctacagctgccaagtgacccacgaaggcagcaccgtggaaaagacagtggcccctacagagtgcagccccatcaagaccgatgtgattacaatggaccccaaggacaactgctccaaggacgccaacgataccctgctgctccagctgaccaacaccagcgcctactacatgtacttgttgctgctgctgaagtccgtggtgtacttcgccatcatcacatgctgcctgctgcggagaaccgccttctgctgcaacggcgagaagtctagggccaagcgatctggatctggagcaacaaacttctcactactcaaacaagcaggtgacgtggaggagaatcccgggcctactagtatggactggatttggcgcatccttttccttgtcggcgctgctaccggcgcgcattccgggccccagctccagctgcaagagtctggacctggcctggtcaagcctagcgagacactgagcctgacctgtaccgtgtccggcgatagcatcagcagcggcgattactactggggctggatcagacagcctcctggcaaaggactggaatggatcggccacatctactacagcggcgtgacctactacaaccccagcctgaagtccagagtgaccatcagcgtggacaccagccggaaccagttctccctgaagctgtctagcgtgacagccgccgataccgccgtgtactactgcaccagagaggacagcagcaactggcggagtagaggccagggaacactggtcacagttagctctggatccggcggaggcggaagtggaggcggaggatctggcggcggaggctctttcgaagaggtgcagctggtggaatctgggggcggcctggtccaacctaagggatcactcaagctctcttgtgcggccagcggattctctttcaatacctatgctatgaattgggtgagacaggcgcccggaaagggcctcgaatggatagcccatatccggtcaaaatcaaacaatttcgcaacctactatgcggactccgtgaaggaccgattttccatctcccgagatgcctccgagaatattctgttcctgcagatgaataacctcaagacagaggacaccgccatgtactactgtgtgcgccagggcggtgactttcccatggattactgggggcaggggaccagcgtgaccgtgagctctacgcgtgcctctacaaagggaccctccgtgtttcctctggctcccagcagcaagtctacaagcggaggaacagccgctctgggctgcctggtcaaggattactttcccgagcctgtgaccgtgtcctggaatagcggagcactgacaagcggcgtgcacacctttccagccgtgctgcaaagcagcggcctgtactctctgagcagcgtggtcacagtgcctagctctagcctgggcacccagacctacatctgcaatgtgaaccacaagcctagcaacaccaaggtggacaagagagtggaacccaagagctgtgaagtgaaaaccgactccaccgaccacgtgaagcccaaagagacagagaacaccaagcagcccagcaagagctgccacaagcccaaggccatcgtgcacaccgagaaagtgaacatgatgagcctgaccgtgctgggcctgcggatgctgttcgccaaaaccgtggccgtgaacttcctgctgaccgccaagctgttcttcctc

SEQ ID NO: 3083 - DNA, 2751 bp, Artificial Sequence
  Synthetic Polynucloetide
atggccttaccagtgaccgccttgctcctgccgctggccttgctgctccacgccgccaggccggaagtgcagctggttgaatctggcggaggactggttcagcctggcggatctctgagactgtcttgtgccgccagcggcttcagcttcagcgacttttggatgagctgggtccgacaggcccctggcaaaggacttgaatgggtcgccacaatcagccaggccggcagcgagaaggactacgtggactctgtgaagggcagattcaccatcagccgggacaacgccaagaagtccctgtacctccagatgaacagcctgagagccgaggacaccgccgtgtactattgtgcctctggcgtgtacagcttcgactacagaggccagggcaccctggtcacagtctcttctggtaccggcggaggcggatctggcggcggaggtagcggtggcggaggatctgaattcgacgacatccagatgacccagagcagcagcagcttcagcgtgagcctgggcgacagagtgaccatcacctgcatggccagcgaggacatctacatcagactggcctggtaccagcagaagcccggcaacgcccccagactgctgatcagcgccgccaccagcctggagaccggcgtgcccagcagattcagcggcagcggcagcggcaaggactacaccctgagcatcaccagcctgcagaccgaggacgtgggcacctactactgccagcagtactggagcagcccctggaccttcggcggcggcaccaagctggagatcaacctcgagggacagcctaaggccaatcctaccgtgacactgttccctccaagcagcgaagaactccaggccaacaaggccacacttgtgtgcctgatctccgacttctaccctggggctgtgacagtggcttggaaggccgatggatctcctgtgaaagccggcgtggaaaccaccaagccatccaagcagagcaacaacaaatacgccgccagctcctacctgagcctgacacctgagcagtggaagtcccacagatcctacagctgccaagtgacccacgaaggcagcaccgtggaaaagacagtggcccctacagagtgcagccccatcaagaccgatgtgattacaatggaccccaaggacaactgctccaaggacgccaacgataccctgctgctccagctgaccaacaccagcgcctactacatgtacttgttgctgctgctgaagtccgtggtgtacttcgccatcatcacatgctgcctgctgcggagaaccgccttctgctgcaacggcgagaagtctagggccaagcgatctggatctggagcaacaaacttctcactactcaaacaagcaggtgacgtggaggagaatcccgggcctactagtatggactggatttggcgcatccttttccttgtcggcgctgctaccggcgcgcattccgggccccagctccagctgcaagagtctggacctggcctggtcaagcctagcgagacactgagcctgacctgtaccgtgtccggcgatagcatcagcagcggcgattactactggggctggatcagacagcctcctggcaaaggactggaatggatcggccacatctactacagcggcgtgacctactacaaccccagcctgaagtccagagtgaccatcagcgtggacaccagccggaaccagttctccctgaagctgtctagcgtgacagccgccgataccgccgtgtactactgcaccagagaggacagcagcaactggcggagtagaggccagggaacactggtcacagttagctctggatccggcggaggcggaagtggaggcggaggatctggcggcggaggctctttcgaagacgtgcagctgcaggagagcggccccggcctggtgaagcccagccagagcctgagcctgacctgcaccgtgaccggctacagcatcaccagcgactacacctggaactggatcagacagttccccggcaacaagctggagtggatgggctacatcacctacagcggcagcaccagctacaaccccagcctgaagagcagaaacagcatcaccagagacaccagcaagaaccagttcttcctgcagctgaacagcgtgaccaccgaggacaccgccacctactactgcgccagactgggcagaagatacacaatggactactggggccagggcaccagcgtgaccgtgagcagcacgcgtgcctctacaaagggaccctccgtgtttcctctggctcccagcagcaagtctacaagcggaggaacagccgctctgggctgcctggtcaaggattactttcccgagcctgtgaccgtgtcctggaatagcggagcactgacaagcggcgtgcacacctttccagccgtgctgcaaagcagcggcctgtactctctgagcagcgtggtcacagtgcctagctctagcctgggcacccagacctacatctgcaatgtgaaccacaagcctagcaacaccaaggtggacaagagagtggaacccaagagctgtgaagtgaaaaccgactccaccgaccacgtgaagcccaaagagacagagaacaccaagcagcccagcaagagctgccacaagcccaaggccatcgtgcacaccgagaaagtgaacatgatgagcctgaccgtgctgggcctgcggatgctgttcgccaaaaccgtggccgtgaacttcctgctgaccgccaagctgttcttcctc

SEQ ID NO: 3084 - DNA, 2760 bp, Artificial Sequence
  Synthetic Polynucloetide
atggccttaccagtgaccgccttgctcctgccgctggccttgctgctccacgccgccaggccggaagtgcagctggttgaatctggcggaggactggttcagcctggcggatctctgagactgtcttgtgccgccagcggcttcagcttcagcgacttttggatgagctgggtccgacaggcccctggcaaaggacttgaatgggtcgccacaatcagccaggccggcagcgagaaggactacgtggactctgtgaagggcagattcaccatcagccgggacaacgccaagaagtccctgtacctccagatgaacagcctgagagccgaggacaccgccgtgtactattgtgcctctggcgtgtacagcttcgactacagaggccagggcaccctggtcacagtctcttctggtaccggcggaggcggatctggcggcggaggtagcggtggcggaggatctgaattcgacgacatccagatgacccagagccccagcagcctgtctgccagcgtgggcgacagagtgaccatcacctgtagagccagccagagcatcagcagctacctgaactggtatcagcagaagcccggcaaggcccccaaactgctgatctacgacgccagcaacctggaaaccggcgtgcccagcagattttccggcagcggctctggcaccgacttcaccttcaccatcagctccctccagcccgaggacattgccacctactactgccagcagtacgacaacctgcccctgacctttggcggaggcaccaaggtggacatcaagagactcgagggacagcctaaggccaatcctaccgtgacactgttccctccaagcagcgaagaactccaggccaacaaggccacacttgtgtgcctgatctccgacttctaccctggggctgtgacagtggcttggaaggccgatggatctcctgtgaaagccggcgtggaaaccaccaagccatccaagcagagcaacaacaaatacgccgccagctcctacctgagcctgacacctgagcagtggaagtcccacagatcctacagctgccaagtgacccacgaaggcagcaccgtggaaaagacagtggcccctacagagtgcagccccatcaagaccgatgtgattacaatggaccccaaggacaactgctccaaggacgccaacgataccctgctgctccagctgaccaacaccagcgcctactacatgtacttgttgctgctgctgaagtccgtggtgtacttcgccatcatcacatgctgcctgctgcggagaaccgccttctgctgcaacggcgagaagtctagggccaagcgatctggatctggagcaacaaacttctcactactcaaacaagcaggtgacgtggaggagaatcccgggcctactagtatggactggatttggcgcatccttttccttgtcggcgctgctaccggcgcgcattccgggccccagctccagctgcaagagtctggacctggcctggtcaagcctagcgagacactgagcctgacctgtaccgtgtccggcgatagcatcagcagcggcgattactactggggctggatcagacagcctcctggcaaaggactggaatggatcggccacatctactacagcggcgtgacctactacaaccccagcctgaagtccagagtgaccatcagcgtggacaccagccggaaccagttctccctgaagctgtctagcgtgacagccgccgataccgccgtgtactactgcaccagagaggacagcagcaactggcggagtagaggccagggaacactggtcacagttagctctggatccggcggaggcggaagtggaggcggaggatctggcggcggaggctctttcgaacaggtgcaactggtggaatctggcggcggagtggtgcagcctggcagaagcctgagactgagctgtgccgccagcggcttcacctttagcagctacgccatgcactgggtgcgccaggcccctggaaaaggcctggaatgggtggccgtgatctcctacgacggctccaacaagtattacgccgacagcgtgaagggccggttcaccatctccagagacaacagcaagaacaccctgtacctccagatgaacagcctgcgggccgaggacaccgccgtgtactattgtgccagggctcacaacagcagctcttggagcttcgactactggggccagggcaccctcgtgaccgtgtcatctacgcgtgcctctacaaagggaccctccgtgtttcctctggctcccagcagcaagtctacaagcggaggaacagccgctctgggctgcctggtcaaggattactttcccgagcctgtgaccgtgtcctggaatagcggagcactgacaagcggcgtgcacacctttccagccgtgctgcaaagcagcggcctgtactctctgagcagcgtggtcacagtgcctagctctagcctgggcacccagacctacatctgcaatgtgaaccacaagcctagcaacaccaaggtggacaagagagtggaacccaagagctgtgaagtgaaaaccgactccaccgaccacgtgaagcccaaagagacagagaacaccaagcagcccagcaagagctgccacaagcccaaggccatcgtgcacaccgagaaagtgaacatgatgagcctgaccgtgctgggcctgcggatgctgttcgccaaaaccgtggccgtgaacttcctgctgaccgccaagctgttcttcctc

SEQ ID NO: 3085 - DNA, 2787 bp, Artificial Sequence
  Synthetic Polynucloetide
atggccttaccagtgaccgccttgctcctgccgctggccttgctgctccacgccgccaggccggaagtgcagctggttgaatctggcggaggactggttcagcctggcggatctctgagactgtcttgtgccgccagcggcttcagcttcagcgacttttggatgagctgggtccgacaggcccctggcaaaggacttgaatgggtcgccacaatcagccaggccggcagcgagaaggactacgtggactctgtgaagggcagattcaccatcagccgggacaacgccaagaagtccctgtacctccagatgaacagcctgagagccgaggacaccgccgtgtactattgtgcctctggcgtgtacagcttcgactacagaggccagggcaccctggtcacagtctcttctggtaccggcggaggcggatctggcggcggaggtagcggtggcggaggatctgaattcgacgacgtcgtgatgacccagagccctctgagcctgcctgtgtccctgggcgatcaggccagcatctcctgcagatccagccagagactggtgcacagcaacggcaacacctacctgcactggtatctgcagaagcccggccagagccccaagctgctgatctaccgggtgtccaacagattccccggcgtgcccgatagattcagcggctctggcagcggcaccgacttcaccctgaagatcagccgggtggaagccgaggacctgggcatctatttctgcagccagagcacccacgtgccctacacctttggcggaggcaccaagctggaaatcaagcggctcgagggacagcctaaggccaatcctaccgtgacactgttccctccaagcagcgaagaactccaggccaacaaggccacacttgtgtgcctgatctccgacttctaccctggggctgtgacagtggcttggaaggccgatggatctcctgtgaaagccggcgtggaaaccaccaagccatccaagcagagcaacaacaaatacgccgccagctcctacctgagcctgacacctgagcagtggaagtcccacagatcctacagctgccaagtgacccacgaaggcagcaccgtggaaaagacagtggcccctacagagtgcagccccatcaagaccgatgtgattacaatggaccccaaggacaactgctccaaggacgccaacgataccctgctgctccagctgaccaacaccagcgcctactacatgtacttgttgctgctgctgaagtccgtggtgtacttcgccatcatcacatgctgcctgctgcggagaaccgccttctgctgcaacggcgagaagtctagggccaagcgatctggatctggagcaacaaacttctcactactcaaacaagcaggtgacgtggaggagaatcccgggcctactagtatggactggatttggcgcatccttttccttgtcggcgctgctaccggcgcgcattccgggccccagctccagctgcaagagtctggacctggcctggtcaagcctagcgagacactgagcctgacctgtaccgtgtccggcgatagcatcagcagcggcgattactactggggctggatcagacagcctcctggcaaaggactggaatggatcggccacatctactacagcggcgtgacctactacaaccccagcctgaagtccagagtgaccatcagcgtggacaccagccggaaccagttctccctgaagctgtctagcgtgacagccgccgataccgccgtgtactactgcaccagagaggacagcagcaactggcggagtagaggccagggaacactggtcacagttagctctggatccggcggaggcggaagtggaggcggaggatctggcggcggaggctctttcgaagaagtgcggctgcagcagtctggccccgacctgattaagcctggggccagcgtgaagatgagctgcaaggccagcggctacaccttcaccggctacgtgatgcactgggtcaagcagaggccaggccagggcctggaatggatcggcttcatcaacccctacaacgacgacatccagagcaacgagcggttccggggcaaggccaccctgaccagcgataagagcagcaccaccgcctacatggaactgagcagcctgacctccgaggacagcgccgtgtactactgtgctaggggagccggctacaacttcgacggggcctacagattcttcgacttttggggccagggcaccacactgaccgtgtcctctacgcgtgcctctacaaagggaccctccgtgtttcctctggctcccagcagcaagtctacaagcggaggaacagccgctctgggctgcctggtcaaggattactttcccgagcctgtgaccgtgtcctggaatagcggagcactgacaagcggcgtgcacacctttccagccgtgctgcaaagcagcggcctgtactctctgagcagcgtggtcacagtgcctagctctagcctgggcacccagacctacatctgcaatgtgaaccacaagcctagcaacaccaaggtggacaagagagtggaacccaagagctgtgaagtgaaaaccgactccaccgaccacgtgaagcccaaagagacagagaacaccaagcagcccagcaagagctgccacaagcccaaggccatcgtgcacaccgagaaagtgaacatgatgagcctgaccgtgctgggcctgcggatgctgttcgccaaaaccgtggccgtgaacttcctgctgaccgccaagctgttcttcctc

SEQ ID NO: 3086 - DNA, 2760 bp, Artificial Sequence
  Synthetic Polynucloetide
atggccttaccagtgaccgccttgctcctgccgctggccttgctgctccacgccgccaggccggaagtgcagctggttgaatctggcggaggactggttcagcctggcggatctctgagactgtcttgtgccgccagcggcttcagcttcagcgacttttggatgagctgggtccgacaggcccctggcaaaggacttgaatgggtcgccacaatcagccaggccggcagcgagaaggactacgtggactctgtgaagggcagattcaccatcagccgggacaacgccaagaagtccctgtacctccagatgaacagcctgagagccgaggacaccgccgtgtactattgtgcctctggcgtgtacagcttcgactacagaggccagggcaccctggtcacagtctcttctggtaccggcggaggcggatctggcggcggaggtagcggtggcggaggatctgaattcgacagctacgagctgacccagcctcctagcgtgtccgtgtctcctggacagaccgccaccatctcttgcagcggcgatcaactgggcgggaagtacggccactggtatcagaagaagcccggccagagccccgtgctggtgctgtaccaggacagaaaacggcctgccggcatccccgagagattcagcggaagcagcagcggcaacaccatcaccctgaccatcagcggcacccaggccgtggatgaggccgactactactgccaggcttgggacaccaatctgggcggcgtgttcggcggaggcaccaaagtgacagtgctgggacagctcgagggacagcctaaggccaatcctaccgtgacactgttccctccaagcagcgaagaactccaggccaacaaggccacacttgtgtgcctgatctccgacttctaccctggggctgtgacagtggcttggaaggccgatggatctcctgtgaaagccggcgtggaaaccaccaagccatccaagcagagcaacaacaaatacgccgccagctcctacctgagcctgacacctgagcagtggaagtcccacagatcctacagctgccaagtgacccacgaaggcagcaccgtggaaaagacagtggcccctacagagtgcagccccatcaagaccgatgtgattacaatggaccccaaggacaactgctccaaggacgccaacgataccctgctgctccagctgaccaacaccagcgcctactacatgtacttgttgctgctgctgaagtccgtggtgtacttcgccatcatcacatgctgcctgctgcggagaaccgccttctgctgcaacggcgagaagtctagggccaagcgatctggatctggagcaacaaacttctcactactcaaacaagcaggtgacgtggaggagaatcccgggcctactagtatggactggatttggcgcatccttttccttgtcggcgctgctaccggcgcgcattccgggccccagctccagctgcaagagtctggacctggcctggtcaagcctagcgagacactgagcctgacctgtaccgtgtccggcgatagcatcagcagcggcgattactactggggctggatcagacagcctcctggcaaaggactggaatggatcggccacatctactacagcggcgtgacctactacaaccccagcctgaagtccagagtgaccatcagcgtggacaccagccggaaccagttctccctgaagctgtctagcgtgacagccgccgataccgccgtgtactactgcaccagagaggacagcagcaactggcggagtagaggccagggaacactggtcacagttagctctggatccggcggaggcggaagtggaggcggaggatctggcggcggaggctctttcgaacaggtgcaactggtggaaagcggagccgaagtgaagaaacctggggccagcgtgaaggtgtcctgcaaggccagcggctacacctttaccggctactacatgcactgggtgcgccaggctccaggccagggactggaatggatgggccggatcaaccccaatagcggcggcaccaactacgcccagaaattccagggcagagtgaccatgaccagagacaccagcatcagcaccgcctacatggaactgagccggctgagaagcgacgacaccgccgtgtactactgcgccagccctagaggcagaggcagcgccttcgatatttggggccagggcacactcgtgaccgtgtcctctacgcgtgcctctacaaagggaccctccgtgtttcctctggctcccagcagcaagtctacaagcggaggaacagccgctctgggctgcctggtcaaggattactttcccgagcctgtgaccgtgtcctggaatagcggagcactgacaagcggcgtgcacacctttccagccgtgctgcaaagcagcggcctgtactctctgagcagcgtggtcacagtgcctagctctagcctgggcacccagacctacatctgcaatgtgaaccacaagcctagcaacaccaaggtggacaagagagtggaacccaagagctgtgaagtgaaaaccgactccaccgaccacgtgaagcccaaagagacagagaacaccaagcagcccagcaagagctgccacaagcccaaggccatcgtgcacaccgagaaagtgaacatgatgagcctgaccgtgctgggcctgcggatgctgttcgccaaaaccgtggccgtgaacttcctgctgaccgccaagctgttcttcctc

SEQ ID NO: 3087 - DNA, 2769 bp, Artificial Sequence
  Synthetic Polynucloetide
atggccttaccagtgaccgccttgctcctgccgctggccttgctgctccacgccgccaggccggaagtgcagctggttgaatctggcggaggactggttcagcctggcggatctctgagactgtcttgtgccgccagcggcttcagcttcagcgacttttggatgagctgggtccgacaggcccctggcaaaggacttgaatgggtcgccacaatcagccaggccggcagcgagaaggactacgtggactctgtgaagggcagattcaccatcagccgggacaacgccaagaagtccctgtacctccagatgaacagcctgagagccgaggacaccgccgtgtactattgtgcctctggcgtgtacagcttcgactacagaggccagggcaccctggtcacagtctcttctggtaccggcggaggcggatctggcggcggaggtagcggtggcggaggatctgaattcgacaacttcatgctgacccagccccacagcgtgtccgagagccctggcaagaccgtgaccatctcctgcaccagaagcagcggctctatcgccagcaaatacgtgcagtggtatcagcagaggcccggcagcagccctaccaccgtgatctacgaggacaaccagaggcctagcggcgtgcccgatagattcagcggcagcatcgacaccagcagcaacagcgccagcctgaccatcagcggcctgagaacagaggacgaggccgactactactgccacagctacgacagcaacaaccactccgtgttcggcggaggcaccaaagtgacagtgctgggacagctcgagggacagcctaaggccaatcctaccgtgacactgttccctccaagcagcgaagaactccaggccaacaaggccacacttgtgtgcctgatctccgacttctaccctggggctgtgacagtggcttggaaggccgatggatctcctgtgaaagccggcgtggaaaccaccaagccatccaagcagagcaacaacaaatacgccgccagctcctacctgagcctgacacctgagcagtggaagtcccacagatcctacagctgccaagtgacccacgaaggcagcaccgtggaaaagacagtggcccctacagagtgcagccccatcaagaccgatgtgattacaatggaccccaaggacaactgctccaaggacgccaacgataccctgctgctccagctgaccaacaccagcgcctactacatgtacttgttgctgctgctgaagtccgtggtgtacttcgccatcatcacatgctgcctgctgcggagaaccgccttctgctgcaacggcgagaagtctagggccaagcgatctggatctggagcaacaaacttctcactactcaaacaagcaggtgacgtggaggagaatcccgggcctactagtatggactggatttggcgcatccttttccttgtcggcgctgctaccggcgcgcattccgggccccagctccagctgcaagagtctggacctggcctggtcaagcctagcgagacactgagcctgacctgtaccgtgtccggcgatagcatcagcagcggcgattactactggggctggatcagacagcctcctggcaaaggactggaatggatcggccacatctactacagcggcgtgacctactacaaccccagcctgaagtccagagtgaccatcagcgtggacaccagccggaaccagttctccctgaagctgtctagcgtgacagccgccgataccgccgtgtactactgcaccagagaggacagcagcaactggcggagtagaggccagggaacactggtcacagttagctctggatccggcggaggcggaagtggaggcggaggatctggcggcggaggctctttcgaagaagtgcaactggtggaaagcgggggaggcgtggtgcagccaggcggatctctgagactgagctgtgccgccagcggcttcaccttcagcagctacgccatgagctgggtgcgccaggcccctggaaaaggcctggaatgggtgtccgccatctctggctctggcggcagcacctactacgccgatagcgtgaagggccggttcagcatcagccgggacaacagcaagaacaccctgtacctccagatgaacagcctgcgggccgaggacaccgccgtgtactactgtgccagaaccagaagctccggggccttcgacatctggggccagggaacactcgtgaccgtgtcctctacgcgtgcctctacaaagggaccctccgtgtttcctctggctcccagcagcaagtctacaagcggaggaacagccgctctgggctgcctggtcaaggattactttcccgagcctgtgaccgtgtcctggaatagcggagcactgacaagcggcgtgcacacctttccagccgtgctgcaaagcagcggcctgtactctctgagcagcgtggtcacagtgcctagctctagcctgggcacccagacctacatctgcaatgtgaaccacaagcctagcaacaccaaggtggacaagagagtggaacccaagagctgtgaagtgaaaaccgactccaccgaccacgtgaagcccaaagagacagagaacaccaagcagcccagcaagagctgccacaagcccaaggccatcgtgcacaccgagaaagtgaacatgatgagcctgaccgtgctgggcctgcggatgctgttcgccaaaaccgtggccgtgaacttcctgctgaccgccaagctgttcttcctc

SEQ ID NO: 3088 - DNA, 2754 bp, Artificial Sequence
  Synthetic Polynucloetide
atggccttaccagtgaccgccttgctcctgccgctggccttgctgctccacgccgccaggccggaagtgcagctggttgaatctggcggaggactggttcagcctggcggatctctgagactgtcttgtgccgccagcggcttcagcttcagcgacttttggatgagctgggtccgacaggcccctggcaaaggacttgaatgggtcgccacaatcagccaggccggcagcgagaaggactacgtggactctgtgaagggcagattcaccatcagccgggacaacgccaagaagtccctgtacctccagatgaacagcctgagagccgaggacaccgccgtgtactattgtgcctctggcgtgtacagcttcgactacagaggccagggcaccctggtcacagtctcttctggtaccggcggaggcggatctggcggcggaggtagcggtggcggaggatctgaattcgacatccagatgaaccagagccccagcagcctgagcgccagcctgggcgataccatcaccatcacctgtcacgccagccagaacatcaacgtgtggctgagctggtatcagcagaagcccggcaacatccccaagctgctgatctacaaggccagcaacctgcacaccggcgtgcccagcagattttctggcagcggctctggcaccggcttcaccattaccatcagctccctccagcccgaggacattgccacctactactgccagcagggccagagctacccctggacatttggcggaggcaccaagctggaaatcaagagactcgagggacagcctaaggccaatcctaccgtgacactgttccctccaagcagcgaagaactccaggccaacaaggccacacttgtgtgcctgatctccgacttctaccctggggctgtgacagtggcttggaaggccgatggatctcctgtgaaagccggcgtggaaaccaccaagccatccaagcagagcaacaacaaatacgccgccagctcctacctgagcctgacacctgagcagtggaagtcccacagatcctacagctgccaagtgacccacgaaggcagcaccgtggaaaagacagtggcccctacagagtgcagccccatcaagaccgatgtgattacaatggaccccaaggacaactgctccaaggacgccaacgataccctgctgctccagctgaccaacaccagcgcctactacatgtacttgttgctgctgctgaagtccgtggtgtacttcgccatcatcacatgctgcctgctgcggagaaccgccttctgctgcaacggcgagaagtctagggccaagcgatctggatctggagcaacaaacttctcactactcaaacaagcaggtgacgtggaggagaatcccgggcctactagtatggactggatttggcgcatccttttccttgtcggcgctgctaccggcgcgcattccgggccccagctccagctgcaagagtctggacctggcctggtcaagcctagcgagacactgagcctgacctgtaccgtgtccggcgatagcatcagcagcggcgattactactggggctggatcagacagcctcctggcaaaggactggaatggatcggccacatctactacagcggcgtgacctactacaaccccagcctgaagtccagagtgaccatcagcgtggacaccagccggaaccagttctccctgaagctgtctagcgtgacagccgccgataccgccgtgtactactgcaccagagaggacagcagcaactggcggagtagaggccagggaacactggtcacagttagctctggatccggcggaggcggaagtggaggcggaggatctggcggcggaggctctttcgaagaagtgcaactccagcagagcggcccagagcttgtgaagcctggcgcttccgtgaagattagctgcaaagccagcggctacagcttcaccggctacttcatgaactgggtcaagcagagccacggcaagagcctggagtacatcggcagattcaacccctacaacggcgagacactgtacaaccagaagttcaagggcaaggccaccctgaccgtggacaagagcagcagcaccgtgcacatggaactgctgagcgtgaccagcgaggacagcgccgtgtactactgtggcagaagcggcaacgacgacgctatggactattggggccagggcaccagcgtgaccgtgtctagtgctacgcgtgcctctacaaagggaccctccgtgtttcctctggctcccagcagcaagtctacaagcggaggaacagccgctctgggctgcctggtcaaggattactttcccgagcctgtgaccgtgtcctggaatagcggagcactgacaagcggcgtgcacacctttccagccgtgctgcaaagcagcggcctgtactctctgagcagcgtggtcacagtgcctagctctagcctgggcacccagacctacatctgcaatgtgaaccacaagcctagcaacaccaaggtggacaagagagtggaacccaagagctgtgaagtgaaaaccgactccaccgaccacgtgaagcccaaagagacagagaacaccaagcagcccagcaagagctgccacaagcccaaggccatcgtgcacaccgagaaagtgaacatgatgagcctgaccgtgctgggcctgcggatgctgttcgccaaaaccgtggccgtgaacttcctgctgaccgccaagctgttcttcctc

SEQ ID NO: 3089 - DNA, 2757 bp, Artificial Sequence
  Synthetic Polynucloetide
atggccttaccagtgaccgccttgctcctgccgctggccttgctgctccacgccgccaggccggaagtgcagctggttgaatctggcggaggactggttcagcctggcggatctctgagactgtcttgtgccgccagcggcttcagcttcagcgacttttggatgagctgggtccgacaggcccctggcaaaggacttgaatgggtcgccacaatcagccaggccggcagcgagaaggactacgtggactctgtgaagggcagattcaccatcagccgggacaacgccaagaagtccctgtacctccagatgaacagcctgagagccgaggacaccgccgtgtactattgtgcctctggcgtgtacagcttcgactacagaggccagggcaccctggtcacagtctcttctggtaccggcggaggcggatctggcggcggaggtagcggtggcggaggatctgaattcgagatcgtgctgacacagagccctgccaccctgtctctgagccctggcgaaagagccaccctgagctgtagagccagccagagcgtgcggagctacctggcctggtatcagcagaagcctggacaggcccccagactgctgatctacgacgccagcaatcgggccacaggcatccccgccagattttctggctctggcagcggcaccgacttcaccctgacaatcagcagcctggaacccgaggacttcgccgtgtactactgccagcagcggagcaactggccccctacctttggacagggcaccaaggtggaaatcaagctcgagggacagcctaaggccaatcctaccgtgacactgttccctccaagcagcgaagaactccaggccaacaaggccacacttgtgtgcctgatctccgacttctaccctggggctgtgacagtggcttggaaggccgatggatctcctgtgaaagccggcgtggaaaccaccaagccatccaagcagagcaacaacaaatacgccgccagctcctacctgagcctgacacctgagcagtggaagtcccacagatcctacagctgccaagtgacccacgaaggcagcaccgtggaaaagacagtggcccctacagagtgcagccccatcaagaccgatgtgattacaatggaccccaaggacaactgctccaaggacgccaacgataccctgctgctccagctgaccaacaccagcgcctactacatgtacttgttgctgctgctgaagtccgtggtgtacttcgccatcatcacatgctgcctgctgcggagaaccgccttctgctgcaacggcgagaagtctagggccaagcgatctggatctggagcaacaaacttctcactactcaaacaagcaggtgacgtggaggagaatcccgggcctactagtatggactggatttggcgcatccttttccttgtcggcgctgctaccggcgcgcattccgggccccagctccagctgcaagagtctggacctggcctggtcaagcctagcgagacactgagcctgacctgtaccgtgtccggcgatagcatcagcagcggcgattactactggggctggatcagacagcctcctggcaaaggactggaatggatcggccacatctactacagcggcgtgacctactacaaccccagcctgaagtccagagtgaccatcagcgtggacaccagccggaaccagttctccctgaagctgtctagcgtgacagccgccgataccgccgtgtactactgcaccagagaggacagcagcaactggcggagtagaggccagggaacactggtcacagttagctctggatccggcggaggcggaagtggaggcggaggatctggcggcggaggctctttcgaacaactccaggtgcaggaatctggccccggactcgtgaagcccagcgagacactgagcctgacctgtaccgtgtccggcggcagcatcagcaacagctacttctcctggggctggatcagacagccccctggcaagggcctggaatggatcggcagcttctactacggcgagaaaacctactacaaccccagcctgaagtccagagccaccatcagcatcgacaccagcaagagccagttctccctgaagctgagcagcgtgacagccgccgacaccgccgtgtattattgccccagaggccccaccatgatccggggcgtgatcgactcttggggccagggaacactcgtgaccgtgtcctctacgcgtgcctctacaaagggaccctccgtgtttcctctggctcccagcagcaagtctacaagcggaggaacagccgctctgggctgcctggtcaaggattactttcccgagcctgtgaccgtgtcctggaatagcggagcactgacaagcggcgtgcacacctttccagccgtgctgcaaagcagcggcctgtactctctgagcagcgtggtcacagtgcctagctctagcctgggcacccagacctacatctgcaatgtgaaccacaagcctagcaacaccaaggtggacaagagagtggaacccaagagctgtgaagtgaaaaccgactccaccgaccacgtgaagcccaaagagacagagaacaccaagcagcccagcaagagctgccacaagcccaaggccatcgtgcacaccgagaaagtgaacatgatgagcctgaccgtgctgggcctgcggatgctgttcgccaaaaccgtggccgtgaacttcctgctgaccgccaagctgttcttcctc

SEQ ID NO: 3090 - DNA, 2784 bp, Artificial Sequence
  Synthetic Polynucloetide
atggccttaccagtgaccgccttgctcctgccgctggccttgctgctccacgccgccaggccggaagtgcagctggttgaatctggcggaggactggttcagcctggcggatctctgagactgtcttgtgccgccagcggcttcagcttcagcgacttttggatgagctgggtccgacaggcccctggcaaaggacttgaatgggtcgccacaatcagccaggccggcagcgagaaggactacgtggactctgtgaagggcagattcaccatcagccgggacaacgccaagaagtccctgtacctccagatgaacagcctgagagccgaggacaccgccgtgtactattgtgcctctggcgtgtacagcttcgactacagaggccagggcaccctggtcacagtctcttctggtaccggcggaggcggatctggcggcggaggtagcggtggcggaggatctgaattcgacatcgtgatgacccagacccccctgagcctgcctgtgacacctggcgagcctgccagcatctcctgcagaagcagcagaagcctgctggacagcgacgacggcaacacctacctggactggtatctgcagaaacccggccagagcccccaactgctgatctacaccctgagctacagagccagcggcgtgcccgatagattttccggctctggcagcggcaccgacttcaccctgaagatcagccgggtggaagccgaggacgtgggcgtgtactactgtatgcagcgggtggaatttcccatcaccttcggccagggcaccagactggaaatcaagagactcgagggacagcctaaggccaatcctaccgtgacactgttccctccaagcagcgaagaactccaggccaacaaggccacacttgtgtgcctgatctccgacttctaccctggggctgtgacagtggcttggaaggccgatggatctcctgtgaaagccggcgtggaaaccaccaagccatccaagcagagcaacaacaaatacgccgccagctcctacctgagcctgacacctgagcagtggaagtcccacagatcctacagctgccaagtgacccacgaaggcagcaccgtggaaaagacagtggcccctacagagtgcagccccatcaagaccgatgtgattacaatggaccccaaggacaactgctccaaggacgccaacgataccctgctgctccagctgaccaacaccagcgcctactacatgtacttgttgctgctgctgaagtccgtggtgtacttcgccatcatcacatgctgcctgctgcggagaaccgccttctgctgcaacggcgagaagtctagggccaagcgatctggatctggagcaacaaacttctcactactcaaacaagcaggtgacgtggaggagaatcccgggcctactagtatggactggatttggcgcatccttttccttgtcggcgctgctaccggcgcgcattccgggccccagctccagctgcaagagtctggacctggcctggtcaagcctagcgagacactgagcctgacctgtaccgtgtccggcgatagcatcagcagcggcgattactactggggctggatcagacagcctcctggcaaaggactggaatggatcggccacatctactacagcggcgtgacctactacaaccccagcctgaagtccagagtgaccatcagcgtggacaccagccggaaccagttctccctgaagctgtctagcgtgacagccgccgataccgccgtgtactactgcaccagagaggacagcagcaactggcggagtagaggccagggaacactggtcacagttagctctggatccggcggaggcggaagtggaggcggaggatctggcggcggaggctctttcgaacaggtgcaactggtggaatctggcgggggagtggtgcagcctggcagatccctgagactgagctgtgccgccagcggcttcatcttcagcagatacggaatgcactgggtgcgccaggcccctggcaagggactgaaatgggtggccgtgatttggtacgacggcagcaacaagctgtacgccgacagcgtgaagggccggttcaccatcagcagagacaacagcaagaacaccctgtacctgcagatgaacagcctgcgggccgaggacaccgccgtgtactattgcgccagagactactacgacaacagccggcaccactggggcttcgactattggggccagggaacccttgtgaccgtgtcctctacgcgtgcctctacaaagggaccctccgtgtttcctctggctcccagcagcaagtctacaagcggaggaacagccgctctgggctgcctggtcaaggattactttcccgagcctgtgaccgtgtcctggaatagcggagcactgacaagcggcgtgcacacctttccagccgtgctgcaaagcagcggcctgtactctctgagcagcgtggtcacagtgcctagctctagcctgggcacccagacctacatctgcaatgtgaaccacaagcctagcaacaccaaggtggacaagagagtggaacccaagagctgtgaagtgaaaaccgactccaccgaccacgtgaagcccaaagagacagagaacaccaagcagcccagcaagagctgccacaagcccaaggccatcgtgcacaccgagaaagtgaacatgatgagcctgaccgtgctgggcctgcggatgctgttcgccaaaaccgtggccgtgaacttcctgctgaccgccaagctgttcttcctc

SEQ ID NO: 3091 - DNA, 2754 bp, Artificial Sequence
  Synthetic Polynucloetide
atggccttaccagtgaccgccttgctcctgccgctggccttgctgctccacgccgccaggccggaagtgcagctggttgaatctggcggaggactggttcagcctggcggatctctgagactgtcttgtgccgccagcggcttcagcttcagcgacttttggatgagctgggtccgacaggcccctggcaaaggacttgaatgggtcgccacaatcagccaggccggcagcgagaaggactacgtggactctgtgaagggcagattcaccatcagccgggacaacgccaagaagtccctgtacctccagatgaacagcctgagagccgaggacaccgccgtgtactattgtgcctctggcgtgtacagcttcgactacagaggccagggcaccctggtcacagtctcttctggtaccggcggaggcggatctggcggcggaggtagcggtggcggaggatctgaattcgagatccagatgacccagagccccagcagcatgtctgccagcctgggcgacaccatcaccatcacatgccaggccacccaggacatcttcaagaacctgaactggtatcagcagaagcccggcaagccccccagcctgctgatctactatgccaccgaactggccgagggcgtgcccagcagattttctggcagcggcagcggctccgactacagcctgaccatcagcaacctggaaagcgaggacttcgccgcctactactgcctccagttcttcgagttcccattcaccttcggctccggcaccaagctggaaatgaagctcgagggacagcctaaggccaatcctaccgtgacactgttccctccaagcagcgaagaactccaggccaacaaggccacacttgtgtgcctgatctccgacttctaccctggggctgtgacagtggcttggaaggccgatggatctcctgtgaaagccggcgtggaaaccaccaagccatccaagcagagcaacaacaaatacgccgccagctcctacctgagcctgacacctgagcagtggaagtcccacagatcctacagctgccaagtgacccacgaaggcagcaccgtggaaaagacagtggcccctacagagtgcagccccatcaagaccgatgtgattacaatggaccccaaggacaactgctccaaggacgccaacgataccctgctgctccagctgaccaacaccagcgcctactacatgtacttgttgctgctgctgaagtccgtggtgtacttcgccatcatcacatgctgcctgctgcggagaaccgccttctgctgcaacggcgagaagtctagggccaagcgatctggatctggagcaacaaacttctcactactcaaacaagcaggtgacgtggaggagaatcccgggcctactagtatggactggatttggcgcatccttttccttgtcggcgctgctaccggcgcgcattccgggccccagctccagctgcaagagtctggacctggcctggtcaagcctagcgagacactgagcctgacctgtaccgtgtccggcgatagcatcagcagcggcgattactactggggctggatcagacagcctcctggcaaaggactggaatggatcggccacatctactacagcggcgtgacctactacaaccccagcctgaagtccagagtgaccatcagcgtggacaccagccggaaccagttctccctgaagctgtctagcgtgacagccgccgataccgccgtgtactactgcaccagagaggacagcagcaactggcggagtagaggccagggaacactggtcacagttagctctggatccggcggaggcggaagtggaggcggaggatctggcggcggaggctctttcgaacaggtgcaactccagcagtctggcgctgagcttgtgcggcctggcacctctgtgaaggtgtcctgtaaagccagcggctacgtgttcaccaactactggatcgagtggatcaagcagcggccaggccagggcctggaatggatcggcgtgatgaatccaggcagcggcgagacaacctacaacgagaagttcaagggcaaggccaccctgaccgccgacaagagcagcagcacagcctacatgcaactgtcctccctgaccagcgtggacagcgccgtgtacttctgcgccagggaccacgaccgggactactacgctatggactactggggccagggcaccagcgtgaccgtgtcatctacgcgtgcctctacaaagggaccctccgtgtttcctctggctcccagcagcaagtctacaagcggaggaacagccgctctgggctgcctggtcaaggattactttcccgagcctgtgaccgtgtcctggaatagcggagcactgacaagcggcgtgcacacctttccagccgtgctgcaaagcagcggcctgtactctctgagcagcgtggtcacagtgcctagctctagcctgggcacccagacctacatctgcaatgtgaaccacaagcctagcaacaccaaggtggacaagagagtggaacccaagagctgtgaagtgaaaaccgactccaccgaccacgtgaagcccaaagagacagagaacaccaagcagcccagcaagagctgccacaagcccaaggccatcgtgcacaccgagaaagtgaacatgatgagcctgaccgtgctgggcctgcggatgctgttcgccaaaaccgtggccgtgaacttcctgctgaccgccaagctgttcttcctc

SEQ ID NO: 3092 - DNA, 2745 bp, Artificial Sequence
  Synthetic Polynucloetide
atggccttaccagtgaccgccttgctcctgccgctggccttgctgctccacgccgccaggccggaagtgcagctggttgaatctggcggaggactggttcagcctggcggatctctgagactgtcttgtgccgccagcggcttcagcttcagcgacttttggatgagctgggtccgacaggcccctggcaaaggacttgaatgggtcgccacaatcagccaggccggcagcgagaaggactacgtggactctgtgaagggcagattcaccatcagccgggacaacgccaagaagtccctgtacctccagatgaacagcctgagagccgaggacaccgccgtgtactattgtgcctctggcgtgtacagcttcgactacagaggccagggcaccctggtcacagtctcttctggtaccggcggaggcggatctggcggcggaggtagcggtggcggaggatctgaattcgacatcctgctgacacagagccccgccatcctgtccgtgtctccaggcgagagagtgtcctttagctgccgggccagccagaacatcggcaccagcatccactggtatcagcagcggaccaacggcagccccagactgctgattaagtacgccagcgagtccgtgtccggcatccccagcagattttctggcagcggctccggcaccgacttcaccctgagcatcaacagcgtggaaagcgaggacattgccgactactactgccagcacaccaatagctggcccaccacctttggcggaggcaccaagctggaaatcaagagactcgagggacagcctaaggccaatcctaccgtgacactgttccctccaagcagcgaagaactccaggccaacaaggccacacttgtgtgcctgatctccgacttctaccctggggctgtgacagtggcttggaaggccgatggatctcctgtgaaagccggcgtggaaaccaccaagccatccaagcagagcaacaacaaatacgccgccagctcctacctgagcctgacacctgagcagtggaagtcccacagatcctacagctgccaagtgacccacgaaggcagcaccgtggaaaagacagtggcccctacagagtgcagccccatcaagaccgatgtgattacaatggaccccaaggacaactgctccaaggacgccaacgataccctgctgctccagctgaccaacaccagcgcctactacatgtacttgttgctgctgctgaagtccgtggtgtacttcgccatcatcacatgctgcctgctgcggagaaccgccttctgctgcaacggcgagaagtctagggccaagcgatctggatctggagcaacaaacttctcactactcaaacaagcaggtgacgtggaggagaatcccgggcctactagtatggactggatttggcgcatccttttccttgtcggcgctgctaccggcgcgcattccgggccccagctccagctgcaagagtctggacctggcctggtcaagcctagcgagacactgagcctgacctgtaccgtgtccggcgatagcatcagcagcggcgattactactggggctggatcagacagcctcctggcaaaggactggaatggatcggccacatctactacagcggcgtgacctactacaaccccagcctgaagtccagagtgaccatcagcgtggacaccagccggaaccagttctccctgaagctgtctagcgtgacagccgccgataccgccgtgtactactgcaccagagaggacagcagcaactggcggagtagaggccagggaacactggtcacagttagctctggatccggcggaggcggaagtggaggcggaggatctggcggcggaggctctttcgaacaggtgcaactccagcagtccgacgccgagcttgtgaagcctggcgcttccgtgaagattagctgcaaggccagcggctacaccttcaccgaccacgccattcactgggtcaagcagaagcccgagcagggcctggaatggatcggctacttcagccccggcaacggcgacatcaagtacaacgagaagttcaagggcaaggccaccctgaccgccgacaagagcagcagcacagcctacatgcaactgaacagcctgaccagcgaggactccgccgtgtacttctgcaagcggagctacggcaactacgactactggggccagggcaccacactgaccgtgtctagtacgcgtgcctctacaaagggaccctccgtgtttcctctggctcccagcagcaagtctacaagcggaggaacagccgctctgggctgcctggtcaaggattactttcccgagcctgtgaccgtgtcctggaatagcggagcactgacaagcggcgtgcacacctttccagccgtgctgcaaagcagcggcctgtactctctgagcagcgtggtcacagtgcctagctctagcctgggcacccagacctacatctgcaatgtgaaccacaagcctagcaacaccaaggtggacaagagagtggaacccaagagctgtgaagtgaaaaccgactccaccgaccacgtgaagcccaaagagacagagaacaccaagcagcccagcaagagctgccacaagcccaaggccatcgtgcacaccgagaaagtgaacatgatgagcctgaccgtgctgggcctgcggatgctgttcgccaaaaccgtggccgtgaacttcctgctgaccgccaagctgttcttcctc

SEQ ID NO: 3093 - DNA, 2760 bp, Artificial Sequence
  Synthetic Polynucloetide
atggccttaccagtgaccgccttgctcctgccgctggccttgctgctccacgccgccaggccggaagtgcagctggttgaatctggcggaggactggttcagcctggcggatctctgagactgtcttgtgccgccagcggcttcagcttcagcgacttttggatgagctgggtccgacaggcccctggcaaaggacttgaatgggtcgccacaatcagccaggccggcagcgagaaggactacgtggactctgtgaagggcagattcaccatcagccgggacaacgccaagaagtccctgtacctccagatgaacagcctgagagccgaggacaccgccgtgtactattgtgcctctggcgtgtacagcttcgactacagaggccagggcaccctggtcacagtctcttctggtaccggcggaggcggatctggcggcggaggtagcggtggcggaggatctgaattcgacatcgtgatgacccagagccccgatagcctggccgtgtctctgggagagagagccaccatcaactgcaagagcagccagagcctgctgaacagcggcgaccagaagaactacctgacctggtatcagcagaagcccggccagccccccaagctgctgatctactgggccagcaccagagaaagcggcgtgcccgatagattcagcggcagcggaagtggcaccgacttcaccctgaccatcagttctcttcaggccgaggacgtggccgtgtactactgccagaacgactacagctaccccctgaccttcggccagggcaccaaggtggaaatcaagctcgagggacagcctaaggccaatcctaccgtgacactgttccctccaagcagcgaagaactccaggccaacaaggccacacttgtgtgcctgatctccgacttctaccctggggctgtgacagtggcttggaaggccgatggatctcctgtgaaagccggcgtggaaaccaccaagccatccaagcagagcaacaacaaatacgccgccagctcctacctgagcctgacacctgagcagtggaagtcccacagatcctacagctgccaagtgacccacgaaggcagcaccgtggaaaagacagtggcccctacagagtgcagccccatcaagaccgatgtgattacaatggaccccaaggacaactgctccaaggacgccaacgataccctgctgctccagctgaccaacaccagcgcctactacatgtacttgttgctgctgctgaagtccgtggtgtacttcgccatcatcacatgctgcctgctgcggagaaccgccttctgctgcaacggcgagaagtctagggccaagcgatctggatctggagcaacaaacttctcactactcaaacaagcaggtgacgtggaggagaatcccgggcctactagtatggactggatttggcgcatccttttccttgtcggcgctgctaccggcgcgcattccgggccccagctccagctgcaagagtctggacctggcctggtcaagcctagcgagacactgagcctgacctgtaccgtgtccggcgatagcatcagcagcggcgattactactggggctggatcagacagcctcctggcaaaggactggaatggatcggccacatctactacagcggcgtgacctactacaaccccagcctgaagtccagagtgaccatcagcgtggacaccagccggaaccagttctccctgaagctgtctagcgtgacagccgccgataccgccgtgtactactgcaccagagaggacagcagcaactggcggagtagaggccagggaacactggtcacagttagctctggatccggcggaggcggaagtggaggcggaggatctggcggcggaggctctttcgaacaggtgcagctggtgcagtctggggccgaagtgaagaaaaccggcagcagcgtgaaggtgtcctgcaaggccagcggctacacctttaccgaccacgccattcacgtgtggcggcaggctccaggacaggccctggaatggatgggccacttcagccccggcaacaccgacatcaagtacaacgacaagttcaagggcagagtgaccctgaccgtggaccgcagcatgagcaccgcctacatggaactgagcagcctgcggagcgaggacaccgccatgtactattgcaagaccagcaccttctttttcgactactggggccagggaacaatggtcaccgtgtccagcacgcgtgcctctacaaagggaccctccgtgtttcctctggctcccagcagcaagtctacaagcggaggaacagccgctctgggctgcctggtcaaggattactttcccgagcctgtgaccgtgtcctggaatagcggagcactgacaagcggcgtgcacacctttccagccgtgctgcaaagcagcggcctgtactctctgagcagcgtggtcacagtgcctagctctagcctgggcacccagacctacatctgcaatgtgaaccacaagcctagcaacaccaaggtggacaagagagtggaacccaagagctgtgaagtgaaaaccgactccaccgaccacgtgaagcccaaagagacagagaacaccaagcagcccagcaagagctgccacaagcccaaggccatcgtgcacaccgagaaagtgaacatgatgagcctgaccgtgctgggcctgcggatgctgttcgccaaaaccgtggccgtgaacttcctgctgaccgccaagctgttcttcctc

SEQ ID NO: 3094 - DNA, 2757 bp, Artificial Sequence
  Synthetic Polynucloetide
atggccttaccagtgaccgccttgctcctgccgctggccttgctgctccacgccgccaggccggaagtgcagctggttgaatctggcggaggactggttcagcctggcggatctctgagactgtcttgtgccgccagcggcttcagcttcagcgacttttggatgagctgggtccgacaggcccctggcaaaggacttgaatgggtcgccacaatcagccaggccggcagcgagaaggactacgtggactctgtgaagggcagattcaccatcagccgggacaacgccaagaagtccctgtacctccagatgaacagcctgagagccgaggacaccgccgtgtactattgtgcctctggcgtgtacagcttcgactacagaggccagggcaccctggtcacagtctcttctggtaccggcggaggcggatctggcggcggaggtagcggtggcggaggatctgaattcgacatccagatgacccagagccccagcagcctgtctgccagcgtgggcgacagagtgaccatcacatgcaaggccagccaggacgtgtccattgccgtggcctggtatcagcagaagcccggcaaggcccccaaggtgctgatctacagcgccagctacagatacaccggcgtgcccgacagattcagcggctctggcagcggcaccgacttcaccttcaccatcagctccctccagcccgaggatattgccgtgtactactgccagcagcactacatcacccccctgacctttggcggaggcaccaaggtggaaatcaagctcgagggacagcctaaggccaatcctaccgtgacactgttccctccaagcagcgaagaactccaggccaacaaggccacacttgtgtgcctgatctccgacttctaccctggggctgtgacagtggcttggaaggccgatggatctcctgtgaaagccggcgtggaaaccaccaagccatccaagcagagcaacaacaaatacgccgccagctcctacctgagcctgacacctgagcagtggaagtcccacagatcctacagctgccaagtgacccacgaaggcagcaccgtggaaaagacagtggcccctacagagtgcagccccatcaagaccgatgtgattacaatggaccccaaggacaactgctccaaggacgccaacgataccctgctgctccagctgaccaacaccagcgcctactacatgtacttgttgctgctgctgaagtccgtggtgtacttcgccatcatcacatgctgcctgctgcggagaaccgccttctgctgcaacggcgagaagtctagggccaagcgatctggatctggagcaacaaacttctcactactcaaacaagcaggtgacgtggaggagaatcccgggcctactagtatggactggatttggcgcatccttttccttgtcggcgctgctaccggcgcgcattccgggccccagctccagctgcaagagtctggacctggcctggtcaagcctagcgagacactgagcctgacctgtaccgtgtccggcgatagcatcagcagcggcgattactactggggctggatcagacagcctcctggcaaaggactggaatggatcggccacatctactacagcggcgtgacctactacaaccccagcctgaagtccagagtgaccatcagcgtggacaccagccggaaccagttctccctgaagctgtctagcgtgacagccgccgataccgccgtgtactactgcaccagagaggacagcagcaactggcggagtagaggccagggaacactggtcacagttagctctggatccggcggaggcggaagtggaggcggaggatctggcggcggaggctctttcgaacagatccaactggtgcagagcggccacgaagtgaagaaacctggggccagcgtgaaggtgtcctgcaaagccagcggctacacctttaccaactacggcatgaactgggtgcgccaggcccctggacagggcctggaatggatgggctggatcaacaccaagaccggcgagcccacctacgccgaagagttcaagggcagattcgtgttcagcctggaaaccagcgcctccaccgcctacctccagatcagctctctgaaggccgaggacaccgccatgtacttttgcggcagaggcggctacggcagcagctactggtacttcgatgtgtggggccagggcaccaccgtgaccgtgtcatctacgcgtgcctctacaaagggaccctccgtgtttcctctggctcccagcagcaagtctacaagcggaggaacagccgctctgggctgcctggtcaaggattactttcccgagcctgtgaccgtgtcctggaatagcggagcactgacaagcggcgtgcacacctttccagccgtgctgcaaagcagcggcctgtactctctgagcagcgtggtcacagtgcctagctctagcctgggcacccagacctacatctgcaatgtgaaccacaagcctagcaacaccaaggtggacaagagagtggaacccaagagctgtgaagtgaaaaccgactccaccgaccacgtgaagcccaaagagacagagaacaccaagcagcccagcaagagctgccacaagcccaaggccatcgtgcacaccgagaaagtgaacatgatgagcctgaccgtgctgggcctgcggatgctgttcgccaaaaccgtggccgtgaacttcctgctgaccgccaagctgttcttcctc

SEQ ID NO: 3095 - DNA, 2763 bp, Artificial Sequence
  Synthetic Polynucloetide
atggccttaccagtgaccgccttgctcctgccgctggccttgctgctccacgccgccaggccggaagtgcagctggttgaatctggcggaggactggttcagcctggcggatctctgagactgtcttgtgccgccagcggcttcagcttcagcgacttttggatgagctgggtccgacaggcccctggcaaaggacttgaatgggtcgccacaatcagccaggccggcagcgagaaggactacgtggactctgtgaagggcagattcaccatcagccgggacaacgccaagaagtccctgtacctccagatgaacagcctgagagccgaggacaccgccgtgtactattgtgcctctggcgtgtacagcttcgactacagaggccagggcaccctggtcacagtctcttctggtaccggcggaggcggatctggcggcggaggtagcggtggcggaggatctgaattcgacatcgtgatgacccagagccccgatagcctggccgtgtctctgggagagagagccaccatcaactgccgggccagcaagagcgtgtccaccagcggctacagctacatgcactggtatcagcagaagcccggccagccccccaagctgctgatctacctggcctccaacctggaaagcggcgtgcccgatagattcagcggcagcggctctggcaccgacttcaccctgaccatcagttctcttcaggccgaggacgtggccgtgtactactgccagcacagcagagagctgccctacaccttcggccagggcaccaagctggaaatcaagctcgagggacagcctaaggccaatcctaccgtgacactgttccctccaagcagcgaagaactccaggccaacaaggccacacttgtgtgcctgatctccgacttctaccctggggctgtgacagtggcttggaaggccgatggatctcctgtgaaagccggcgtggaaaccaccaagccatccaagcagagcaacaacaaatacgccgccagctcctacctgagcctgacacctgagcagtggaagtcccacagatcctacagctgccaagtgacccacgaaggcagcaccgtggaaaagacagtggcccctacagagtgcagccccatcaagaccgatgtgattacaatggaccccaaggacaactgctccaaggacgccaacgataccctgctgctccagctgaccaacaccagcgcctactacatgtacttgttgctgctgctgaagtccgtggtgtacttcgccatcatcacatgctgcctgctgcggagaaccgccttctgctgcaacggcgagaagtctagggccaagcgatctggatctggagcaacaaacttctcactactcaaacaagcaggtgacgtggaggagaatcccgggcctactagtatggactggatttggcgcatccttttccttgtcggcgctgctaccggcgcgcattccgggccccagctccagctgcaagagtctggacctggcctggtcaagcctagcgagacactgagcctgacctgtaccgtgtccggcgatagcatcagcagcggcgattactactggggctggatcagacagcctcctggcaaaggactggaatggatcggccacatctactacagcggcgtgacctactacaaccccagcctgaagtccagagtgaccatcagcgtggacaccagccggaaccagttctccctgaagctgtctagcgtgacagccgccgataccgccgtgtactactgcaccagagaggacagcagcaactggcggagtagaggccagggaacactggtcacagttagctctggatccggcggaggcggaagtggaggcggaggatctggcggcggaggctctttcgaacaggtgcaactccaggaatctggccctggccttgtgaagcccagcgagacactgagcctgacctgtaccgtgtccggcggcagcatcagctcttacggcgtgcactggattcggcagcctccaggcaagggcctggaatggatcggcgtgatctggacctccggcgtgaccgactacaacagcgccctgatgggcagagtgaccatctccgtggacaccagcaagaaccagttcagcctgaagctgagcagcgtgacagccgccgataccgccgtgtattattgcgccagagatggcgactacgaccgctacacaatggactactggggccagggaacccttgtgaccgtgtcctctacgcgtgcctctacaaagggaccctccgtgtttcctctggctcccagcagcaagtctacaagcggaggaacagccgctctgggctgcctggtcaaggattactttcccgagcctgtgaccgtgtcctggaatagcggagcactgacaagcggcgtgcacacctttccagccgtgctgcaaagcagcggcctgtactctctgagcagcgtggtcacagtgcctagctctagcctgggcacccagacctacatctgcaatgtgaaccacaagcctagcaacaccaaggtggacaagagagtggaacccaagagctgtgaagtgaaaaccgactccaccgaccacgtgaagcccaaagagacagagaacaccaagcagcccagcaagagctgccacaagcccaaggccatcgtgcacaccgagaaagtgaacatgatgagcctgaccgtgctgggcctgcggatgctgttcgccaaaaccgtggccgtgaacttcctgctgaccgccaagctgttcttcctc

SEQ ID NO: 3096 - DNA, 2763 bp, Artificial Sequence
  Synthetic Polynucloetide
atggccttaccagtgaccgccttgctcctgccgctggccttgctgctccacgccgccaggccggaagtgcagctggttgaatctggcggaggactggttcagcctggcggatctctgagactgtcttgtgccgccagcggcttcagcttcagcgacttttggatgagctgggtccgacaggcccctggcaaaggacttgaatgggtcgccacaatcagccaggccggcagcgagaaggactacgtggactctgtgaagggcagattcaccatcagccgggacaacgccaagaagtccctgtacctccagatgaacagcctgagagccgaggacaccgccgtgtactattgtgcctctggcgtgtacagcttcgactacagaggccagggcaccctggtcacagtctcttctggtaccggcggaggcggatctggcggcggaggtagcggtggcggaggatctgaattcgacatccagatgacccagagccccagcagcctgtctgccagcgtgggcgacagagtgaccatcacctgtagagccagccagagcatcggcaccagcctgcactggtatcagcagaagcctggcaaggcccccaagctgctgattaagttcgccagcagactgcagagcggcgtgcccagcagattttctggcagcggctccggcaccgacttcaccctgacaatcagctccctgcagcccgaggacttcgccacctactactgccagcagagccccggcttccctccaacctttggacagggcaccaagctggaaatcaagcggctcgagggacagcctaaggccaatcctaccgtgacactgttccctccaagcagcgaagaactccaggccaacaaggccacacttgtgtgcctgatctccgacttctaccctggggctgtgacagtggcttggaaggccgatggatctcctgtgaaagccggcgtggaaaccaccaagccatccaagcagagcaacaacaaatacgccgccagctcctacctgagcctgacacctgagcagtggaagtcccacagatcctacagctgccaagtgacccacgaaggcagcaccgtggaaaagacagtggcccctacagagtgcagccccatcaagaccgatgtgattacaatggaccccaaggacaactgctccaaggacgccaacgataccctgctgctccagctgaccaacaccagcgcctactacatgtacttgttgctgctgctgaagtccgtggtgtacttcgccatcatcacatgctgcctgctgcggagaaccgccttctgctgcaacggcgagaagtctagggccaagcgatctggatctggagcaacaaacttctcactactcaaacaagcaggtgacgtggaggagaatcccgggcctactagtatggactggatttggcgcatccttttccttgtcggcgctgctaccggcgcgcattccgggccccagctccagctgcaagagtctggacctggcctggtcaagcctagcgagacactgagcctgacctgtaccgtgtccggcgatagcatcagcagcggcgattactactggggctggatcagacagcctcctggcaaaggactggaatggatcggccacatctactacagcggcgtgacctactacaaccccagcctgaagtccagagtgaccatcagcgtggacaccagccggaaccagttctccctgaagctgtctagcgtgacagccgccgataccgccgtgtactactgcaccagagaggacagcagcaactggcggagtagaggccagggaacactggtcacagttagctctggatccggcggaggcggaagtggaggcggaggatctggcggcggaggctctttcgaacaggtgcaactggtggaatctggcggcggacttgtgaagccaggcggcagcctgagactgagctgtgccgccagcggcttcagcatcaccaccagcggctactactggacctggatcagacagttccccggcaagggcctggaatggatgggctacatcggctacaacagcaagacctactacaaccccgccctgaagtcccggatcaccatcagcagagacaacgccaagaacagcctgtacctgcagatgaactccctgagagccgaggataccgccgtgtactactgcgccagatccctgtacggcggctacaaggacgccttcgatagctggggccagggaacccttgtgaccgtgtctagcacgcgtgcctctacaaagggaccctccgtgtttcctctggctcccagcagcaagtctacaagcggaggaacagccgctctgggctgcctggtcaaggattactttcccgagcctgtgaccgtgtcctggaatagcggagcactgacaagcggcgtgcacacctttccagccgtgctgcaaagcagcggcctgtactctctgagcagcgtggtcacagtgcctagctctagcctgggcacccagacctacatctgcaatgtgaaccacaagcctagcaacaccaaggtggacaagagagtggaacccaagagctgtgaagtgaaaaccgactccaccgaccacgtgaagcccaaagagacagagaacaccaagcagcccagcaagagctgccacaagcccaaggccatcgtgcacaccgagaaagtgaacatgatgagcctgaccgtgctgggcctgcggatgctgttcgccaaaaccgtggccgtgaacttcctgctgaccgccaagctgttcttcctc

SEQ ID NO: 3097 - DNA, 2778 bp, Artificial Sequence
  Synthetic Polynucloetide
atggccttaccagtgaccgccttgctcctgccgctggccttgctgctccacgccgccaggccggaagtgcagctggttgaatctggcggaggactggttcagcctggcggatctctgagactgtcttgtgccgccagcggcttcagcttcagcgacttttggatgagctgggtccgacaggcccctggcaaaggacttgaatgggtcgccacaatcagccaggccggcagcgagaaggactacgtggactctgtgaagggcagattcaccatcagccgggacaacgccaagaagtccctgtacctccagatgaacagcctgagagccgaggacaccgccgtgtactattgtgcctctggcgtgtacagcttcgactacagaggccagggcaccctggtcacagtctcttctggtaccggcggaggcggatctggcggcggaggtagcggtggcggaggatctgaattcgacgagatcgtgctgacccagagccctctgagcctgcctgtgacacctggcgagcctgccagcatctcctgtagaagcagccagagcctgctgcacagcatcggctacaactacctggactggtatctccagaagcccggccagagcccccaactgctgatctacctgggcagcaacagagccagcggcgtgcccgatagattttccggcagcggctccggcaccgacttcaccctgaagatcagccgggtggaagccgaggacgtgggcgtgtactactgtatgcaggccctccagacccccctgacctttggcggaggcaccaaggtggaaatcaagcggctcgagggacagcctaaggccaatcctaccgtgacactgttccctccaagcagcgaagaactccaggccaacaaggccacacttgtgtgcctgatctccgacttctaccctggggctgtgacagtggcttggaaggccgatggatctcctgtgaaagccggcgtggaaaccaccaagccatccaagcagagcaacaacaaatacgccgccagctcctacctgagcctgacacctgagcagtggaagtcccacagatcctacagctgccaagtgacccacgaaggcagcaccgtggaaaagacagtggcccctacagagtgcagccccatcaagaccgatgtgattacaatggaccccaaggacaactgctccaaggacgccaacgataccctgctgctccagctgaccaacaccagcgcctactacatgtacttgttgctgctgctgaagtccgtggtgtacttcgccatcatcacatgctgcctgctgcggagaaccgccttctgctgcaacggcgagaagtctagggccaagcgatctggatctggagcaacaaacttctcactactcaaacaagcaggtgacgtggaggagaatcccgggcctactagtatggactggatttggcgcatccttttccttgtcggcgctgctaccggcgcgcattccgggccccagctccagctgcaagagtctggacctggcctggtcaagcctagcgagacactgagcctgacctgtaccgtgtccggcgatagcatcagcagcggcgattactactggggctggatcagacagcctcctggcaaaggactggaatggatcggccacatctactacagcggcgtgacctactacaaccccagcctgaagtccagagtgaccatcagcgtggacaccagccggaaccagttctccctgaagctgtctagcgtgacagccgccgataccgccgtgtactactgcaccagagaggacagcagcaactggcggagtagaggccagggaacactggtcacagttagctctggatccggcggaggcggaagtggaggcggaggatctggcggcggaggctctttcgaagaagtgcaactggtggaaagcggaggcggcgtggtgcagcctggaagaagcctgagactgagctgtgccgccagcggcttcaccttccggtcctacggaatgcactgggtgcgccaggcccctggcaaaggactggaatgggtggccgtgatctcctacgacggctccaacaagtactacaccgacagcgtgaacggcagattcaccatcagcagagacaacagcaagaacaccctgtacctccagatgaacagcctgcgggccgaggacaccgccgtgtactattgtgctagaggcggaggctactacgagacaagcggccctgattactggggccagggcacactcgtgaccgtgtctagtacgcgtgcctctacaaagggaccctccgtgtttcctctggctcccagcagcaagtctacaagcggaggaacagccgctctgggctgcctggtcaaggattactttcccgagcctgtgaccgtgtcctggaatagcggagcactgacaagcggcgtgcacacctttccagccgtgctgcaaagcagcggcctgtactctctgagcagcgtggtcacagtgcctagctctagcctgggcacccagacctacatctgcaatgtgaaccacaagcctagcaacaccaaggtggacaagagagtggaacccaagagctgtgaagtgaaaaccgactccaccgaccacgtgaagcccaaagagacagagaacaccaagcagcccagcaagagctgccacaagcccaaggccatcgtgcacaccgagaaagtgaacatgatgagcctgaccgtgctgggcctgcggatgctgttcgccaaaaccgtggccgtgaacttcctgctgaccgccaagctgttcttcctc

SEQ ID NO: 3098 - DNA, 2772 bp, Artificial Sequence
  Synthetic Polynucloetide
atggccttaccagtgaccgccttgctcctgccgctggccttgctgctccacgccgccaggccggaagtgcagctggttgaatctggcggaggactggttcagcctggcggatctctgagactgtcttgtgccgccagcggcttcagcttcagcgacttttggatgagctgggtccgacaggcccctggcaaaggacttgaatgggtcgccacaatcagccaggccggcagcgagaaggactacgtggactctgtgaagggcagattcaccatcagccgggacaacgccaagaagtccctgtacctccagatgaacagcctgagagccgaggacaccgccgtgtactattgtgcctctggcgtgtacagcttcgactacagaggccagggcaccctggtcacagtctcttctggtaccggcggaggcggatctggcggcggaggtagcggtggcggaggatctgaattcgacgacgtcgtgatgacccagagccctctgagcctgcctgtgacacctggcgagcctgccagcatctcctgtagaagcagccagagcctgctgcacagcatcggctacaactacctgcactggtttctccagaagcccggccagagcccccaactgctgatctacctgggcagcaacagagccagcggcgtgcccgatagattttccggcagcggctccggcaccgacttcaccctgaagatcagccgggtggaagccgaggacgtgggcgtgtactactgtatgcaggccctccagacccctcccacctttggacagggcaccagactggaaatcaagcggctcgagggacagcctaaggccaatcctaccgtgacactgttccctccaagcagcgaagaactccaggccaacaaggccacacttgtgtgcctgatctccgacttctaccctggggctgtgacagtggcttggaaggccgatggatctcctgtgaaagccggcgtggaaaccaccaagccatccaagcagagcaacaacaaatacgccgccagctcctacctgagcctgacacctgagcagtggaagtcccacagatcctacagctgccaagtgacccacgaaggcagcaccgtggaaaagacagtggcccctacagagtgcagccccatcaagaccgatgtgattacaatggaccccaaggacaactgctccaaggacgccaacgataccctgctgctccagctgaccaacaccagcgcctactacatgtacttgttgctgctgctgaagtccgtggtgtacttcgccatcatcacatgctgcctgctgcggagaaccgccttctgctgcaacggcgagaagtctagggccaagcgatctggatctggagcaacaaacttctcactactcaaacaagcaggtgacgtggaggagaatcccgggcctactagtatggactggatttggcgcatccttttccttgtcggcgctgctaccggcgcgcattccgggccccagctccagctgcaagagtctggacctggcctggtcaagcctagcgagacactgagcctgacctgtaccgtgtccggcgatagcatcagcagcggcgattactactggggctggatcagacagcctcctggcaaaggactggaatggatcggccacatctactacagcggcgtgacctactacaaccccagcctgaagtccagagtgaccatcagcgtggacaccagccggaaccagttctccctgaagctgtctagcgtgacagccgccgataccgccgtgtactactgcaccagagaggacagcagcaactggcggagtagaggccagggaacactggtcacagttagctctggatccggcggaggcggaagtggaggcggaggatctggcggcggaggctctttcgaacaactccaactccaggaaagcggccctggcctcgtgaagcctagcggcacactgagcctgacatgtgccgtgtctggcggcagcatcagcagcagcaactggtggtcttgggtgcgccagcctcctggcaagggcctggaatggatcggcgaaatctaccacagcggcagcaccaactacaaccccagcctgaagtccagagtgaccatcagcgtggacaagagcaagaaccagttctccctgaagctgagcagcgtgacagccgccgataccgccgtgtactattgcgtgggcagcccctacggcgactacgtgctggattattggggccagggcaccctcgtgaccgtgtctagtacgcgtgcctctacaaagggaccctccgtgtttcctctggctcccagcagcaagtctacaagcggaggaacagccgctctgggctgcctggtcaaggattactttcccgagcctgtgaccgtgtcctggaatagcggagcactgacaagcggcgtgcacacctttccagccgtgctgcaaagcagcggcctgtactctctgagcagcgtggtcacagtgcctagctctagcctgggcacccagacctacatctgcaatgtgaaccacaagcctagcaacaccaaggtggacaagagagtggaacccaagagctgtgaagtgaaaaccgactccaccgaccacgtgaagcccaaagagacagagaacaccaagcagcccagcaagagctgccacaagcccaaggccatcgtgcacaccgagaaagtgaacatgatgagcctgaccgtgctgggcctgcggatgctgttcgccaaaaccgtggccgtgaacttcctgctgaccgccaagctgttcttcctc

SEQ ID NO: 3099 - DNA, 2766 bp, Artificial Sequence
  Synthetic Polynucloetide
atggccttaccagtgaccgccttgctcctgccgctggccttgctgctccacgccgccaggccggaagtgcagctggttgaatctggcggaggactggttcagcctggcggatctctgagactgtcttgtgccgccagcggcttcagcttcagcgacttttggatgagctgggtccgacaggcccctggcaaaggacttgaatgggtcgccacaatcagccaggccggcagcgagaaggactacgtggactctgtgaagggcagattcaccatcagccgggacaacgccaagaagtccctgtacctccagatgaacagcctgagagccgaggacaccgccgtgtactattgtgcctctggcgtgtacagcttcgactacagaggccagggcaccctggtcacagtctcttctggtaccggcggaggcggatctggcggcggaggtagcggtggcggaggatctgaattcgacgagatcgtgctgacacagagccctggcaccctgagcctgtctctgggagagagagccacactgagctgtcgggccagccagtctatcagcagcagcttcctggcctggtatcagcagaagcccggccaggcccctaagctgctgatctacgccgccagcacaagagccaccggcatccccgatagattcagcggctctggcagcggcaccgacttcaccctgaccatcagcagactggaacccgaggacttcgccgtgtactactgccagcagtacggcagaagcctgagcttcggcggaggcaccaaggtggaagtgaagctcgagggacagcctaaggccaatcctaccgtgacactgttccctccaagcagcgaagaactccaggccaacaaggccacacttgtgtgcctgatctccgacttctaccctggggctgtgacagtggcttggaaggccgatggatctcctgtgaaagccggcgtggaaaccaccaagccatccaagcagagcaacaacaaatacgccgccagctcctacctgagcctgacacctgagcagtggaagtcccacagatcctacagctgccaagtgacccacgaaggcagcaccgtggaaaagacagtggcccctacagagtgcagccccatcaagaccgatgtgattacaatggaccccaaggacaactgctccaaggacgccaacgataccctgctgctccagctgaccaacaccagcgcctactacatgtacttgttgctgctgctgaagtccgtggtgtacttcgccatcatcacatgctgcctgctgcggagaaccgccttctgctgcaacggcgagaagtctagggccaagcgatctggatctggagcaacaaacttctcactactcaaacaagcaggtgacgtggaggagaatcccgggcctactagtatggactggatttggcgcatccttttccttgtcggcgctgctaccggcgcgcattccgggccccagctccagctgcaagagtctggacctggcctggtcaagcctagcgagacactgagcctgacctgtaccgtgtccggcgatagcatcagcagcggcgattactactggggctggatcagacagcctcctggcaaaggactggaatggatcggccacatctactacagcggcgtgacctactacaaccccagcctgaagtccagagtgaccatcagcgtggacaccagccggaaccagttctccctgaagctgtctagcgtgacagccgccgataccgccgtgtactactgcaccagagaggacagcagcaactggcggagtagaggccagggaacactggtcacagttagctctggatccggcggaggcggaagtggaggcggaggatctggcggcggaggctctttcgaacaggtgcaactccagcagtctggccccggactcgtgaagcctagccagacactgagcctgacctgcgccatcagcggcgatagcgtgtccggcaatagcgccacctggaactggatcagacagagcccatctcggggcctggaatggctgggccggacctactaccgcagcaagtggaaccacgactacgccgagagcgtgaagtcccggatcaccatcaaccccgacaccagcaagaaccagttctccttgcaactgaacagcgtgacccccgaggacacagccgtgtattattgcgccagaggcgacagcagctcttggtacgccttcgactattggggccagggcaccctcgtgaccgtgtctagtacgcgtgcctctacaaagggaccctccgtgtttcctctggctcccagcagcaagtctacaagcggaggaacagccgctctgggctgcctggtcaaggattactttcccgagcctgtgaccgtgtcctggaatagcggagcactgacaagcggcgtgcacacctttccagccgtgctgcaaagcagcggcctgtactctctgagcagcgtggtcacagtgcctagctctagcctgggcacccagacctacatctgcaatgtgaaccacaagcctagcaacaccaaggtggacaagagagtggaacccaagagctgtgaagtgaaaaccgactccaccgaccacgtgaagcccaaagagacagagaacaccaagcagcccagcaagagctgccacaagcccaaggccatcgtgcacaccgagaaagtgaacatgatgagcctgaccgtgctgggcctgcggatgctgttcgccaaaaccgtggccgtgaacttcctgctgaccgccaagctgttcttcctc

SEQ ID NO: 3100 - DNA, 2763 bp, Artificial Sequence
  Synthetic Polynucloetide
atggccttaccagtgaccgccttgctcctgccgctggccttgctgctccacgccgccaggccggaagtgcagctggttgaatctggcggaggactggttcagcctggcggatctctgagactgtcttgtgccgccagcggcttcagcttcagcgacttttggatgagctgggtccgacaggcccctggcaaaggacttgaatgggtcgccacaatcagccaggccggcagcgagaaggactacgtggactctgtgaagggcagattcaccatcagccgggacaacgccaagaagtccctgtacctccagatgaacagcctgagagccgaggacaccgccgtgtactattgtgcctctggcgtgtacagcttcgactacagaggccagggcaccctggtcacagtctcttctggtaccggcggaggcggatctggcggcggaggtagcggtggcggaggatctgaattcgaccagagcgtcgtgacacagcctcctagcgtgtcagtggcccctggcaagaccgccagaatcacctgtggccggaacaacatcggcagcaagagcgtgcactggtatcagcagaagcccggccaggctcctgtgctggtggtgtacgacgacagcgacagacccagcggcatccccgagagattcagcggcagcaactccggcaataccgccaccctgaccatcagcagagtggaagccggcgacgaggccgactactactgccaagtgtgggacagcagcagcgatcacgtggtgtttggcggaggcaccaagctgacagtgctgggtctcgagggacagcctaaggccaatcctaccgtgacactgttccctccaagcagcgaagaactccaggccaacaaggccacacttgtgtgcctgatctccgacttctaccctggggctgtgacagtggcttggaaggccgatggatctcctgtgaaagccggcgtggaaaccaccaagccatccaagcagagcaacaacaaatacgccgccagctcctacctgagcctgacacctgagcagtggaagtcccacagatcctacagctgccaagtgacccacgaaggcagcaccgtggaaaagacagtggcccctacagagtgcagccccatcaagaccgatgtgattacaatggaccccaaggacaactgctccaaggacgccaacgataccctgctgctccagctgaccaacaccagcgcctactacatgtacttgttgctgctgctgaagtccgtggtgtacttcgccatcatcacatgctgcctgctgcggagaaccgccttctgctgcaacggcgagaagtctagggccaagcgatctggatctggagcaacaaacttctcactactcaaacaagcaggtgacgtggaggagaatcccgggcctactagtatggactggatttggcgcatccttttccttgtcggcgctgctaccggcgcgcattccgggccccagctccagctgcaagagtctggacctggcctggtcaagcctagcgagacactgagcctgacctgtaccgtgtccggcgatagcatcagcagcggcgattactactggggctggatcagacagcctcctggcaaaggactggaatggatcggccacatctactacagcggcgtgacctactacaaccccagcctgaagtccagagtgaccatcagcgtggacaccagccggaaccagttctccctgaagctgtctagcgtgacagccgccgataccgccgtgtactactgcaccagagaggacagcagcaactggcggagtagaggccagggaacactggtcacagttagctctggatccggcggaggcggaagtggaggcggaggatctggcggcggaggctctttcgaagtgcaactggtgcagtctggcggaggggtcatgcggcctggcggatctctgagactgtcttgtgccgccagcggcttcaccttcgacgactacggcatgagctgggtgcgccaggcccctggaaaaggcctggaatgggtgtccggcatcaactggaatggcggcagcaccggctacgccgattctgtgcggggcagattcaccatcagccgggacaacgccaagaacagcctgtacctgcagatgaactccctgcgggccgaggacaccgccctgtactattgcgccagagagcggggctacggctaccacgaccctcacgattattggggccagggcacccttgttaccgtgtcctctacgcgtgcctctacaaagggaccctccgtgtttcctctggctcccagcagcaagtctacaagcggaggaacagccgctctgggctgcctggtcaaggattactttcccgagcctgtgaccgtgtcctggaatagcggagcactgacaagcggcgtgcacacctttccagccgtgctgcaaagcagcggcctgtactctctgagcagcgtggtcacagtgcctagctctagcctgggcacccagacctacatctgcaatgtgaaccacaagcctagcaacaccaaggtggacaagagagtggaacccaagagctgtgaagtgaaaaccgactccaccgaccacgtgaagcccaaagagacagagaacaccaagcagcccagcaagagctgccacaagcccaaggccatcgtgcacaccgagaaagtgaacatgatgagcctgaccgtgctgggcctgcggatgctgttcgccaaaaccgtggccgtgaacttcctgctgaccgccaagctgttcttcctc

SEQ ID NO: 3101 - DNA, 2802 bp, Artificial Sequence
  Synthetic Polynucloetide
atggccttaccagtgaccgccttgctcctgccgctggccttgctgctccacgccgccaggccggaagtgcagctggttgaatctggcggaggactggttcagcctggcggatctctgagactgtcttgtgccgccagcggcttcagcttcagcgacttttggatgagctgggtccgacaggcccctggcaaaggacttgaatgggtcgccacaatcagccaggccggcagcgagaaggactacgtggactctgtgaagggcagattcaccatcagccgggacaacgccaagaagtccctgtacctccagatgaacagcctgagagccgaggacaccgccgtgtactattgtgcctctggcgtgtacagcttcgactacagaggccagggcaccctggtcacagtctcttctggtaccggcggaggcggatctggcggcggaggtagcggtggcggaggatctgaattcgaacagaaactcatcagtgaagaagacctggaattccaggctgtcgtgacacagcctcctagcgcctctggcacaccaggccagagagtgaccatctcctgtagcggcagcagcagcaacatcggcagcaacaccgtgaactggtatcagcaggtgcccggcaccgctcccaagctgctgatctacagcaacaaccagcggcccagcggcgtgcccgatagattttctggcagcaagagcggcaccagcgccagcctggctatctctggactccagtccgaggacgaggccgactactattgcgccgcctgggacgatagcctgaacggctgggtgttcggcggaggcaccaagctgacagtgctgctcgagggacagcctaaggccaatcctaccgtgacactgttccctccaagcagcgaagaactccaggccaacaaggccacacttgtgtgcctgatctccgacttctaccctggggctgtgacagtggcttggaaggccgatggatctcctgtgaaagccggcgtggaaaccaccaagccatccaagcagagcaacaacaaatacgccgccagctcctacctgagcctgacacctgagcagtggaagtcccacagatcctacagctgccaagtgacccacgaaggcagcaccgtggaaaagacagtggcccctacagagtgcagccccatcaagaccgatgtgattacaatggaccccaaggacaactgctccaaggacgccaacgataccctgctgctccagctgaccaacaccagcgcctactacatgtacttgttgctgctgctgaagtccgtggtgtacttcgccatcatcacatgctgcctgctgcggagaaccgccttctgctgcaacggcgagaagtctagggccaagcgatctggatctggagcaacaaacttctcactactcaaacaagcaggtgacgtggaggagaatcccgggcctactagtatggactggatttggcgcatccttttccttgtcggcgctgctaccggcgcgcattccgggccccagctccagctgcaagagtctggacctggcctggtcaagcctagcgagacactgagcctgacctgtaccgtgtccggcgatagcatcagcagcggcgattactactggggctggatcagacagcctcctggcaaaggactggaatggatcggccacatctactacagcggcgtgacctactacaaccccagcctgaagtccagagtgaccatcagcgtggacaccagccggaaccagttctccctgaagctgtctagcgtgacagccgccgataccgccgtgtactactgcaccagagaggacagcagcaactggcggagtagaggccagggaacactggtcacagttagctctggatccggcggaggcggaagtggaggcggaggatctggcggcggaggctctttcgaacagatgcaactggtgcagagcggagccgaagtgaaagagcctggcgagagcctgcggatctcctgcaagggcagcggctacagcttcaccaatttctggatctcttgggtgcgccagatgcccggcaagggcctggaatggatgggcagagtggaccccggctactcctacagcacctacagccctagcttccagggccacgtgaccatcagcgccgacaagagcaccagcaccgcctacctccagtggaacagcctgaaggccagcgacaccgccatgtactactgcgccagagtgcagtacagcggctattacgattggttcgacccctggggccagggcacactcgtgacagtgtcaagcacgcgtgcctctacaaagggaccctccgtgtttcctctggctcccagcagcaagtctacaagcggaggaacagccgctctgggctgcctggtcaaggattactttcccgagcctgtgaccgtgtcctggaatagcggagcactgacaagcggcgtgcacacctttccagccgtgctgcaaagcagcggcctgtactctctgagcagcgtggtcacagtgcctagctctagcctgggcacccagacctacatctgcaatgtgaaccacaagcctagcaacaccaaggtggacaagagagtggaacccaagagctgtgaagtgaaaaccgactccaccgaccacgtgaagcccaaagagacagagaacaccaagcagcccagcaagagctgccacaagcccaaggccatcgtgcacaccgagaaagtgaacatgatgagcctgaccgtgctgggcctgcggatgctgttcgccaaaaccgtggccgtgaacttcctgctgaccgccaagctgttcttcctc

SEQ ID NO: 3102 - DNA, 2784 bp, Artificial Sequence
  Synthetic Polynucloetide
atggccttaccagtgaccgccttgctcctgccgctggccttgctgctccacgccgccaggccggaagtgcagctggttgaatctggcggaggactggttcagcctggcggatctctgagactgtcttgtgccgccagcggcttcagcttcagcgacttttggatgagctgggtccgacaggcccctggcaaaggacttgaatgggtcgccacaatcagccaggccggcagcgagaaggactacgtggactctgtgaagggcagattcaccatcagccgggacaacgccaagaagtccctgtacctccagatgaacagcctgagagccgaggacaccgccgtgtactattgtgcctctggcgtgtacagcttcgactacagaggccagggcaccctggtcacagtctcttctggtaccggcggaggcggatctggcggcggaggtagcggtggcggaggatctgaattcgaacagaaactcatcagtgaagaagacctggaattcgacatccagatgacccagagccccagcacactgagcgccagcgtgggcgacagagtgaccatcacctgtcgggccagccagaacatcaacaagtggctggcctggtatcagcagaggcccggaaaagccccccagctgctgatctacaaggccagcagcctggaaagcggcgtgcccagcagattttctggcagcggctctggcaccgagtacaccctgaccatcagctccctccagcccgacgacttcgccacctactactgccagcagtacaacagctacgccaccttcggccagggcaccaaggtggaaatcaagagactcgagggacagcctaaggccaatcctaccgtgacactgttccctccaagcagcgaagaactccaggccaacaaggccacacttgtgtgcctgatctccgacttctaccctggggctgtgacagtggcttggaaggccgatggatctcctgtgaaagccggcgtggaaaccaccaagccatccaagcagagcaacaacaaatacgccgccagctcctacctgagcctgacacctgagcagtggaagtcccacagatcctacagctgccaagtgacccacgaaggcagcaccgtggaaaagacagtggcccctacagagtgcagccccatcaagaccgatgtgattacaatggaccccaaggacaactgctccaaggacgccaacgataccctgctgctccagctgaccaacaccagcgcctactacatgtacttgttgctgctgctgaagtccgtggtgtacttcgccatcatcacatgctgcctgctgcggagaaccgccttctgctgcaacggcgagaagtctagggccaagcgatctggatctggagcaacaaacttctcactactcaaacaagcaggtgacgtggaggagaatcccgggcctactagtatggactggatttggcgcatccttttccttgtcggcgctgctaccggcgcgcattccgggccccagctccagctgcaagagtctggacctggcctggtcaagcctagcgagacactgagcctgacctgtaccgtgtccggcgatagcatcagcagcggcgattactactggggctggatcagacagcctcctggcaaaggactggaatggatcggccacatctactacagcggcgtgacctactacaaccccagcctgaagtccagagtgaccatcagcgtggacaccagccggaaccagttctccctgaagctgtctagcgtgacagccgccgataccgccgtgtactactgcaccagagaggacagcagcaactggcggagtagaggccagggaacactggtcacagttagctctggatccggcggaggcggaagtggaggcggaggatctggcggcggaggctctttcgaacaggtgcagctggtgcagtctggggccgaagtgaagaagcctggcgagagcctgaagatcagctgcaagggctccggctacaacttctctaacaagtggatcggctgggtgcgccagctgcctggcagaggactggaatggatcgccatcatctaccccggctacagcgacatcacctacagccccagcttccagggccgcgtgacaatcagcgccgacaccagcatcaacaccgcctacctgcactggcacagcctgaaggccagcgacaccgccatgtactactgcgtgcggcatacagccctggctggcttcgattattggggcctgggcaccctcgtgaccgtgtctagtacgcgtgcctctacaaagggaccctccgtgtttcctctggctcccagcagcaagtctacaagcggaggaacagccgctctgggctgcctggtcaaggattactttcccgagcctgtgaccgtgtcctggaatagcggagcactgacaagcggcgtgcacacctttccagccgtgctgcaaagcagcggcctgtactctctgagcagcgtggtcacagtgcctagctctagcctgggcacccagacctacatctgcaatgtgaaccacaagcctagcaacaccaaggtggacaagagagtggaacccaagagctgtgaagtgaaaaccgactccaccgaccacgtgaagcccaaagagacagagaacaccaagcagcccagcaagagctgccacaagcccaaggccatcgtgcacaccgagaaagtgaacatgatgagcctgaccgtgctgggcctgcggatgctgttcgccaaaaccgtggccgtgaacttcctgctgaccgccaagctgttcttcctc

SEQ ID NO: 3103 - DNA, 2757 bp, Artificial Sequence
  Synthetic Polynucloetide
atggccttaccagtgaccgccttgctcctgccgctggccttgctgctccacgccgccaggccggaagtgcagctggttgaatctggcggaggactggttcagcctggcggatctctgagactgtcttgtgccgccagcggcttcagcttcagcgacttttggatgagctgggtccgacaggcccctggcaaaggacttgaatgggtcgccacaatcagccaggccggcagcgagaaggactacgtggactctgtgaagggcagattcaccatcagccgggacaacgccaagaagtccctgtacctccagatgaacagcctgagagccgaggacaccgccgtgtactattgtgcctctggcgtgtacagcttcgactacagaggccagggcaccctggtcacagtctcttctggtaccggcggaggcggatctggcggcggaggtagcggtggcggaggatctgaattcatcgtgctgacacagagccctgcttctctggccgtgtctctgggacagagagccaccatcagctgtagagccagcgagagcgtggacaactacggcaacaccttcatgcactggtatcagcagaagcccggccagcctcctaagctgctgatctacagagccagcaacctggaaagcggcatccccgccagattttctggcagcggcagcagaaccgacttcaccctgaccatcaatcccgtggaagccgacgacgtggcaacctactactgccagcagagcaacgaggaccctcctacatttggagccggcaccaagctggaactgaaactcgagggacagcctaaggccaatcctaccgtgacactgttccctccaagcagcgaagaactccaggccaacaaggccacacttgtgtgcctgatctccgacttctaccctggggctgtgacagtggcttggaaggccgatggatctcctgtgaaagccggcgtggaaaccaccaagccatccaagcagagcaacaacaaatacgccgccagctcctacctgagcctgacacctgagcagtggaagtcccacagatcctacagctgccaagtgacccacgaaggcagcaccgtggaaaagacagtggcccctacagagtgcagccccatcaagaccgatgtgattacaatggaccccaaggacaactgctccaaggacgccaacgataccctgctgctccagctgaccaacaccagcgcctactacatgtacttgttgctgctgctgaagtccgtggtgtacttcgccatcatcacatgctgcctgctgcggagaaccgccttctgctgcaacggcgagaagtctagggccaagcgatctggatctggagcaacaaacttctcactactcaaacaagcaggtgacgtggaggagaatcccgggcctactagtatggactggatttggcgcatccttttccttgtcggcgctgctaccggcgcgcattccgggccccagctccagctgcaagagtctggacctggcctggtcaagcctagcgagacactgagcctgacctgtaccgtgtccggcgatagcatcagcagcggcgattactactggggctggatcagacagcctcctggcaaaggactggaatggatcggccacatctactacagcggcgtgacctactacaaccccagcctgaagtccagagtgaccatcagcgtggacaccagccggaaccagttctccctgaagctgtctagcgtgacagccgccgataccgccgtgtactactgcaccagagaggacagcagcaactggcggagtagaggccagggaacactggtcacagttagctctggatccggcggaggcggaagtggaggcggaggatctggcggcggaggctctttcgaacagattcagctggtgcagtctggccccgagctgaagaaacctggcgagacagtgaagatcagctgcaaggccagcggctacatcttcaccaattacggcatgaactgggtcaagcaggcccctggcaagagcttcaagtggatgggctggatcaacacctacaccggcgagagcacatacagcgccgacttcaagggcagattcgccttcagcctggaaaccagcgccagcacagcctacctgcacatcaacgacctgaagaacgaggacaccgccacctacttttgcgccagaagcggcggctacgaccctatggattattggggccagggcaccagcgtgaccgtttcttctacgcgtgcctctacaaagggaccctccgtgtttcctctggctcccagcagcaagtctacaagcggaggaacagccgctctgggctgcctggtcaaggattactttcccgagcctgtgaccgtgtcctggaatagcggagcactgacaagcggcgtgcacacctttccagccgtgctgcaaagcagcggcctgtactctctgagcagcgtggtcacagtgcctagctctagcctgggcacccagacctacatctgcaatgtgaaccacaagcctagcaacaccaaggtggacaagagagtggaacccaagagctgtgaagtgaaaaccgactccaccgaccacgtgaagcccaaagagacagagaacaccaagcagcccagcaagagctgccacaagcccaaggccatcgtgcacaccgagaaagtgaacatgatgagcctgaccgtgctgggcctgcggatgctgttcgccaaaaccgtggccgtgaacttcctgctgaccgccaagctgttcttcctc

SEQ ID NO: 3104 - DNA, 2754 bp, Artificial Sequence
  Synthetic Polynucloetide
atggccttaccagtgaccgccttgctcctgccgctggccttgctgctccacgccgccaggccggaagtgcagctggttgaatctggcggaggactggttcagcctggcggatctctgagactgtcttgtgccgccagcggcttcagcttcagcgacttttggatgagctgggtccgacaggcccctggcaaaggacttgaatgggtcgccacaatcagccaggccggcagcgagaaggactacgtggactctgtgaagggcagattcaccatcagccgggacaacgccaagaagtccctgtacctccagatgaacagcctgagagccgaggacaccgccgtgtactattgtgcctctggcgtgtacagcttcgactacagaggccagggcaccctggtcacagtctcttctggtaccggcggaggcggatctggcggcggaggtagcggtggcggaggatctgaattcgagatcgtgctgacacagagccctggcaccctgagcctgtctccaggcgaaagagccacactgagctgtcgggccagccagagcgtgtccaatacctacctggcctggtatcaccagaggcccggacaggctccccggctgctgatctatggcgcttctagcagagccaccggcatccccgatagattcagcggctctggcagcggcaccgacttcgccctgacaatcagctccctggaacccgaggacttcgccgtgtactactgccagcagtacagcaactcctggaccttcggccagggcaccaaggtggaaatcaagagactcgagggacagcctaaggccaatcctaccgtgacactgttccctccaagcagcgaagaactccaggccaacaaggccacacttgtgtgcctgatctccgacttctaccctggggctgtgacagtggcttggaaggccgatggatctcctgtgaaagccggcgtggaaaccaccaagccatccaagcagagcaacaacaaatacgccgccagctcctacctgagcctgacacctgagcagtggaagtcccacagatcctacagctgccaagtgacccacgaaggcagcaccgtggaaaagacagtggcccctacagagtgcagccccatcaagaccgatgtgattacaatggaccccaaggacaactgctccaaggacgccaacgataccctgctgctccagctgaccaacaccagcgcctactacatgtacttgttgctgctgctgaagtccgtggtgtacttcgccatcatcacatgctgcctgctgcggagaaccgccttctgctgcaacggcgagaagtctagggccaagcgatctggatctggagcaacaaacttctcactactcaaacaagcaggtgacgtggaggagaatcccgggcctactagtatggactggatttggcgcatccttttccttgtcggcgctgctaccggcgcgcattccgggccccagctccagctgcaagagtctggacctggcctggtcaagcctagcgagacactgagcctgacctgtaccgtgtccggcgatagcatcagcagcggcgattactactggggctggatcagacagcctcctggcaaaggactggaatggatcggccacatctactacagcggcgtgacctactacaaccccagcctgaagtccagagtgaccatcagcgtggacaccagccggaaccagttctccctgaagctgtctagcgtgacagccgccgataccgccgtgtactactgcaccagagaggacagcagcaactggcggagtagaggccagggaacactggtcacagttagctctggatccggcggaggcggaagtggaggcggaggatctggcggcggaggctctttcgaacaggtgcaactggtggaatctggcgggggagtggtgcagcctggcagaagcctgagactgtcttgtgccgccagcggcttcaccttcagcagctacgacatgcactgggtgcgccaggcccctggcaaaggactggaatgggtggccgtgatctcctacgacggcaccaacgagtattacgccgacagcgtgaagggccggttcaccatctccagagacaccagcaagaacaccctgtacctccagatgaacagcctgcgggccgaggacacagccgtgtattattgcgccagagagcggtacttcgactggtccttcgactactggggccagggaaccctggtgtccgtgtctagtacgcgtgcctctacaaagggaccctccgtgtttcctctggctcccagcagcaagtctacaagcggaggaacagccgctctgggctgcctggtcaaggattactttcccgagcctgtgaccgtgtcctggaatagcggagcactgacaagcggcgtgcacacctttccagccgtgctgcaaagcagcggcctgtactctctgagcagcgtggtcacagtgcctagctctagcctgggcacccagacctacatctgcaatgtgaaccacaagcctagcaacaccaaggtggacaagagagtggaacccaagagctgtgaagtgaaaaccgactccaccgaccacgtgaagcccaaagagacagagaacaccaagcagcccagcaagagctgccacaagcccaaggccatcgtgcacaccgagaaagtgaacatgatgagcctgaccgtgctgggcctgcggatgctgttcgccaaaaccgtggccgtgaacttcctgctgaccgccaagctgttcttcctc

SEQ ID NO: 3105 - DNA, 2751 bp, Artificial Sequence
  Synthetic Polynucloetide
atggccttaccagtgaccgccttgctcctgccgctggccttgctgctccacgccgccaggccggaagtgcagctggttgaatctggcggaggactggttcagcctggcggatctctgagactgtcttgtgccgccagcggcttcagcttcagcgacttttggatgagctgggtccgacaggcccctggcaaaggacttgaatgggtcgccacaatcagccaggccggcagcgagaaggactacgtggactctgtgaagggcagattcaccatcagccgggacaacgccaagaagtccctgtacctccagatgaacagcctgagagccgaggacaccgccgtgtactattgtgcctctggcgtgtacagcttcgactacagaggccagggcaccctggtcacagtctcttctggtaccggcggaggcggatctggcggcggaggtagcggtggcggaggatctgaattcgagctgacacaggaccctgctgtgtctgttgccctgggccagacagtgcggattacctgtcaaggcgacagcctgagaagcaactacgccaactggtatcagcagaagcccggacaggctcccgtgctggttatctacggccagaacaacagacccagcggcatccccgatagattcagcggctctagctctggcaataccgccagcctgacaatcactggcgctcaggctgccgatgaggccgactactactgcgatagcagagtgtccaccggcaatcacgtggtgtttggcggcggaacaaagctgacagtgctcggacaactcgagggacagcctaaggccaatcctaccgtgacactgttccctccaagcagcgaagaactccaggccaacaaggccacacttgtgtgcctgatctccgacttctaccctggggctgtgacagtggcttggaaggccgatggatctcctgtgaaagccggcgtggaaaccaccaagccatccaagcagagcaacaacaaatacgccgccagctcctacctgagcctgacacctgagcagtggaagtcccacagatcctacagctgccaagtgacccacgaaggcagcaccgtggaaaagacagtggcccctacagagtgcagccccatcaagaccgatgtgattacaatggaccccaaggacaactgctccaaggacgccaacgataccctgctgctccagctgaccaacaccagcgcctactacatgtacttgttgctgctgctgaagtccgtggtgtacttcgccatcatcacatgctgcctgctgcggagaaccgccttctgctgcaacggcgagaagtctagggccaagcgatctggatctggagcaacaaacttctcactactcaaacaagcaggtgacgtggaggagaatcccgggcctactagtatggactggatttggcgcatccttttccttgtcggcgctgctaccggcgcgcattccgggccccagctccagctgcaagagtctggacctggcctggtcaagcctagcgagacactgagcctgacctgtaccgtgtccggcgatagcatcagcagcggcgattactactggggctggatcagacagcctcctggcaaaggactggaatggatcggccacatctactacagcggcgtgacctactacaaccccagcctgaagtccagagtgaccatcagcgtggacaccagccggaaccagttctccctgaagctgtctagcgtgacagccgccgataccgccgtgtactactgcaccagagaggacagcagcaactggcggagtagaggccagggaacactggtcacagttagctctggatccggcggaggcggaagtggaggcggaggatctggcggcggaggctctttcgaagaagttcagctggtgcagagcggagccgaagtgaagaaacctggggcctctgtgaaggtgtcctgcaaggcttccggctacacctttaccagctacgccatgcactgggtccgacaggcacctggacaacggcttgaatggatgggctggatcaacgccggcaacggcaacaccaagtacagccagaaattccagggccgcgtgaccatcaccagagatacaagcgccagcaccgcctacatggaactgtctagcctgagatccgaggacaccgccgtgtactactgtgccagagacatcagctacggcagcttcgactattggggccagggcacactggtcaccgttagctctacgcgtgcctctacaaagggaccctccgtgtttcctctggctcccagcagcaagtctacaagcggaggaacagccgctctgggctgcctggtcaaggattactttcccgagcctgtgaccgtgtcctggaatagcggagcactgacaagcggcgtgcacacctttccagccgtgctgcaaagcagcggcctgtactctctgagcagcgtggtcacagtgcctagctctagcctgggcacccagacctacatctgcaatgtgaaccacaagcctagcaacaccaaggtggacaagagagtggaacccaagagctgtgaagtgaaaaccgactccaccgaccacgtgaagcccaaagagacagagaacaccaagcagcccagcaagagctgccacaagcccaaggccatcgtgcacaccgagaaagtgaacatgatgagcctgaccgtgctgggcctgcggatgctgttcgccaaaaccgtggccgtgaacttcctgctgaccgccaagctgttcttcctc

SEQ ID NO: 3106 - DNA, 2757 bp, Artificial Sequence
  Synthetic Polynucloetide
atggccttaccagtgaccgccttgctcctgccgctggccttgctgctccacgccgccaggccggaagtgcagctggttgaatctggcggaggactggttcagcctggcggatctctgagactgtcttgtgccgccagcggcttcagcttcagcgacttttggatgagctgggtccgacaggcccctggcaaaggacttgaatgggtcgccacaatcagccaggccggcagcgagaaggactacgtggactctgtgaagggcagattcaccatcagccgggacaacgccaagaagtccctgtacctccagatgaacagcctgagagccgaggacaccgccgtgtactattgtgcctctggcgtgtacagcttcgactacagaggccagggcaccctggtcacagtctcttctggtaccggcggaggcggatctggcggcggaggtagcggtggcggaggatctgaattcgacatcgtgctgacacagacaccagccacactgagcgtgacacctggcgattctgtgtccctgagctgtagagccagccagagcatcagcaacaacctgcactggtatcagcagaagtcccacgagagccccagactgctgattaagaacgccagccagtctatcagcggcatccccagcaagtttagcggctctggcagcggcaccgacttcaccctgagaatcaacagcgtggaaaccgaggacttcgggatgtacttctgccagcagagcaatagctggccctacacatttggctccggcaccaagctggaaatcaaactcgagggacagcctaaggccaatcctaccgtgacactgttccctccaagcagcgaagaactccaggccaacaaggccacacttgtgtgcctgatctccgacttctaccctggggctgtgacagtggcttggaaggccgatggatctcctgtgaaagccggcgtggaaaccaccaagccatccaagcagagcaacaacaaatacgccgccagctcctacctgagcctgacacctgagcagtggaagtcccacagatcctacagctgccaagtgacccacgaaggcagcaccgtggaaaagacagtggcccctacagagtgcagccccatcaagaccgatgtgattacaatggaccccaaggacaactgctccaaggacgccaacgataccctgctgctccagctgaccaacaccagcgcctactacatgtacttgttgctgctgctgaagtccgtggtgtacttcgccatcatcacatgctgcctgctgcggagaaccgccttctgctgcaacggcgagaagtctagggccaagcgatctggatctggagcaacaaacttctcactactcaaacaagcaggtgacgtggaggagaatcccgggcctactagtatggactggatttggcgcatccttttccttgtcggcgctgctaccggcgcgcattccgggccccagctccagctgcaagagtctggacctggcctggtcaagcctagcgagacactgagcctgacctgtaccgtgtccggcgatagcatcagcagcggcgattactactggggctggatcagacagcctcctggcaaaggactggaatggatcggccacatctactacagcggcgtgacctactacaaccccagcctgaagtccagagtgaccatcagcgtggacaccagccggaaccagttctccctgaagctgtctagcgtgacagccgccgataccgccgtgtactactgcaccagagaggacagcagcaactggcggagtagaggccagggaacactggtcacagttagctctggatccggcggaggcggaagtggaggcggaggatctggcggcggaggctctttcgaacaagtgaagctgcaacagagcggacccgagctggttaagccaggcgcttccgtgaagattagctgcaaggccagcggctacagcttcaccggctactacatgcactgggtcaagcagagccacggcaacatcctggactggatcggctacatctacccctacaacggcgtgtccagctacaaccagaagttcaagggcaaagccactctgaccgtggacaagagcagcagcaccgcctacatggaactgagaagcctgaccagcgaggacagcgccgtgtactattgtgccagagagcggggcctgtaccagctcagagcaatggattattggggccagggcaccagcgtgaccgtttcttctacgcgtgcctctacaaagggaccctccgtgtttcctctggctcccagcagcaagtctacaagcggaggaacagccgctctgggctgcctggtcaaggattactttcccgagcctgtgaccgtgtcctggaatagcggagcactgacaagcggcgtgcacacctttccagccgtgctgcaaagcagcggcctgtactctctgagcagcgtggtcacagtgcctagctctagcctgggcacccagacctacatctgcaatgtgaaccacaagcctagcaacaccaaggtggacaagagagtggaacccaagagctgtgaagtgaaaaccgactccaccgaccacgtgaagcccaaagagacagagaacaccaagcagcccagcaagagctgccacaagcccaaggccatcgtgcacaccgagaaagtgaacatgatgagcctgaccgtgctgggcctgcggatgctgttcgccaaaaccgtggccgtgaacttcctgctgaccgccaagctgttcttcctc

SEQ ID NO: 3107 - DNA, 2730 bp, Artificial Sequence
  Synthetic Polynucloetide
atggccttaccagtgaccgccttgctcctgccgctggccttgctgctccacgccgccaggccggaagtgcagctggttgaatctggcggaggactggttcagcctggcggatctctgagactgtcttgtgccgccagcggcttcagcttcagcgacttttggatgagctgggtccgacaggcccctggcaaaggacttgaatgggtcgccacaatcagccaggccggcagcgagaaggactacgtggactctgtgaagggcagattcaccatcagccgggacaacgccaagaagtccctgtacctccagatgaacagcctgagagccgaggacaccgccgtgtactattgtgcctctggcgtgtacagcttcgactacagaggccagggcaccctggtcacagtctcttctggtaccggcggaggcggatctggcggcggaggtagcggtggcggaggatctgaattcgacatcgtgatgacacagacccctgccatcatgagcgcctctccaggccagaaagtgaccatcacatgtagcgccagcagcagcgtgaactacatgcactggtatcagcagaagctgggcagcagccccaagctgtggatctacgataccagcaaactggcccctggcgtgccagccagattttctggttctggcagcggcaccagctacagcctgacaatcagcagcatggaagccgaggatgccgccagctacttctgccatcagtggtctagctacccctacacctttggctccggcaccaagctggaaatcaaactcgagggacagcctaaggccaatcctaccgtgacactgttccctccaagcagcgaagaactccaggccaacaaggccacacttgtgtgcctgatctccgacttctaccctggggctgtgacagtggcttggaaggccgatggatctcctgtgaaagccggcgtggaaaccaccaagccatccaagcagagcaacaacaaatacgccgccagctcctacctgagcctgacacctgagcagtggaagtcccacagatcctacagctgccaagtgacccacgaaggcagcaccgtggaaaagacagtggcccctacagagtgcagccccatcaagaccgatgtgattacaatggaccccaaggacaactgctccaaggacgccaacgataccctgctgctccagctgaccaacaccagcgcctactacatgtacttgttgctgctgctgaagtccgtggtgtacttcgccatcatcacatgctgcctgctgcggagaaccgccttctgctgcaacggcgagaagtctagggccaagcgatctggatctggagcaacaaacttctcactactcaaacaagcaggtgacgtggaggagaatcccgggcctactagtatggactggatttggcgcatccttttccttgtcggcgctgctaccggcgcgcattccgggccccagctccagctgcaagagtctggacctggcctggtcaagcctagcgagacactgagcctgacctgtaccgtgtccggcgatagcatcagcagcggcgattactactggggctggatcagacagcctcctggcaaaggactggaatggatcggccacatctactacagcggcgtgacctactacaaccccagcctgaagtccagagtgaccatcagcgtggacaccagccggaaccagttctccctgaagctgtctagcgtgacagccgccgataccgccgtgtactactgcaccagagaggacagcagcaactggcggagtagaggccagggaacactggtcacagttagctctggatccggcggaggcggaagtggaggcggaggatctggcggcggaggctctttcgaagaagttcagctccaagagtctggccccgacctggtcaagcctagccaaagcctgagcctgacctgtaccgtgaccggctacagcatcacaagcggctatggatggcactggatcagacagttccccggcaacaaactggaatggatgggctacatccactacagcggcagcaccacctacaatcccagcctgaagtcccggatcagcatcagcagagacaccagcaagaaccagttcttcctgcaactgaacagcgtgaccaccgaggacaccgccacctactattgtgctcggagcctgagatattggggccagggcacaaccctgaccgtgtcatctacgcgtgcctctacaaagggaccctccgtgtttcctctggctcccagcagcaagtctacaagcggaggaacagccgctctgggctgcctggtcaaggattactttcccgagcctgtgaccgtgtcctggaatagcggagcactgacaagcggcgtgcacacctttccagccgtgctgcaaagcagcggcctgtactctctgagcagcgtggtcacagtgcctagctctagcctgggcacccagacctacatctgcaatgtgaaccacaagcctagcaacaccaaggtggacaagagagtggaacccaagagctgtgaagtgaaaaccgactccaccgaccacgtgaagcccaaagagacagagaacaccaagcagcccagcaagagctgccacaagcccaaggccatcgtgcacaccgagaaagtgaacatgatgagcctgaccgtgctgggcctgcggatgctgttcgccaaaaccgtggccgtgaacttcctgctgaccgccaagctgttcttcctc

SEQ ID NO: 3108 - DNA, 2739 bp, Artificial Sequence
  Synthetic Polynucloetide
atggccttaccagtgaccgccttgctcctgccgctggccttgctgctccacgccgccaggccggaagtgcagctggttgaatctggcggaggactggttcagcctggcggatctctgagactgtcttgtgccgccagcggcttcagcttcagcgacttttggatgagctgggtccgacaggcccctggcaaaggacttgaatgggtcgccacaatcagccaggccggcagcgagaaggactacgtggactctgtgaagggcagattcaccatcagccgggacaacgccaagaagtccctgtacctccagatgaacagcctgagagccgaggacaccgccgtgtactattgtgcctctggcgtgtacagcttcgactacagaggccagggcaccctggtcacagtctcttctggtaccggcggaggcggatctggcggcggaggtagcggtggcggaggatctgaattcgacatccagatgacacagagccctagcagcctgtctgccagcgtgggagacagagtgaccatcacctgtagcgccaccagcagcatcagctacatgcactggtatcagcagaagcccggcaaggcccctaaaggctggatctacgataccagcaaactggcccacggcgtgcccagcagattttctggttctggcagcggcaccgacttcaccctgacaatatctagcctccagcctgaggacttcgccacctactactgccaccagagaagaagctaccccttcaccttcggccagggcaccaaggtggaaatcaaactcgagggacagcctaaggccaatcctaccgtgacactgttccctccaagcagcgaagaactccaggccaacaaggccacacttgtgtgcctgatctccgacttctaccctggggctgtgacagtggcttggaaggccgatggatctcctgtgaaagccggcgtggaaaccaccaagccatccaagcagagcaacaacaaatacgccgccagctcctacctgagcctgacacctgagcagtggaagtcccacagatcctacagctgccaagtgacccacgaaggcagcaccgtggaaaagacagtggcccctacagagtgcagccccatcaagaccgatgtgattacaatggaccccaaggacaactgctccaaggacgccaacgataccctgctgctccagctgaccaacaccagcgcctactacatgtacttgttgctgctgctgaagtccgtggtgtacttcgccatcatcacatgctgcctgctgcggagaaccgccttctgctgcaacggcgagaagtctagggccaagcgatctggatctggagcaacaaacttctcactactcaaacaagcaggtgacgtggaggagaatcccgggcctactagtatggactggatttggcgcatccttttccttgtcggcgctgctaccggcgcgcattccgggccccagctccagctgcaagagtctggacctggcctggtcaagcctagcgagacactgagcctgacctgtaccgtgtccggcgatagcatcagcagcggcgattactactggggctggatcagacagcctcctggcaaaggactggaatggatcggccacatctactacagcggcgtgacctactacaaccccagcctgaagtccagagtgaccatcagcgtggacaccagccggaaccagttctccctgaagctgtctagcgtgacagccgccgataccgccgtgtactactgcaccagagaggacagcagcaactggcggagtagaggccagggaacactggtcacagttagctctggatccggcggaggcggaagtggaggcggaggatctggcggcggaggctctttcgaagaagtgcaactggttcagagcggagccgaagtgaagaaacctggggcctctgtgaaggtgtcctgcaaggcttccggctacacctttaccaatttctggattcactgggtccgacaggctccaggccaaggactggaatggatcggagagatcgaccccagcgacagctacaccaactacaaccagaaattcaaaggccgggtcaccatcaccagagacaccagcacaagcaccgcctacctggaactgagcagcctgagaagcgaggacaccgccgtgtactactgcgccagggaaatcaccaccgtggattattggggccagggaaccctggtcaccgtgtcatctacgcgtgcctctacaaagggaccctccgtgtttcctctggctcccagcagcaagtctacaagcggaggaacagccgctctgggctgcctggtcaaggattactttcccgagcctgtgaccgtgtcctggaatagcggagcactgacaagcggcgtgcacacctttccagccgtgctgcaaagcagcggcctgtactctctgagcagcgtggtcacagtgcctagctctagcctgggcacccagacctacatctgcaatgtgaaccacaagcctagcaacaccaaggtggacaagagagtggaacccaagagctgtgaagtgaaaaccgactccaccgaccacgtgaagcccaaagagacagagaacaccaagcagcccagcaagagctgccacaagcccaaggccatcgtgcacaccgagaaagtgaacatgatgagcctgaccgtgctgggcctgcggatgctgttcgccaaaaccgtggccgtgaacttcctgctgaccgccaagctgttcttcctc

SEQ ID NO: 3109 - DNA, 2760 bp, Artificial Sequence
  Synthetic Polynucloetide
atggccttaccagtgaccgccttgctcctgccgctggccttgctgctccacgccgccaggccggaagtgcagctggttgaatctggcggaggactggttcagcctggcggatctctgagactgtcttgtgccgccagcggcttcagcttcagcgacttttggatgagctgggtccgacaggcccctggcaaaggacttgaatgggtcgccacaatcagccaggccggcagcgagaaggactacgtggactctgtgaagggcagattcaccatcagccgggacaacgccaagaagtccctgtacctccagatgaacagcctgagagccgaggacaccgccgtgtactattgtgcctctggcgtgtacagcttcgactacagaggccagggcaccctggtcacagtctcttctggtaccggcggaggcggatctggcggcggaggtagcggtggcggaggatctgaattcgacatccagatgacacagagccctagcagcctgtctgccagcgtgggagacagagtgaccatcacatgcaaggccagccagggcttcaacaaatacgtggcctggtatcagcagaagcccggcaaggctcctaagctgctgatctactacaccagcacactccagcctggcgtgcccagcagattttctggctctggcagcggcagagactacaccctgacaatatccagcctccagccagaggacttcgccacctactactgtctccagtacggcaacctgctgtacgcctttggacagggcaccaaggtggaaatcaagagactcgagggacagcctaaggccaatcctaccgtgacactgttccctccaagcagcgaagaactccaggccaacaaggccacacttgtgtgcctgatctccgacttctaccctggggctgtgacagtggcttggaaggccgatggatctcctgtgaaagccggcgtggaaaccaccaagccatccaagcagagcaacaacaaatacgccgccagctcctacctgagcctgacacctgagcagtggaagtcccacagatcctacagctgccaagtgacccacgaaggcagcaccgtggaaaagacagtggcccctacagagtgcagccccatcaagaccgatgtgattacaatggaccccaaggacaactgctccaaggacgccaacgataccctgctgctccagctgaccaacaccagcgcctactacatgtacttgttgctgctgctgaagtccgtggtgtacttcgccatcatcacatgctgcctgctgcggagaaccgccttctgctgcaacggcgagaagtctagggccaagcgatctggatctggagcaacaaacttctcactactcaaacaagcaggtgacgtggaggagaatcccgggcctactagtatggactggatttggcgcatccttttccttgtcggcgctgctaccggcgcgcattccgggccccagctccagctgcaagagtctggacctggcctggtcaagcctagcgagacactgagcctgacctgtaccgtgtccggcgatagcatcagcagcggcgattactactggggctggatcagacagcctcctggcaaaggactggaatggatcggccacatctactacagcggcgtgacctactacaaccccagcctgaagtccagagtgaccatcagcgtggacaccagccggaaccagttctccctgaagctgtctagcgtgacagccgccgataccgccgtgtactactgcaccagagaggacagcagcaactggcggagtagaggccagggaacactggtcacagttagctctggatccggcggaggcggaagtggaggcggaggatctggcggcggaggctctttcgaagaagttcagcttgtgcagagcggagccgaagtgaagaaacctggggcctctgtgaaggtgtcctgcaaagccagcggctacacctttaccagctactggatcggctgggtccgacaggctcctggacaaggactggaatggatcggcgacatctatcccggcggaggctacaccaactacaacgagaagttcaagggccgcgtgacaatcaccagagacacctctacaagcaccgcctacctggaactgagcagcctgagaagcgaggacaccgccgtgtactactgcgccagactggatggcagcagctacagaggcgctatggattcttggggccagggcacactggtcaccgtttcttctacgcgtgcctctacaaagggaccctccgtgtttcctctggctcccagcagcaagtctacaagcggaggaacagccgctctgggctgcctggtcaaggattactttcccgagcctgtgaccgtgtcctggaatagcggagcactgacaagcggcgtgcacacctttccagccgtgctgcaaagcagcggcctgtactctctgagcagcgtggtcacagtgcctagctctagcctgggcacccagacctacatctgcaatgtgaaccacaagcctagcaacaccaaggtggacaagagagtggaacccaagagctgtgaagtgaaaaccgactccaccgaccacgtgaagcccaaagagacagagaacaccaagcagcccagcaagagctgccacaagcccaaggccatcgtgcacaccgagaaagtgaacatgatgagcctgaccgtgctgggcctgcggatgctgttcgccaaaaccgtggccgtgaacttcctgctgaccgccaagctgttcttcctc

SEQ ID NO: 3110 - DNA, 2748 bp, Artificial Sequence
  Synthetic Polynucloetide
atggccttaccagtgaccgccttgctcctgccgctggccttgctgctccacgccgccaggccggaagtgcagctggttgaatctggcggaggactggttcagcctggcggatctctgagactgtcttgtgccgccagcggcttcagcttcagcgacttttggatgagctgggtccgacaggcccctggcaaaggacttgaatgggtcgccacaatcagccaggccggcagcgagaaggactacgtggactctgtgaagggcagattcaccatcagccgggacaacgccaagaagtccctgtacctccagatgaacagcctgagagccgaggacaccgccgtgtactattgtgcctctggcgtgtacagcttcgactacagaggccagggcaccctggtcacagtctcttctggtaccggcggaggcggatctggcggcggaggtagcggtggcggaggatctgaattcgacatccagatgacacagagccctagcagcctgtctgccagcgtgggagacagagtgaccatcacctgtagagccagccaggacatccggtactacctgaactggtatcagcagaagcccggcaaggcccctaagctgctgatctatgtggcctccagcctccagagcggagtgccttctagattttctggcagcggctccggcaccgagtttaccctgacagtgtctagcttgcagcccgaggacttcgccacctactactgcctgcaagtgtacagcacccctcggacctttggacagggcaccaaggtggaaatcaaactcgagggacagcctaaggccaatcctaccgtgacactgttccctccaagcagcgaagaactccaggccaacaaggccacacttgtgtgcctgatctccgacttctaccctggggctgtgacagtggcttggaaggccgatggatctcctgtgaaagccggcgtggaaaccaccaagccatccaagcagagcaacaacaaatacgccgccagctcctacctgagcctgacacctgagcagtggaagtcccacagatcctacagctgccaagtgacccacgaaggcagcaccgtggaaaagacagtggcccctacagagtgcagccccatcaagaccgatgtgattacaatggaccccaaggacaactgctccaaggacgccaacgataccctgctgctccagctgaccaacaccagcgcctactacatgtacttgttgctgctgctgaagtccgtggtgtacttcgccatcatcacatgctgcctgctgcggagaaccgccttctgctgcaacggcgagaagtctagggccaagcgatctggatctggagcaacaaacttctcactactcaaacaagcaggtgacgtggaggagaatcccgggcctactagtatggactggatttggcgcatccttttccttgtcggcgctgctaccggcgcgcattccgggccccagctccagctgcaagagtctggacctggcctggtcaagcctagcgagacactgagcctgacctgtaccgtgtccggcgatagcatcagcagcggcgattactactggggctggatcagacagcctcctggcaaaggactggaatggatcggccacatctactacagcggcgtgacctactacaaccccagcctgaagtccagagtgaccatcagcgtggacaccagccggaaccagttctccctgaagctgtctagcgtgacagccgccgataccgccgtgtactactgcaccagagaggacagcagcaactggcggagtagaggccagggaacactggtcacagttagctctggatccggcggaggcggaagtggaggcggaggatctggcggcggaggctctttcgaagaagtgcagcttgttgaatctggcggcggactggctaagcctggcggatctctgagactgtcttgtgccgccagcggcttccggttcaccttcaacaactactacatggactgggtccgacaggcccctggacaaggacttgaatgggtgtccagaatcagcagcagcggcgaccctacttggtacgccgattctgtgaagggcagattcaccatcagcagagagaacgccaagaacaccctgttcctccagatgaactccctgagagccgaggacaccgccgtgtactattgtgcctctctgaccaccggcagcgattcttggggacagggcgtgctggttaccgtgtcatctacgcgtgcctctacaaagggaccctccgtgtttcctctggctcccagcagcaagtctacaagcggaggaacagccgctctgggctgcctggtcaaggattactttcccgagcctgtgaccgtgtcctggaatagcggagcactgacaagcggcgtgcacacctttccagccgtgctgcaaagcagcggcctgtactctctgagcagcgtggtcacagtgcctagctctagcctgggcacccagacctacatctgcaatgtgaaccacaagcctagcaacaccaaggtggacaagagagtggaacccaagagctgtgaagtgaaaaccgactccaccgaccacgtgaagcccaaagagacagagaacaccaagcagcccagcaagagctgccacaagcccaaggccatcgtgcacaccgagaaagtgaacatgatgagcctgaccgtgctgggcctgcggatgctgttcgccaaaaccgtggccgtgaacttcctgctgaccgccaagctgttcttcctc

SEQ ID NO: 3111 - DNA, 2751 bp, Artificial Sequence
  Synthetic Polynucloetide
atggccttaccagtgaccgccttgctcctgccgctggccttgctgctccacgccgccaggccggaagtgcagctggttgaatctggcggaggactggttcagcctggcggatctctgagactgtcttgtgccgccagcggcttcagcttcagcgacttttggatgagctgggtccgacaggcccctggcaaaggacttgaatgggtcgccacaatcagccaggccggcagcgagaaggactacgtggactctgtgaagggcagattcaccatcagccgggacaacgccaagaagtccctgtacctccagatgaacagcctgagagccgaggacaccgccgtgtactattgtgcctctggcgtgtacagcttcgactacagaggccagggcaccctggtcacagtctcttctggtaccggcggaggcggatctggcggcggaggtagcggtggcggaggatctgaattcgagatcgtgatgacacagagccccgccacactgagtgtgtctccaggcgaaagagccacactgtcctgtagagccagccagagcgtgtccagaaacctggcctggtatcagcagaagcctggacaggctccccggctgttgatctacggcgcttctacaagagccaccggcattcccgccagattttctggctctggcagcggcaccgagttcaccctgacaatcggaagcctccagagcgaggacttcgccgtgtactactgccagcagtacaagacctggcctcggacctttggacagggcaccaacgtggaaatcaaactcgagggacagcctaaggccaatcctaccgtgacactgttccctccaagcagcgaagaactccaggccaacaaggccacacttgtgtgcctgatctccgacttctaccctggggctgtgacagtggcttggaaggccgatggatctcctgtgaaagccggcgtggaaaccaccaagccatccaagcagagcaacaacaaatacgccgccagctcctacctgagcctgacacctgagcagtggaagtcccacagatcctacagctgccaagtgacccacgaaggcagcaccgtggaaaagacagtggcccctacagagtgcagccccatcaagaccgatgtgattacaatggaccccaaggacaactgctccaaggacgccaacgataccctgctgctccagctgaccaacaccagcgcctactacatgtacttgttgctgctgctgaagtccgtggtgtacttcgccatcatcacatgctgcctgctgcggagaaccgccttctgctgcaacggcgagaagtctagggccaagcgatctggatctggagcaacaaacttctcactactcaaacaagcaggtgacgtggaggagaatcccgggcctactagtatggactggatttggcgcatccttttccttgtcggcgctgctaccggcgcgcattccgggccccagctccagctgcaagagtctggacctggcctggtcaagcctagcgagacactgagcctgacctgtaccgtgtccggcgatagcatcagcagcggcgattactactggggctggatcagacagcctcctggcaaaggactggaatggatcggccacatctactacagcggcgtgacctactacaaccccagcctgaagtccagagtgaccatcagcgtggacaccagccggaaccagttctccctgaagctgtctagcgtgacagccgccgataccgccgtgtactactgcaccagagaggacagcagcaactggcggagtagaggccagggaacactggtcacagttagctctggatccggcggaggcggaagtggaggcggaggatctggcggcggaggctctttcgaacaagttcagctgcaacaatggggagccggcctgctgaagcctagcgaaacactgtctctgacctgcgccgtgttcggcggctctttcagcggctactactggtcctggatcagacagcctcctggcaaaggactggaatggatcggcgagatcaaccaccggggcaacaccaacgacaaccccagcctgaaaagcagagtgaccatcagcgtggacaccagcaagaaccagttcgccctgaagctgagcagcgtgacagccgctgataccgccgtgtattattgcgccagagagcggggctacacctacggcaatttcgatcactggggccagggcaccctggtcacagtttcttctacgcgtgcctctacaaagggaccctccgtgtttcctctggctcccagcagcaagtctacaagcggaggaacagccgctctgggctgcctggtcaaggattactttcccgagcctgtgaccgtgtcctggaatagcggagcactgacaagcggcgtgcacacctttccagccgtgctgcaaagcagcggcctgtactctctgagcagcgtggtcacagtgcctagctctagcctgggcacccagacctacatctgcaatgtgaaccacaagcctagcaacaccaaggtggacaagagagtggaacccaagagctgtgaagtgaaaaccgactccaccgaccacgtgaagcccaaagagacagagaacaccaagcagcccagcaagagctgccacaagcccaaggccatcgtgcacaccgagaaagtgaacatgatgagcctgaccgtgctgggcctgcggatgctgttcgccaaaaccgtggccgtgaacttcctgctgaccgccaagctgttcttcctc

SEQ ID NO: 3112 - DNA, 2754 bp, Artificial Sequence
  Synthetic Polynucloetide
atggccttaccagtgaccgccttgctcctgccgctggccttgctgctccacgccgccaggccggaagtgcagctggttgaatctggcggaggactggttcagcctggcggatctctgagactgtcttgtgccgccagcggcttcagcttcagcgacttttggatgagctgggtccgacaggcccctggcaaaggacttgaatgggtcgccacaatcagccaggccggcagcgagaaggactacgtggactctgtgaagggcagattcaccatcagccgggacaacgccaagaagtccctgtacctccagatgaacagcctgagagccgaggacaccgccgtgtactattgtgcctctggcgtgtacagcttcgactacagaggccagggcaccctggtcacagtctcttctggtaccggcggaggcggatctggcggcggaggtagcggtggcggaggatctgaattcgagatcgtgatgacccctagcagcgccacactgagtgtgtctccaggcgaaagagccacactgtcctgtagagccagccagagcgtgtccagaaacctggcctggtatcagcagaagcctggacaggctccccggctgttgatctacggcgcttctacaagagccaccggcattcccgccagattttctggctctggcagcggcaccgagttcaccctgacaatctctagcctccagagcgaggacttcgccgtgtactactgccaccagtacagcaactggatgtgcagcttcggccagggcaccaagctggaaatcaaactcgagggacagcctaaggccaatcctaccgtgacactgttccctccaagcagcgaagaactccaggccaacaaggccacacttgtgtgcctgatctccgacttctaccctggggctgtgacagtggcttggaaggccgatggatctcctgtgaaagccggcgtggaaaccaccaagccatccaagcagagcaacaacaaatacgccgccagctcctacctgagcctgacacctgagcagtggaagtcccacagatcctacagctgccaagtgacccacgaaggcagcaccgtggaaaagacagtggcccctacagagtgcagccccatcaagaccgatgtgattacaatggaccccaaggacaactgctccaaggacgccaacgataccctgctgctccagctgaccaacaccagcgcctactacatgtacttgttgctgctgctgaagtccgtggtgtacttcgccatcatcacatgctgcctgctgcggagaaccgccttctgctgcaacggcgagaagtctagggccaagcgatctggatctggagcaacaaacttctcactactcaaacaagcaggtgacgtggaggagaatcccgggcctactagtatggactggatttggcgcatccttttccttgtcggcgctgctaccggcgcgcattccgggccccagctccagctgcaagagtctggacctggcctggtcaagcctagcgagacactgagcctgacctgtaccgtgtccggcgatagcatcagcagcggcgattactactggggctggatcagacagcctcctggcaaaggactggaatggatcggccacatctactacagcggcgtgacctactacaaccccagcctgaagtccagagtgaccatcagcgtggacaccagccggaaccagttctccctgaagctgtctagcgtgacagccgccgataccgccgtgtactactgcaccagagaggacagcagcaactggcggagtagaggccagggaacactggtcacagttagctctggatccggcggaggcggaagtggaggcggaggatctggcggcggaggctctttcgaagaagttcagctccttgagtcaggtggcggcctggttcaacctggcggatctctgagactgagctgtgccgccagcggcttcacctttagcagatacgccatgaactgggtccgacaggcccctggcaaaggactggaatgggtgtccggcatctctggaagcggcggcagaacctactacgccgattctgtgaagggcagattcaccatcagccgggacaacagcaagaacaccctgtacctccagatgaacagcctgagagccgaggacacagccgtgtattattgcgccaaggaccgggacttttggagcggcccttttgactattggggccagggaaccctggtcaccgttagctctacgcgtgcctctacaaagggaccctccgtgtttcctctggctcccagcagcaagtctacaagcggaggaacagccgctctgggctgcctggtcaaggattactttcccgagcctgtgaccgtgtcctggaatagcggagcactgacaagcggcgtgcacacctttccagccgtgctgcaaagcagcggcctgtactctctgagcagcgtggtcacagtgcctagctctagcctgggcacccagacctacatctgcaatgtgaaccacaagcctagcaacaccaaggtggacaagagagtggaacccaagagctgtgaagtgaaaaccgactccaccgaccacgtgaagcccaaagagacagagaacaccaagcagcccagcaagagctgccacaagcccaaggccatcgtgcacaccgagaaagtgaacatgatgagcctgaccgtgctgggcctgcggatgctgttcgccaaaaccgtggccgtgaacttcctgctgaccgccaagctgttcttcctc

SEQ ID NO: 3113 - DNA, 2769 bp, Artificial Sequence
  Synthetic Polynucloetide
atggccttaccagtgaccgccttgctcctgccgctggccttgctgctccacgccgccaggccggaagtgcagctggttgaatctggcggaggactggttcagcctggcggatctctgagactgtcttgtgccgccagcggcttcagcttcagcgacttttggatgagctgggtccgacaggcccctggcaaaggacttgaatgggtcgccacaatcagccaggccggcagcgagaaggactacgtggactctgtgaagggcagattcaccatcagccgggacaacgccaagaagtccctgtacctccagatgaacagcctgagagccgaggacaccgccgtgtactattgtgcctctggcgtgtacagcttcgactacagaggccagggcaccctggtcacagtctcttctggtaccggcggaggcggatctggcggcggaggtagcggtggcggaggatctgaattcgacatccagatgacccagagccccagcagcctgtctgccagcgtgggcgacagagtgaccatcacatgcaaggccagcaagaacatcagaagctacctggcctggtatcagcagaagcccggcaaggcccccaagctgctgatctacagcggcagcacactgcacagcggcgtgcccagcagattttccggctctggcagcggcaccgacttcaccctgaccatctctagcctccagcccgaggacttcgccacctactactgccagcagcaccacgagtaccccctgacattcggccagggcaccaaggtggaaatcaagagactcgagggacagcctaaggccaatcctaccgtgacactgttccctccaagcagcgaagaactccaggccaacaaggccacacttgtgtgcctgatctccgacttctaccctggggctgtgacagtggcttggaaggccgatggatctcctgtgaaagccggcgtggaaaccaccaagccatccaagcagagcaacaacaaatacgccgccagctcctacctgagcctgacacctgagcagtggaagtcccacagatcctacagctgccaagtgacccacgaaggcagcaccgtggaaaagacagtggcccctacagagtgcagccccatcaagaccgatgtgattacaatggaccccaaggacaactgctccaaggacgccaacgataccctgctgctccagctgaccaacaccagcgcctactacatgtacttgttgctgctgctgaagtccgtggtgtacttcgccatcatcacatgctgcctgctgcggagaaccgccttctgctgcaacggcgagaagtctagggccaagcgatctggatctggagcaacaaacttctcactactcaaacaagcaggtgacgtggaggagaatcccgggcctactagtatggactggatttggcgcatccttttccttgtcggcgctgctaccggcgcgcattccgggccccagctccagctgcaagagtctggacctggcctggtcaagcctagcgagacactgagcctgacctgtaccgtgtccggcgatagcatcagcagcggcgattactactggggctggatcagacagcctcctggcaaaggactggaatggatcggccacatctactacagcggcgtgacctactacaaccccagcctgaagtccagagtgaccatcagcgtggacaccagccggaaccagttctccctgaagctgtctagcgtgacagccgccgataccgccgtgtactactgcaccagagaggacagcagcaactggcggagtagaggccagggaacactggtcacagttagctctggatccggcggaggcggaagtggaggcggaggatctggcggcggaggctctttcgaacaggtgcaactccaggaatctggccccggactcgtgaagcccagcgagacactgagcctgacctgtaccgtgtccggctacaccatcaccagcggctacgactggtcctggatcagacagcctcctggcaagggcctggaatggatcggctacatcaactacggcggctccaccaactacaagcccagcctgggaagccgcgtgacaatcagcgtggacacctccaagaaccagttcagcctgaagctgagcagcgtgacagccgccgataccgccgtgtactactgcgcccggtacaacgagtacaagagctacatctacgattggtacttcgacttctggggccagggaaccctcgtgaccgtgtctagtacgcgtgcctctacaaagggaccctccgtgtttcctctggctcccagcagcaagtctacaagcggaggaacagccgctctgggctgcctggtcaaggattactttcccgagcctgtgaccgtgtcctggaatagcggagcactgacaagcggcgtgcacacctttccagccgtgctgcaaagcagcggcctgtactctctgagcagcgtggtcacagtgcctagctctagcctgggcacccagacctacatctgcaatgtgaaccacaagcctagcaacaccaaggtggacaagagagtggaacccaagagctgtgaagtgaaaaccgactccaccgaccacgtgaagcccaaagagacagagaacaccaagcagcccagcaagagctgccacaagcccaaggccatcgtgcacaccgagaaagtgaacatgatgagcctgaccgtgctgggcctgcggatgctgttcgccaaaaccgtggccgtgaacttcctgctgaccgccaagctgttcttcctc

SEQ ID NO: 3114 - DNA, 2775 bp, Artificial Sequence
  Synthetic Polynucloetide
atggccttaccagtgaccgccttgctcctgccgctggccttgctgctccacgccgccaggccggaagtgcagctggttgaatctggcggaggactggttcagcctggcggatctctgagactgtcttgtgccgccagcggcttcagcttcagcgacttttggatgagctgggtccgacaggcccctggcaaaggacttgaatgggtcgccacaatcagccaggccggcagcgagaaggactacgtggactctgtgaagggcagattcaccatcagccgggacaacgccaagaagtccctgtacctccagatgaacagcctgagagccgaggacaccgccgtgtactattgtgcctctggcgtgtacagcttcgactacagaggccagggcaccctggtcacagtctcttctggtaccggcggaggcggatctggcggcggaggtagcggtggcggaggatctgaattccagtctgtggtcacacagcctccatccgtgtctgctgcccctggacagaaagtgaccatctcctgtagcggcagcagcagcaacatcggcaacaactacgtgtcctggtatcagcagctccccggcacagctcccaaactgctgatctacgacaacaacaagcggcccagcggcatccccgatagattttctggcagcaagagcggcaccagcgccacactgggaattaccggacttcagacaggcgacgaggccgactactactgtggcacatgggatggcagcctgtacaccatgcttttcggcggaggcaccaagctgacagtgcttctcgagggacagcctaaggccaatcctaccgtgacactgttccctccaagcagcgaagaactccaggccaacaaggccacacttgtgtgcctgatctccgacttctaccctggggctgtgacagtggcttggaaggccgatggatctcctgtgaaagccggcgtggaaaccaccaagccatccaagcagagcaacaacaaatacgccgccagctcctacctgagcctgacacctgagcagtggaagtcccacagatcctacagctgccaagtgacccacgaaggcagcaccgtggaaaagacagtggcccctacagagtgcagccccatcaagaccgatgtgattacaatggaccccaaggacaactgctccaaggacgccaacgataccctgctgctccagctgaccaacaccagcgcctactacatgtacttgttgctgctgctgaagtccgtggtgtacttcgccatcatcacatgctgcctgctgcggagaaccgccttctgctgcaacggcgagaagtctagggccaagcgatctggatctggagcaacaaacttctcactactcaaacaagcaggtgacgtggaggagaatcccgggcctactagtatggactggatttggcgcatccttttccttgtcggcgctgctaccggcgcgcattccgggccccagctccagctgcaagagtctggacctggcctggtcaagcctagcgagacactgagcctgacctgtaccgtgtccggcgatagcatcagcagcggcgattactactggggctggatcagacagcctcctggcaaaggactggaatggatcggccacatctactacagcggcgtgacctactacaaccccagcctgaagtccagagtgaccatcagcgtggacaccagccggaaccagttctccctgaagctgtctagcgtgacagccgccgataccgccgtgtactactgcaccagagaggacagcagcaactggcggagtagaggccagggaacactggtcacagttagctctggatccggcggaggcggaagtggaggcggaggatctggcggcggaggctctttcgaagaagtgcaactggtggaatctggcggcggactggttaagcctggcggatctctgagactgtcttgtgccgccagcggcttcaccttcagcaatgcctggatgagctgggttcgacaggcccctggaaaaggactggaatgggtcggattcatccggtccaaagcctacggcggcaccacagaatatgccgcctctgtgaagggcagattcaccatcagccgggacgacagcaagtctatcgcctacctccagatgaacaacctgaaaaccgaggacaccgccgtgtactactgcgccagagatggcctgtacagcagctcttggtacgacagcgattactggggccagggcacactggtcacagtgtcatctacgcgtgcctctacaaagggaccctccgtgtttcctctggctcccagcagcaagtctacaagcggaggaacagccgctctgggctgcctggtcaaggattactttcccgagcctgtgaccgtgtcctggaatagcggagcactgacaagcggcgtgcacacctttccagccgtgctgcaaagcagcggcctgtactctctgagcagcgtggtcacagtgcctagctctagcctgggcacccagacctacatctgcaatgtgaaccacaagcctagcaacaccaaggtggacaagagagtggaacccaagagctgtgaagtgaaaaccgactccaccgaccacgtgaagcccaaagagacagagaacaccaagcagcccagcaagagctgccacaagcccaaggccatcgtgcacaccgagaaagtgaacatgatgagcctgaccgtgctgggcctgcggatgctgttcgccaaaaccgtggccgtgaacttcctgctgaccgccaagctgttcttcctc

SEQ ID NO: 3115 - DNA, 2790 bp, Artificial Sequence
  Synthetic Polynucloetide
atggccttaccagtgaccgccttgctcctgccgctggccttgctgctccacgccgccaggccggaagtgcagctggttgaatctggcggaggactggttcagcctggcggatctctgagactgtcttgtgccgccagcggcttcagcttcagcgacttttggatgagctgggtccgacaggcccctggcaaaggacttgaatgggtcgccacaatcagccaggccggcagcgagaaggactacgtggactctgtgaagggcagattcaccatcagccgggacaacgccaagaagtccctgtacctccagatgaacagcctgagagccgaggacaccgccgtgtactattgtgcctctggcgtgtacagcttcgactacagaggccagggcaccctggtcacagtctcttctggtaccggcggaggcggatctggcggcggaggtagcggtggcggaggatctgaattccagtctgtgctgacacagcctcctagtgtgtctggcgctcctggacagagagtgaccatctcttgtaccggcagcagcagcaatatcggagccggctatgacgtgcactggtatcagcagctccctggcacagcccctaaactgctgatcttcggcaacagcaacagacccagcggcgtgcccgatagattcagcggctttaagagcggcacaagcgccagcctggctatcactggactgcaagccgaggacgaggccgactacttctgccagagctacgatagcagcctgagcggcagcggagtgtttggcacaggcaccaaagtgacagtgcttggcctcgagggacagcctaaggccaatcctaccgtgacactgttccctccaagcagcgaagaactccaggccaacaaggccacacttgtgtgcctgatctccgacttctaccctggggctgtgacagtggcttggaaggccgatggatctcctgtgaaagccggcgtggaaaccaccaagccatccaagcagagcaacaacaaatacgccgccagctcctacctgagcctgacacctgagcagtggaagtcccacagatcctacagctgccaagtgacccacgaaggcagcaccgtggaaaagacagtggcccctacagagtgcagccccatcaagaccgatgtgattacaatggaccccaaggacaactgctccaaggacgccaacgataccctgctgctccagctgaccaacaccagcgcctactacatgtacttgttgctgctgctgaagtccgtggtgtacttcgccatcatcacatgctgcctgctgcggagaaccgccttctgctgcaacggcgagaagtctagggccaagcgatctggatctggagcaacaaacttctcactactcaaacaagcaggtgacgtggaggagaatcccgggcctactagtatggactggatttggcgcatccttttccttgtcggcgctgctaccggcgcgcattccgggccccagctccagctgcaagagtctggacctggcctggtcaagcctagcgagacactgagcctgacctgtaccgtgtccggcgatagcatcagcagcggcgattactactggggctggatcagacagcctcctggcaaaggactggaatggatcggccacatctactacagcggcgtgacctactacaaccccagcctgaagtccagagtgaccatcagcgtggacaccagccggaaccagttctccctgaagctgtctagcgtgacagccgccgataccgccgtgtactactgcaccagagaggacagcagcaactggcggagtagaggccagggaacactggtcacagttagctctggatccggcggaggcggaagtggaggcggaggatctggcggcggaggctctttcgaacaaatgcaactggttcaaagcggcggtggcctggtgcaacctggaagaagtctgagactgagctgtgccgccagcggcttcaccttcgatgattacgccatgcactgggtccgacaggcccctggaaaaggactggaatgggtgtccggcatctcctggaatagcggctctatcggctacgccgacagcgtgaagggcagattcaccatcagccgggacaacgccaagaacagcctgtacctccagatgaactccctgagagccgaggatacagccctgtactactgcgccaaggacatccacagcggcagctactacggcctgctgtactacgctatggacgtgtggggccagggcacaaccgtgacagtttcttctacgcgtgcctctacaaagggaccctccgtgtttcctctggctcccagcagcaagtctacaagcggaggaacagccgctctgggctgcctggtcaaggattactttcccgagcctgtgaccgtgtcctggaatagcggagcactgacaagcggcgtgcacacctttccagccgtgctgcaaagcagcggcctgtactctctgagcagcgtggtcacagtgcctagctctagcctgggcacccagacctacatctgcaatgtgaaccacaagcctagcaacaccaaggtggacaagagagtggaacccaagagctgtgaagtgaaaaccgactccaccgaccacgtgaagcccaaagagacagagaacaccaagcagcccagcaagagctgccacaagcccaaggccatcgtgcacaccgagaaagtgaacatgatgagcctgaccgtgctgggcctgcggatgctgttcgccaaaaccgtggccgtgaacttcctgctgaccgccaagctgttcttcctc

SEQ ID NO: 3116 - DNA, 2790 bp, Artificial Sequence
  Synthetic Polynucloetide
atggccttaccagtgaccgccttgctcctgccgctggccttgctgctccacgccgccaggccggaagtgcagctggttgaatctggcggaggactggttcagcctggcggatctctgagactgtcttgtgccgccagcggcttcagcttcagcgacttttggatgagctgggtccgacaggcccctggcaaaggacttgaatgggtcgccacaatcagccaggccggcagcgagaaggactacgtggactctgtgaagggcagattcaccatcagccgggacaacgccaagaagtccctgtacctccagatgaacagcctgagagccgaggacaccgccgtgtactattgtgcctctggcgtgtacagcttcgactacagaggccagggcaccctggtcacagtctcttctggtaccggcggaggcggatctggcggcggaggtagcggtggcggaggatctgaattcctgcctgttctgacacagcctccatctgcctctggcacacctggacagagagtgaccatcagctgtagcggcagaagcagcaacatcggcagcaacagcgtgaactggtacagacagcttcctggcgctgcccctaagctgctgatctacagcaacaaccagcggcctcctggcgtgccagtcagattttctggcagcaagagcggcacaagcgccagcctggctatttctggactccagtctgaggacgaggccacctactactgtgccacctgggacgacaacctgaacgtgcactacgtgttcggcaccggcaccaaagtgacagtgcttggaagtagactcgagggacagcctaaggccaatcctaccgtgacactgttccctccaagcagcgaagaactccaggccaacaaggccacacttgtgtgcctgatctccgacttctaccctggggctgtgacagtggcttggaaggccgatggatctcctgtgaaagccggcgtggaaaccaccaagccatccaagcagagcaacaacaaatacgccgccagctcctacctgagcctgacacctgagcagtggaagtcccacagatcctacagctgccaagtgacccacgaaggcagcaccgtggaaaagacagtggcccctacagagtgcagccccatcaagaccgatgtgattacaatggaccccaaggacaactgctccaaggacgccaacgataccctgctgctccagctgaccaacaccagcgcctactacatgtacttgttgctgctgctgaagtccgtggtgtacttcgccatcatcacatgctgcctgctgcggagaaccgccttctgctgcaacggcgagaagtctagggccaagcgatctggatctggagcaacaaacttctcactactcaaacaagcaggtgacgtggaggagaatcccgggcctactagtatggactggatttggcgcatccttttccttgtcggcgctgctaccggcgcgcattccgggccccagctccagctgcaagagtctggacctggcctggtcaagcctagcgagacactgagcctgacctgtaccgtgtccggcgatagcatcagcagcggcgattactactggggctggatcagacagcctcctggcaaaggactggaatggatcggccacatctactacagcggcgtgacctactacaaccccagcctgaagtccagagtgaccatcagcgtggacaccagccggaaccagttctccctgaagctgtctagcgtgacagccgccgataccgccgtgtactactgcaccagagaggacagcagcaactggcggagtagaggccagggaacactggtcacagttagctctggatccggcggaggcggaagtggaggcggaggatctggcggcggaggctctttcgaacttgaaatggctcaggtgcagctggtgcagagcggagccgaagtgaagaaacctggcagcagcgtgaaggtgtcctgcaaagcttctggcggcaccttcagcagctacgccatctcttgggttcgacaggcccctggacaaggactggaatggatgggcagaatcatccccatcctgggaatcgccaactacgcccagaaattccagggcagagtgacaatcaccgccgacaagagcaccagcaccgcctacatggaactgagcagcctgagaagcgaggacaccgccgtgtactattgtgcaagaggcggctactacagccacgacatgtggagcgaagattggggccagggcacactggtcacagtgtcatctacgcgtgcctctacaaagggaccctccgtgtttcctctggctcccagcagcaagtctacaagcggaggaacagccgctctgggctgcctggtcaaggattactttcccgagcctgtgaccgtgtcctggaatagcggagcactgacaagcggcgtgcacacctttccagccgtgctgcaaagcagcggcctgtactctctgagcagcgtggtcacagtgcctagctctagcctgggcacccagacctacatctgcaatgtgaaccacaagcctagcaacaccaaggtggacaagagagtggaacccaagagctgtgaagtgaaaaccgactccaccgaccacgtgaagcccaaagagacagagaacaccaagcagcccagcaagagctgccacaagcccaaggccatcgtgcacaccgagaaagtgaacatgatgagcctgaccgtgctgggcctgcggatgctgttcgccaaaaccgtggccgtgaacttcctgctgaccgccaagctgttcttcctc

SEQ ID NO: 3117 - DNA, 2772 bp, Artificial Sequence
  Synthetic Polynucloetide
atggccttaccagtgaccgccttgctcctgccgctggccttgctgctccacgccgccaggccggaagtgcagctggttgaatctggcggaggactggttcagcctggcggatctctgagactgtcttgtgccgccagcggcttcagcttcagcgacttttggatgagctgggtccgacaggcccctggcaaaggacttgaatgggtcgccacaatcagccaggccggcagcgagaaggactacgtggactctgtgaagggcagattcaccatcagccgggacaacgccaagaagtccctgtacctccagatgaacagcctgagagccgaggacaccgccgtgtactattgtgcctctggcgtgtacagcttcgactacagaggccagggcaccctggtcacagtctcttctggtaccggcggaggcggatctggcggcggaggtagcggtggcggaggatctgaattcgacttcgtgatgacacagagccctgatagcctggccgtgtctctcggcgagcgagtgaccatgagctgcaagtctagccagagcctgctgaacagcggcaaccagaagaactacctgacctggtatcagcagaagcccggccagcctcctaagctgctgatctactgggccagcaccagagaaagcggcgtgcccgatagattttctggctctggcagcggcaccgacttcaccctgacaatttctagcctgcaagccgaggacgtggccgtgtactactgccagaacgactacagctacccctacaccttcggccagggcaccaagctggaaatcaaactcgagggacagcctaaggccaatcctaccgtgacactgttccctccaagcagcgaagaactccaggccaacaaggccacacttgtgtgcctgatctccgacttctaccctggggctgtgacagtggcttggaaggccgatggatctcctgtgaaagccggcgtggaaaccaccaagccatccaagcagagcaacaacaaatacgccgccagctcctacctgagcctgacacctgagcagtggaagtcccacagatcctacagctgccaagtgacccacgaaggcagcaccgtggaaaagacagtggcccctacagagtgcagccccatcaagaccgatgtgattacaatggaccccaaggacaactgctccaaggacgccaacgataccctgctgctccagctgaccaacaccagcgcctactacatgtacttgttgctgctgctgaagtccgtggtgtacttcgccatcatcacatgctgcctgctgcggagaaccgccttctgctgcaacggcgagaagtctagggccaagcgatctggatctggagcaacaaacttctcactactcaaacaagcaggtgacgtggaggagaatcccgggcctactagtatggactggatttggcgcatccttttccttgtcggcgctgctaccggcgcgcattccgggccccagctccagctgcaagagtctggacctggcctggtcaagcctagcgagacactgagcctgacctgtaccgtgtccggcgatagcatcagcagcggcgattactactggggctggatcagacagcctcctggcaaaggactggaatggatcggccacatctactacagcggcgtgacctactacaaccccagcctgaagtccagagtgaccatcagcgtggacaccagccggaaccagttctccctgaagctgtctagcgtgacagccgccgataccgccgtgtactactgcaccagagaggacagcagcaactggcggagtagaggccagggaacactggtcacagttagctctggatccggcggaggcggaagtggaggcggaggatctggcggcggaggctctttcgaagaagtgcaactggttcagagcggagccgagctgaagaaacctggggccagcgtgaaggtgtcctgtaaagccagcggctacacctttaccgactactacatgaaatgggtccgacaggccccaggccagggactcgaatggatcggcgatattatccccagcaacggggccaccttctacaaccagaaattcaagggccgcgtgaccatcaccgtggacaagagcacaagcaccgcctacatggaactgagcagcctgagaagcgaggacaccgccgtgtattattgcgccagaagccatctgctgcgggccagttggttcgcctattggggacagggaaccctggtcaccgttagctctacgcgtgcctctacaaagggaccctccgtgtttcctctggctcccagcagcaagtctacaagcggaggaacagccgctctgggctgcctggtcaaggattactttcccgagcctgtgaccgtgtcctggaatagcggagcactgacaagcggcgtgcacacctttccagccgtgctgcaaagcagcggcctgtactctctgagcagcgtggtcacagtgcctagctctagcctgggcacccagacctacatctgcaatgtgaaccacaagcctagcaacaccaaggtggacaagagagtggaacccaagagctgtgaagtgaaaaccgactccaccgaccacgtgaagcccaaagagacagagaacaccaagcagcccagcaagagctgccacaagcccaaggccatcgtgcacaccgagaaagtgaacatgatgagcctgaccgtgctgggcctgcggatgctgttcgccaaaaccgtggccgtgaacttcctgctgaccgccaagctgttcttcctc

SEQ ID NO: 3118 - DNA, 2772 bp, Artificial Sequence
  Synthetic Polynucloetide
atggccttaccagtgaccgccttgctcctgccgctggccttgctgctccacgccgccaggccggaagtgcagctggttgaatctggcggaggactggttcagcctggcggatctctgagactgtcttgtgccgccagcggcttcagcttcagcgacttttggatgagctgggtccgacaggcccctggcaaaggacttgaatgggtcgccacaatcagccaggccggcagcgagaaggactacgtggactctgtgaagggcagattcaccatcagccgggacaacgccaagaagtccctgtacctccagatgaacagcctgagagccgaggacaccgccgtgtactattgtgcctctggcgtgtacagcttcgactacagaggccagggcaccctggtcacagtctcttctggtaccggcggaggcggatctggcggcggaggtagcggtggcggaggatctgaattcgacttcgtgatgacacagagccctgatagcctggccgtgtctctcggcgagcgagtgaccatgagctgcaagtctagccagagcctgctgaacagcggcaaccagaagaactacctgacctggtatcagcagaagcccggccagcctcctaagctgctgatctactgggccagcaccagagaaagcggcgtgcccgatagattttctggctctggcagcggcaccgacttcaccctgacaatttctagcctgcaagccgaggacgtggccgtgtactactgccagaacgactacagctacccctacaccttcggccagggcaccaagctggaaatcaaactcgagggacagcctaaggccaatcctaccgtgacactgttccctccaagcagcgaagaactccaggccaacaaggccacacttgtgtgcctgatctccgacttctaccctggggctgtgacagtggcttggaaggccgatggatctcctgtgaaagccggcgtggaaaccaccaagccatccaagcagagcaacaacaaatacgccgccagctcctacctgagcctgacacctgagcagtggaagtcccacagatcctacagctgccaagtgacccacgaaggcagcaccgtggaaaagacagtggcccctacagagtgcagccccatcaagaccgatgtgattacaatggaccccaaggacaactgctccaaggacgccaacgataccctgctgctccagctgaccaacaccagcgcctactacatgtacttgttgctgctgctgaagtccgtggtgtacttcgccatcatcacatgctgcctgctgcggagaaccgccttctgctgcaacggcgagaagtctagggccaagcgatctggatctggagcaacaaacttctcactactcaaacaagcaggtgacgtggaggagaatcccgggcctactagtatggactggatttggcgcatccttttccttgtcggcgctgctaccggcgcgcattccgggccccagctccagctgcaagagtctggacctggcctggtcaagcctagcgagacactgagcctgacctgtaccgtgtccggcgatagcatcagcagcggcgattactactggggctggatcagacagcctcctggcaaaggactggaatggatcggccacatctactacagcggcgtgacctactacaaccccagcctgaagtccagagtgaccatcagcgtggacaccagccggaaccagttctccctgaagctgtctagcgtgacagccgccgataccgccgtgtactactgcaccagagaggacagcagcaactggcggagtagaggccagggaacactggtcacagttagctctggatccggcggaggcggaagtggaggcggaggatctggcggcggaggctctttcgaacaagtgcaactggttcagagcggagccgagctgaagaaacctggggccagcgtgaaggtgtcctgtaaagccagcggctacacctttaccgactactacatgaaatgggtccgacaggccccaggccagggactcgaatggatcggcgatattatccccagcaacggggccaccttctacaaccagaaattcaagggccgcgtgaccatcaccgtggacaagagcacaagcaccgcctacatggaactgagcagcctgagaagcgaggacaccgccgtgtattattgcgccagaagccatctgctgcgggccagttggttcgcctattggggacagggaaccctggtcaccgttagctctacgcgtgcctctacaaagggaccctccgtgtttcctctggctcccagcagcaagtctacaagcggaggaacagccgctctgggctgcctggtcaaggattactttcccgagcctgtgaccgtgtcctggaatagcggagcactgacaagcggcgtgcacacctttccagccgtgctgcaaagcagcggcctgtactctctgagcagcgtggtcacagtgcctagctctagcctgggcacccagacctacatctgcaatgtgaaccacaagcctagcaacaccaaggtggacaagagagtggaacccaagagctgtgaagtgaaaaccgactccaccgaccacgtgaagcccaaagagacagagaacaccaagcagcccagcaagagctgccacaagcccaaggccatcgtgcacaccgagaaagtgaacatgatgagcctgaccgtgctgggcctgcggatgctgttcgccaaaaccgtggccgtgaacttcctgctgaccgccaagctgttcttcctc

SEQ ID NO: 3119 - DNA, 2742 bp, Artificial Sequence
  Synthetic Polynucloetide
atggccttaccagtgaccgccttgctcctgccgctggccttgctgctccacgccgccaggccggaagtgcagctggttgaatctggcggaggactggttcagcctggcggatctctgagactgtcttgtgccgccagcggcttcagcttcagcgacttttggatgagctgggtccgacaggcccctggcaaaggacttgaatgggtcgccacaatcagccaggccggcagcgagaaggactacgtggactctgtgaagggcagattcaccatcagccgggacaacgccaagaagtccctgtacctccagatgaacagcctgagagccgaggacaccgccgtgtactattgtgcctctggcgtgtacagcttcgactacagaggccagggcaccctggtcacagtctcttctggtaccggcggaggcggatctggcggcggaggtagcggtggcggaggatctgaattcgacgtgcagatcacacagagccctagctacctggctgcctctcctggcgagacaatcaccatcaactgtcgggccagcaagagcatcagcaaggacctggcctggtatcaagagaagcccggcaagaccaacaagctgctgatctacagcggcagcacactccagtctggcatccccagcagattttccggctctggcagcggcaccgatttcaccctgaccataagcagcctggaacctgaggacttcgccatgtactactgccagcagcacaacaagtacccctacacctttggcggaggcaccaagctggaaatcaagagactcgagggacagcctaaggccaatcctaccgtgacactgttccctccaagcagcgaagaactccaggccaacaaggccacacttgtgtgcctgatctccgacttctaccctggggctgtgacagtggcttggaaggccgatggatctcctgtgaaagccggcgtggaaaccaccaagccatccaagcagagcaacaacaaatacgccgccagctcctacctgagcctgacacctgagcagtggaagtcccacagatcctacagctgccaagtgacccacgaaggcagcaccgtggaaaagacagtggcccctacagagtgcagccccatcaagaccgatgtgattacaatggaccccaaggacaactgctccaaggacgccaacgataccctgctgctccagctgaccaacaccagcgcctactacatgtacttgttgctgctgctgaagtccgtggtgtacttcgccatcatcacatgctgcctgctgcggagaaccgccttctgctgcaacggcgagaagtctagggccaagcgatctggatctggagcaacaaacttctcactactcaaacaagcaggtgacgtggaggagaatcccgggcctactagtatggactggatttggcgcatccttttccttgtcggcgctgctaccggcgcgcattccgggccccagctccagctgcaagagtctggacctggcctggtcaagcctagcgagacactgagcctgacctgtaccgtgtccggcgatagcatcagcagcggcgattactactggggctggatcagacagcctcctggcaaaggactggaatggatcggccacatctactacagcggcgtgacctactacaaccccagcctgaagtccagagtgaccatcagcgtggacaccagccggaaccagttctccctgaagctgtctagcgtgacagccgccgataccgccgtgtactactgcaccagagaggacagcagcaactggcggagtagaggccagggaacactggtcacagttagctctggatccggcggaggcggaagtggaggcggaggatctggcggcggaggctctttcgaacaagttcaactgcaacagcctggggccgagcttgttagacctggcgcttctgtgaagctgagctgcaaggccagcggctacaccttcaccagctactggatgaactgggtcaagcagcggcctgaccagggcctcgaatggatcggcagaatcgacccctacgacagcgagacacactacaaccagaagttcaaggacaaggccatcctgaccgtggacaagagcagctccaccgcctacatgcaactgagcagcctgacctctgaggatagcgccgtgtactattgcgccagaggcaactgggacgactattggggccagggcacaaccctgacagtgtctagtacgcgtgcctctacaaagggaccctccgtgtttcctctggctcccagcagcaagtctacaagcggaggaacagccgctctgggctgcctggtcaaggattactttcccgagcctgtgaccgtgtcctggaatagcggagcactgacaagcggcgtgcacacctttccagccgtgctgcaaagcagcggcctgtactctctgagcagcgtggtcacagtgcctagctctagcctgggcacccagacctacatctgcaatgtgaaccacaagcctagcaacaccaaggtggacaagagagtggaacccaagagctgtgaagtgaaaaccgactccaccgaccacgtgaagcccaaagagacagagaacaccaagcagcccagcaagagctgccacaagcccaaggccatcgtgcacaccgagaaagtgaacatgatgagcctgaccgtgctgggcctgcggatgctgttcgccaaaaccgtggccgtgaacttcctgctgaccgccaagctgttcttcctc

SEQ ID NO: 3120 - DNA, 2748 bp, Artificial Sequence
  Synthetic Polynucloetide
atggccttaccagtgaccgccttgctcctgccgctggccttgctgctccacgccgccaggccggaagtgcagctggttgaatctggcggaggactggttcagcctggcggatctctgagactgtcttgtgccgccagcggcttcagcttcagcgacttttggatgagctgggtccgacaggcccctggcaaaggacttgaatgggtcgccacaatcagccaggccggcagcgagaaggactacgtggactctgtgaagggcagattcaccatcagccgggacaacgccaagaagtccctgtacctccagatgaacagcctgagagccgaggacaccgccgtgtactattgtgcctctggcgtgtacagcttcgactacagaggccagggcaccctggtcacagtctcttctggtaccggcggaggcggatctggcggcggaggtagcggtggcggaggatctgaattcgagatcgtgctgacacagagccctaccagcatgacagcctctccaggcgagcaagtgaccatcacctgtagagccagcagcagcatcaactacatgcactggtatcagcagaagcctggcgcaagccccagaccttggatctacgagacaagcaagctggcctccggcgtgcccgatagattttctggatctgccagcggcaccagctacagcctgaccatcaacaacatggaagccgaggacgccgccacctactactgccagcagtggaattacccctcctggacctttggcggaggcaccaagctggaacttaaactcgagggacagcctaaggccaatcctaccgtgacactgttccctccaagcagcgaagaactccaggccaacaaggccacacttgtgtgcctgatctccgacttctaccctggggctgtgacagtggcttggaaggccgatggatctcctgtgaaagccggcgtggaaaccaccaagccatccaagcagagcaacaacaaatacgccgccagctcctacctgagcctgacacctgagcagtggaagtcccacagatcctacagctgccaagtgacccacgaaggcagcaccgtggaaaagacagtggcccctacagagtgcagccccatcaagaccgatgtgattacaatggaccccaaggacaactgctccaaggacgccaacgataccctgctgctccagctgaccaacaccagcgcctactacatgtacttgttgctgctgctgaagtccgtggtgtacttcgccatcatcacatgctgcctgctgcggagaaccgccttctgctgcaacggcgagaagtctagggccaagcgatctggatctggagcaacaaacttctcactactcaaacaagcaggtgacgtggaggagaatcccgggcctactagtatggactggatttggcgcatccttttccttgtcggcgctgctaccggcgcgcattccgggccccagctccagctgcaagagtctggacctggcctggtcaagcctagcgagacactgagcctgacctgtaccgtgtccggcgatagcatcagcagcggcgattactactggggctggatcagacagcctcctggcaaaggactggaatggatcggccacatctactacagcggcgtgacctactacaaccccagcctgaagtccagagtgaccatcagcgtggacaccagccggaaccagttctccctgaagctgtctagcgtgacagccgccgataccgccgtgtactactgcaccagagaggacagcagcaactggcggagtagaggccagggaacactggtcacagttagctctggatccggcggaggcggaagtggaggcggaggatctggcggcggaggctctttcgaagaagtgcagctcgttgagtctggtggcggactggttcagcctggaagaagcctgaagctgagctgtgccgccagcggcttcaccttcagcgactacaatatggcctgggtccgacaggcccctaagaaaggactggaatgggtcgccaccatcctgtacgatggcggcagaacctactaccggggcagcgtgaagggcagattcaccatcagcagagacaacgccaagagcaccctgtacctgcggatggactctctgagaagcgaggataccgccacatattactgtgccacacacagccggggcaccgactactttgattattggggccagggcgtgatggttaccgtgtctagtacgcgtgcctctacaaagggaccctccgtgtttcctctggctcccagcagcaagtctacaagcggaggaacagccgctctgggctgcctggtcaaggattactttcccgagcctgtgaccgtgtcctggaatagcggagcactgacaagcggcgtgcacacctttccagccgtgctgcaaagcagcggcctgtactctctgagcagcgtggtcacagtgcctagctctagcctgggcacccagacctacatctgcaatgtgaaccacaagcctagcaacaccaaggtggacaagagagtggaacccaagagctgtgaagtgaaaaccgactccaccgaccacgtgaagcccaaagagacagagaacaccaagcagcccagcaagagctgccacaagcccaaggccatcgtgcacaccgagaaagtgaacatgatgagcctgaccgtgctgggcctgcggatgctgttcgccaaaaccgtggccgtgaacttcctgctgaccgccaagctgttcttcctc

SEQ ID NO: 3121 - DNA, 2775 bp, Artificial Sequence
  Synthetic Polynucloetide
atggccttaccagtgaccgccttgctcctgccgctggccttgctgctccacgccgccaggccggaagtgcagctggttgaatctggcggaggactggttcagcctggcggatctctgagactgtcttgtgccgccagcggcttcagcttcagcgacttttggatgagctgggtccgacaggcccctggcaaaggacttgaatgggtcgccacaatcagccaggccggcagcgagaaggactacgtggactctgtgaagggcagattcaccatcagccgggacaacgccaagaagtccctgtacctccagatgaacagcctgagagccgaggacaccgccgtgtactattgtgcctctggcgtgtacagcttcgactacagaggccagggcaccctggtcacagtctcttctggtaccggcggaggcggatctggcggcggaggtagcggtggcggaggatctgaattcgacatcgtgatgacacagagcccttctagcctggccgtgtctgagggcgagacagtgaccatcaactgcaagagcagccagagcttcctgtctagcggcgacggcaagaattacgtggcctggtatcagtacaagcccggacagagccccaagctgctgatctactgggccagcacaagacagagcggcgtgcccgatagattcatcggctctggcagcggcaccgacttcaccctgacaatctctacagtgcaggccgaggacctggctatctactactgccagcagtattacgacacccctctgacctttggctccggcaccaagctggaaatcaaactcgagggacagcctaaggccaatcctaccgtgacactgttccctccaagcagcgaagaactccaggccaacaaggccacacttgtgtgcctgatctccgacttctaccctggggctgtgacagtggcttggaaggccgatggatctcctgtgaaagccggcgtggaaaccaccaagccatccaagcagagcaacaacaaatacgccgccagctcctacctgagcctgacacctgagcagtggaagtcccacagatcctacagctgccaagtgacccacgaaggcagcaccgtggaaaagacagtggcccctacagagtgcagccccatcaagaccgatgtgattacaatggaccccaaggacaactgctccaaggacgccaacgataccctgctgctccagctgaccaacaccagcgcctactacatgtacttgttgctgctgctgaagtccgtggtgtacttcgccatcatcacatgctgcctgctgcggagaaccgccttctgctgcaacggcgagaagtctagggccaagcgatctggatctggagcaacaaacttctcactactcaaacaagcaggtgacgtggaggagaatcccgggcctactagtatggactggatttggcgcatccttttccttgtcggcgctgctaccggcgcgcattccgggccccagctccagctgcaagagtctggacctggcctggtcaagcctagcgagacactgagcctgacctgtaccgtgtccggcgatagcatcagcagcggcgattactactggggctggatcagacagcctcctggcaaaggactggaatggatcggccacatctactacagcggcgtgacctactacaaccccagcctgaagtccagagtgaccatcagcgtggacaccagccggaaccagttctccctgaagctgtctagcgtgacagccgccgataccgccgtgtactactgcaccagagaggacagcagcaactggcggagtagaggccagggaacactggtcacagttagctctggatccggcggaggcggaagtggaggcggaggatctggcggcggaggctctttcgaagaagtgaagctgcaagagtctggccccagcctggtgcagagtagccaaacactgagcctgacctgtaccgtgtccggctttagcctgaccagctaccacatccactgggtccgacagacccctggcaaaggactggaatggatgggcgtgatgtggagcgacggcgacaccagctataacagcgccctgaagtcccggctgagcatcagcagagatacaagccagagccaggtgttcctgaagatgaacagcctccagaccgaggacaccgccacctactattgtgccagaggctactacagcagctacctgtacctttggttcgcctattggggccagggcaccctggttacagtcagctctacgcgtgcctctacaaagggaccctccgtgtttcctctggctcccagcagcaagtctacaagcggaggaacagccgctctgggctgcctggtcaaggattactttcccgagcctgtgaccgtgtcctggaatagcggagcactgacaagcggcgtgcacacctttccagccgtgctgcaaagcagcggcctgtactctctgagcagcgtggtcacagtgcctagctctagcctgggcacccagacctacatctgcaatgtgaaccacaagcctagcaacaccaaggtggacaagagagtggaacccaagagctgtgaagtgaaaaccgactccaccgaccacgtgaagcccaaagagacagagaacaccaagcagcccagcaagagctgccacaagcccaaggccatcgtgcacaccgagaaagtgaacatgatgagcctgaccgtgctgggcctgcggatgctgttcgccaaaaccgtggccgtgaacttcctgctgaccgccaagctgttcttcctc

SEQ ID NO: 3122 - DNA, 2787 bp, Artificial Sequence
  Synthetic Polynucloetide
atggccttaccagtgaccgccttgctcctgccgctggccttgctgctccacgccgccaggccggaagtgcagctggttgaatctggcggaggactggttcagcctggcggatctctgagactgtcttgtgccgccagcggcttcagcttcagcgacttttggatgagctgggtccgacaggcccctggcaaaggacttgaatgggtcgccacaatcagccaggccggcagcgagaaggactacgtggactctgtgaagggcagattcaccatcagccgggacaacgccaagaagtccctgtacctccagatgaacagcctgagagccgaggacaccgccgtgtactattgtgcctctggcgtgtacagcttcgactacagaggccagggcaccctggtcacagtctcttctggtaccggcggaggcggatctggcggcggaggtagcggtggcggaggatctgaattcgacgtgctgatgacccagacacctgtgtctctgccagtgtctctcggaggccaggtgtccatctcctgtagaagcagccagagcctggtgcactccgacggcgatacctacctgcactggtatctccagaagcctggacagagccctcagctcctgatctaccgggtgtccaacagattcagcggcgtgcccgatagattttccggcagcggctctggcaccgacttcaccctgaagatcagcagagtggaacccgaggacctgggcctgtactactgtctccagaccacacacttcccaccttggacctttggcggaggcaccaagctggaaatgaaactcgagggacagcctaaggccaatcctaccgtgacactgttccctccaagcagcgaagaactccaggccaacaaggccacacttgtgtgcctgatctccgacttctaccctggggctgtgacagtggcttggaaggccgatggatctcctgtgaaagccggcgtggaaaccaccaagccatccaagcagagcaacaacaaatacgccgccagctcctacctgagcctgacacctgagcagtggaagtcccacagatcctacagctgccaagtgacccacgaaggcagcaccgtggaaaagacagtggcccctacagagtgcagccccatcaagaccgatgtgattacaatggaccccaaggacaactgctccaaggacgccaacgataccctgctgctccagctgaccaacaccagcgcctactacatgtacttgttgctgctgctgaagtccgtggtgtacttcgccatcatcacatgctgcctgctgcggagaaccgccttctgctgcaacggcgagaagtctagggccaagcgatctggatctggagcaacaaacttctcactactcaaacaagcaggtgacgtggaggagaatcccgggcctactagtatggactggatttggcgcatccttttccttgtcggcgctgctaccggcgcgcattccgggccccagctccagctgcaagagtctggacctggcctggtcaagcctagcgagacactgagcctgacctgtaccgtgtccggcgatagcatcagcagcggcgattactactggggctggatcagacagcctcctggcaaaggactggaatggatcggccacatctactacagcggcgtgacctactacaaccccagcctgaagtccagagtgaccatcagcgtggacaccagccggaaccagttctccctgaagctgtctagcgtgacagccgccgataccgccgtgtactactgcaccagagaggacagcagcaactggcggagtagaggccagggaacactggtcacagttagctctggatccggcggaggcggaagtggaggcggaggatctggcggcggaggctctttcgaacaggttcagctccagcagtctggacccgagcttagaaggccaggatctagcgtcagactgagctgcaaggccagcggctaccggatcaaggacttcctgatccactggattaagaacagacccgagcacggcctggaatggatcggatggattgaccctgaggacggcgagactaagtacgcccagaagttccagaccaaggccacactgaccgccgacacctctagcaacaccgcctacatgcaactgagcagcctgaccagcgaggacaccgccacctacttttgtgctagatggggcgacgtgtactacggcctgatgagaggccatgtgatggatgcctggggccagggaacaagcgtgacagtctcttctacgcgtgcctctacaaagggaccctccgtgtttcctctggctcccagcagcaagtctacaagcggaggaacagccgctctgggctgcctggtcaaggattactttcccgagcctgtgaccgtgtcctggaatagcggagcactgacaagcggcgtgcacacctttccagccgtgctgcaaagcagcggcctgtactctctgagcagcgtggtcacagtgcctagctctagcctgggcacccagacctacatctgcaatgtgaaccacaagcctagcaacaccaaggtggacaagagagtggaacccaagagctgtgaagtgaaaaccgactccaccgaccacgtgaagcccaaagagacagagaacaccaagcagcccagcaagagctgccacaagcccaaggccatcgtgcacaccgagaaagtgaacatgatgagcctgaccgtgctgggcctgcggatgctgttcgccaaaaccgtggccgtgaacttcctgctgaccgccaagctgttcttcctc

SEQ ID NO: 3123 - DNA, 2772 bp, Artificial Sequence
  Synthetic Polynucloetide
atggccttaccagtgaccgccttgctcctgccgctggccttgctgctccacgccgccaggccggaagtgcagctggttgaatctggcggaggactggttcagcctggcggatctctgagactgtcttgtgccgccagcggcttcagcttcagcgacttttggatgagctgggtccgacaggcccctggcaaaggacttgaatgggtcgccacaatcagccaggccggcagcgagaaggactacgtggactctgtgaagggcagattcaccatcagccgggacaacgccaagaagtccctgtacctccagatgaacagcctgagagccgaggacaccgccgtgtactattgtgcctctggcgtgtacagcttcgactacagaggccagggcaccctggtcacagtctcttctggtaccggcggaggcggatctggcggcggaggtagcggtggcggaggatctgaattcgacatcgtgatgacacagagccccgccacactgtcactgtctccaggcgaaagagccacactgagctgtcggagcagcaagagcctccagaacgtgaacggcaacacctacctgtactggttccagcagaagcccggccagtctcctcagctcctgatctacagaatgagcaacctgaacagcggcgtgcccgacagattttctggcagcggaagcggcaccgagttcaccctgaccataagcagcctggaacctgaggacttcgccgtgtactactgtatgcagcacctggaataccccatcaccttcggagccggcaccaagctggaaatcaaactcgagggacagcctaaggccaatcctaccgtgacactgttccctccaagcagcgaagaactccaggccaacaaggccacacttgtgtgcctgatctccgacttctaccctggggctgtgacagtggcttggaaggccgatggatctcctgtgaaagccggcgtggaaaccaccaagccatccaagcagagcaacaacaaatacgccgccagctcctacctgagcctgacacctgagcagtggaagtcccacagatcctacagctgccaagtgacccacgaaggcagcaccgtggaaaagacagtggcccctacagagtgcagccccatcaagaccgatgtgattacaatggaccccaaggacaactgctccaaggacgccaacgataccctgctgctccagctgaccaacaccagcgcctactacatgtacttgttgctgctgctgaagtccgtggtgtacttcgccatcatcacatgctgcctgctgcggagaaccgccttctgctgcaacggcgagaagtctagggccaagcgatctggatctggagcaacaaacttctcactactcaaacaagcaggtgacgtggaggagaatcccgggcctactagtatggactggatttggcgcatccttttccttgtcggcgctgctaccggcgcgcattccgggccccagctccagctgcaagagtctggacctggcctggtcaagcctagcgagacactgagcctgacctgtaccgtgtccggcgatagcatcagcagcggcgattactactggggctggatcagacagcctcctggcaaaggactggaatggatcggccacatctactacagcggcgtgacctactacaaccccagcctgaagtccagagtgaccatcagcgtggacaccagccggaaccagttctccctgaagctgtctagcgtgacagccgccgataccgccgtgtactactgcaccagagaggacagcagcaactggcggagtagaggccagggaacactggtcacagttagctctggatccggcggaggcggaagtggaggcggaggatctggcggcggaggctctttcgaagaagtgcaactggttgaatctggcggcggactggttaagcctggcggatctctgaagctgagctgtgccgccagcggctacacctttaccagctacgtgatgcactgggtccgacaggcccctggcaaaggacttgagtggatcggctacatcaacccctacaacgatggcaccaagtacaacgagaagttccagggcagagtgaccatcagctccgacaagagcatcagcaccgcctacatggaactgagcagcctgagaagcgaggataccgccatgtactattgcgccagaggcacctactactacggcaccagagtgttcgactactggggccagggaaccctggtcacagtctcttctacgcgtgcctctacaaagggaccctccgtgtttcctctggctcccagcagcaagtctacaagcggaggaacagccgctctgggctgcctggtcaaggattactttcccgagcctgtgaccgtgtcctggaatagcggagcactgacaagcggcgtgcacacctttccagccgtgctgcaaagcagcggcctgtactctctgagcagcgtggtcacagtgcctagctctagcctgggcacccagacctacatctgcaatgtgaaccacaagcctagcaacaccaaggtggacaagagagtggaacccaagagctgtgaagtgaaaaccgactccaccgaccacgtgaagcccaaagagacagagaacaccaagcagcccagcaagagctgccacaagcccaaggccatcgtgcacaccgagaaagtgaacatgatgagcctgaccgtgctgggcctgcggatgctgttcgccaaaaccgtggccgtgaacttcctgctgaccgccaagctgttcttcctc

SEQ ID NO: 3124 - DNA, 2760 bp, Artificial Sequence
  Synthetic Polynucloetide
atggccttaccagtgaccgccttgctcctgccgctggccttgctgctccacgccgccaggccggaagtgcagctggttgaatctggcggaggactggttcagcctggcggatctctgagactgtcttgtgccgccagcggcttcagcttcagcgacttttggatgagctgggtccgacaggcccctggcaaaggacttgaatgggtcgccacaatcagccaggccggcagcgagaaggactacgtggactctgtgaagggcagattcaccatcagccgggacaacgccaagaagtccctgtacctccagatgaacagcctgagagccgaggacaccgccgtgtactattgtgcctctggcgtgtacagcttcgactacagaggccagggcaccctggtcacagtctcttctggtaccggcggaggcggatctggcggcggaggtagcggtggcggaggatctgaattcgacatccagatgacacagagccctagcagcctgtctgccagcgtgggagacagagtgaccatcacatgcaaggccagcgaccacatcaacaactggctggcctggtatcagcagaagcctggacaggcccctaagctgctgatctacggcgctaccacactggaaacaggcgtgcccagcagattttctggcagcggctctggcaccgactacaccctgacaatatccagcctccagcctgaggacttcgccacctactactgtcagcagagctggaacaccccttggacattcggccagggcaccaagctggaaatcaagagactcgagggacagcctaaggccaatcctaccgtgacactgttccctccaagcagcgaagaactccaggccaacaaggccacacttgtgtgcctgatctccgacttctaccctggggctgtgacagtggcttggaaggccgatggatctcctgtgaaagccggcgtggaaaccaccaagccatccaagcagagcaacaacaaatacgccgccagctcctacctgagcctgacacctgagcagtggaagtcccacagatcctacagctgccaagtgacccacgaaggcagcaccgtggaaaagacagtggcccctacagagtgcagccccatcaagaccgatgtgattacaatggaccccaaggacaactgctccaaggacgccaacgataccctgctgctccagctgaccaacaccagcgcctactacatgtacttgttgctgctgctgaagtccgtggtgtacttcgccatcatcacatgctgcctgctgcggagaaccgccttctgctgcaacggcgagaagtctagggccaagcgatctggatctggagcaacaaacttctcactactcaaacaagcaggtgacgtggaggagaatcccgggcctactagtatggactggatttggcgcatccttttccttgtcggcgctgctaccggcgcgcattccgggccccagctccagctgcaagagtctggacctggcctggtcaagcctagcgagacactgagcctgacctgtaccgtgtccggcgatagcatcagcagcggcgattactactggggctggatcagacagcctcctggcaaaggactggaatggatcggccacatctactacagcggcgtgacctactacaaccccagcctgaagtccagagtgaccatcagcgtggacaccagccggaaccagttctccctgaagctgtctagcgtgacagccgccgataccgccgtgtactactgcaccagagaggacagcagcaactggcggagtagaggccagggaacactggtcacagttagctctggatccggcggaggcggaagtggaggcggaggatctggcggcggaggctctttcgaacaagttcagcttcaacagcctggcgctgagctggtcaaacctggcgcttctgtgaagatgagctgcaaagccagcggctacgccttcagcagctactggatcaactggatgaagcagaaacccggccagggactcgaatggatcggccaaatctatcccggcgacggcgacaccaactacaacggcaagttcaagggcagagccacactgaccgccgatacctctagcagcacagcctacatgcagctgagcagcctgaccagcgaagatagcgccgtgtacttctgtgcccggtccatcacaacagtcgtgggctgcgctatggactattggggccagggaacaagcgtgaccgtgtctagtacgcgtgcctctacaaagggaccctccgtgtttcctctggctcccagcagcaagtctacaagcggaggaacagccgctctgggctgcctggtcaaggattactttcccgagcctgtgaccgtgtcctggaatagcggagcactgacaagcggcgtgcacacctttccagccgtgctgcaaagcagcggcctgtactctctgagcagcgtggtcacagtgcctagctctagcctgggcacccagacctacatctgcaatgtgaaccacaagcctagcaacaccaaggtggacaagagagtggaacccaagagctgtgaagtgaaaaccgactccaccgaccacgtgaagcccaaagagacagagaacaccaagcagcccagcaagagctgccacaagcccaaggccatcgtgcacaccgagaaagtgaacatgatgagcctgaccgtgctgggcctgcggatgctgttcgccaaaaccgtggccgtgaacttcctgctgaccgccaagctgttcttcctc

SEQ ID NO: 3125 - DNA, 2766 bp, Artificial Sequence
  Synthetic Polynucloetide
atggccttaccagtgaccgccttgctcctgccgctggccttgctgctccacgccgccaggccggaagtgcagctggttgaatctggcggaggactggttcagcctggcggatctctgagactgtcttgtgccgccagcggcttcagcttcagcgacttttggatgagctgggtccgacaggcccctggcaaaggacttgaatgggtcgccacaatcagccaggccggcagcgagaaggactacgtggactctgtgaagggcagattcaccatcagccgggacaacgccaagaagtccctgtacctccagatgaacagcctgagagccgaggacaccgccgtgtactattgtgcctctggcgtgtacagcttcgactacagaggccagggcaccctggtcacagtctcttctggtaccggcggaggcggatctggcggcggaggtagcggtggcggaggatctgaattccagatcgtgctgtctcagtctcctgccatcctgagcgcttccccaggcgagaaagtgaccatgacctgtagagccagcagcagcgtgtcctacatgcactggtatcagcagaagcccggcagcagccctaagccttggatctacgccaccagcaatctggcctctggcgtgccagccagattttctggctctggcagcggcaccagctacagcttcacaatcagcagagtggaagccgaggacgccgccacctactattgtcagcagtggaccttcaatcctcctaccttcggcggaggcacccggctggaaatcaaaagaacagtggctgctctcgagggacagcctaaggccaatcctaccgtgacactgttccctccaagcagcgaagaactccaggccaacaaggccacacttgtgtgcctgatctccgacttctaccctggggctgtgacagtggcttggaaggccgatggatctcctgtgaaagccggcgtggaaaccaccaagccatccaagcagagcaacaacaaatacgccgccagctcctacctgagcctgacacctgagcagtggaagtcccacagatcctacagctgccaagtgacccacgaaggcagcaccgtggaaaagacagtggcccctacagagtgcagccccatcaagaccgatgtgattacaatggaccccaaggacaactgctccaaggacgccaacgataccctgctgctccagctgaccaacaccagcgcctactacatgtacttgttgctgctgctgaagtccgtggtgtacttcgccatcatcacatgctgcctgctgcggagaaccgccttctgctgcaacggcgagaagtctagggccaagcgatctggatctggagcaacaaacttctcactactcaaacaagcaggtgacgtggaggagaatcccgggcctactagtatggactggatttggcgcatccttttccttgtcggcgctgctaccggcgcgcattccgggccccagctccagctgcaagagtctggacctggcctggtcaagcctagcgagacactgagcctgacctgtaccgtgtccggcgatagcatcagcagcggcgattactactggggctggatcagacagcctcctggcaaaggactggaatggatcggccacatctactacagcggcgtgacctactacaaccccagcctgaagtccagagtgaccatcagcgtggacaccagccggaaccagttctccctgaagctgtctagcgtgacagccgccgataccgccgtgtactactgcaccagagaggacagcagcaactggcggagtagaggccagggaacactggtcacagttagctctggatccggcggaggcggaagtggaggcggaggatctggcggcggaggctctttcgaacaggcttatctgcaacagagcggagccgaactcgtcagacctggcgcttctgtgaagatgagctgcaaggccagcggctacaccttcaccagctataatatgcactgggtcaagcagacccctcggcagggactcgaatggatcggcggaatctatcccggcaacggcgacacctcctacaaccagaagttcaagggcaaagccacactgaccgtgggcaagagcagcagcaccgcctatatgcagctcagcagcctgaccagcgaggacagcgccgtgtacttctgcgccagatacgactacaactacgctatggactactggggccagggcaccagcgtgacagttagctctgccagcacgcgtgcctctacaaagggaccctccgtgtttcctctggctcccagcagcaagtctacaagcggaggaacagccgctctgggctgcctggtcaaggattactttcccgagcctgtgaccgtgtcctggaatagcggagcactgacaagcggcgtgcacacctttccagccgtgctgcaaagcagcggcctgtactctctgagcagcgtggtcacagtgcctagctctagcctgggcacccagacctacatctgcaatgtgaaccacaagcctagcaacaccaaggtggacaagagagtggaacccaagagctgtgaagtgaaaaccgactccaccgaccacgtgaagcccaaagagacagagaacaccaagcagcccagcaagagctgccacaagcccaaggccatcgtgcacaccgagaaagtgaacatgatgagcctgaccgtgctgggcctgcggatgctgttcgccaaaaccgtggccgtgaacttcctgctgaccgccaagctgttcttcctc

SEQ ID NO: 3126 - DNA, 2760 bp, Artificial Sequence
  Synthetic Polynucloetide
atggccttaccagtgaccgccttgctcctgccgctggccttgctgctccacgccgccaggccggaagtgcagctggttgaatctggcggaggactggttcagcctggcggatctctgagactgtcttgtgccgccagcggcttcagcttcagcgacttttggatgagctgggtccgacaggcccctggcaaaggacttgaatgggtcgccacaatcagccaggccggcagcgagaaggactacgtggactctgtgaagggcagattcaccatcagccgggacaacgccaagaagtccctgtacctccagatgaacagcctgagagccgaggacaccgccgtgtactattgtgcctctggcgtgtacagcttcgactacagaggccagggcaccctggtcacagtctcttctggtaccggcggaggcggatctggcggcggaggtagcggtggcggaggatctgaattcgagatcgtgctgacacagagccctgccaccctgtctctgagccctggcgaaagagccaccctgagctgtagagccagccagagcgtgtccagctacctggcctggtatcagcagaagcccggccaggctccccggctgctgatctacgatgccagcaatagagccaccggcatccccgccagattttccggctctggcagcggcaccgacttcaccctgaccatcagctccctggaacccgaggacttcgccgtgtactactgccagcagcggagcaactggcccatcacattcggccagggcacccggctggaaatcaaactcgagggacagcctaaggccaatcctaccgtgacactgttccctccaagcagcgaagaactccaggccaacaaggccacacttgtgtgcctgatctccgacttctaccctggggctgtgacagtggcttggaaggccgatggatctcctgtgaaagccggcgtggaaaccaccaagccatccaagcagagcaacaacaaatacgccgccagctcctacctgagcctgacacctgagcagtggaagtcccacagatcctacagctgccaagtgacccacgaaggcagcaccgtggaaaagacagtggcccctacagagtgcagccccatcaagaccgatgtgattacaatggaccccaaggacaactgctccaaggacgccaacgataccctgctgctccagctgaccaacaccagcgcctactacatgtacttgttgctgctgctgaagtccgtggtgtacttcgccatcatcacatgctgcctgctgcggagaaccgccttctgctgcaacggcgagaagtctagggccaagcgatctggatctggagcaacaaacttctcactactcaaacaagcaggtgacgtggaggagaatcccgggcctactagtatggactggatttggcgcatccttttccttgtcggcgctgctaccggcgcgcattccgggccccagctccagctgcaagagtctggacctggcctggtcaagcctagcgagacactgagcctgacctgtaccgtgtccggcgatagcatcagcagcggcgattactactggggctggatcagacagcctcctggcaaaggactggaatggatcggccacatctactacagcggcgtgacctactacaaccccagcctgaagtccagagtgaccatcagcgtggacaccagccggaaccagttctccctgaagctgtctagcgtgacagccgccgataccgccgtgtactactgcaccagagaggacagcagcaactggcggagtagaggccagggaacactggtcacagttagctctggatccggcggaggcggaagtggaggcggaggatctggcggcggaggctctttcgaagaggtgcagcttgttgagtctggcggaggactggtgcagcccgatagaagcctgagactgtcttgtgccgccagcggcttcaccttccacgattatgccatgcactgggtccgacaggcccctggcaaaggacttgaatgggtgtccaccatctcttggaacagcggcacaatcggctacgccgactctgtgaagggcagattcaccatcagccgggacaacgccaagaacagcctgtacctccagatgaactccctgagagccgaggacacagccctgtactactgcgccaaggacatccagtacggcaactactactacggcatggacgtgtggggccagggcacaacagtgacagtctcttctacgcgtgcctctacaaagggaccctccgtgtttcctctggctcccagcagcaagtctacaagcggaggaacagccgctctgggctgcctggtcaaggattactttcccgagcctgtgaccgtgtcctggaatagcggagcactgacaagcggcgtgcacacctttccagccgtgctgcaaagcagcggcctgtactctctgagcagcgtggtcacagtgcctagctctagcctgggcacccagacctacatctgcaatgtgaaccacaagcctagcaacaccaaggtggacaagagagtggaacccaagagctgtgaagtgaaaaccgactccaccgaccacgtgaagcccaaagagacagagaacaccaagcagcccagcaagagctgccacaagcccaaggccatcgtgcacaccgagaaagtgaacatgatgagcctgaccgtgctgggcctgcggatgctgttcgccaaaaccgtggccgtgaacttcctgctgaccgccaagctgttcttcctc

SEQ ID NO: 3127 - DNA, 2745 bp, Artificial Sequence
  Synthetic Polynucloetide
atggccttaccagtgaccgccttgctcctgccgctggccttgctgctccacgccgccaggccggaagtgcagctggttgaatctggcggaggactggttcagcctggcggatctctgagactgtcttgtgccgccagcggcttcagcttcagcgacttttggatgagctgggtccgacaggcccctggcaaaggacttgaatgggtcgccacaatcagccaggccggcagcgagaaggactacgtggactctgtgaagggcagattcaccatcagccgggacaacgccaagaagtccctgtacctccagatgaacagcctgagagccgaggacaccgccgtgtactattgtgcctctggcgtgtacagcttcgactacagaggccagggcaccctggtcacagtctcttctggtaccggcggaggcggatctggcggcggaggtagcggtggcggaggatctgaattcgacatccagatgacacagagccctagcagcctgtctgccagcgtgggagatagagtgaccatcaactgcaaggccagccaggacatcaacagctacctgagctggttccagcagaagcctggcaaggcccctaagacactgatctaccgggccaacagactggtggatggcgtgccaagcagattttctggcagcggcagcggccaggattacaccctgacaatatccagcctccagcctgaggacttcgccacctactactgcctccagtacgacgagttccctctgacctttggcggaggcaccaaggtggaaatcaaactcgagggacagcctaaggccaatcctaccgtgacactgttccctccaagcagcgaagaactccaggccaacaaggccacacttgtgtgcctgatctccgacttctaccctggggctgtgacagtggcttggaaggccgatggatctcctgtgaaagccggcgtggaaaccaccaagccatccaagcagagcaacaacaaatacgccgccagctcctacctgagcctgacacctgagcagtggaagtcccacagatcctacagctgccaagtgacccacgaaggcagcaccgtggaaaagacagtggcccctacagagtgcagccccatcaagaccgatgtgattacaatggaccccaaggacaactgctccaaggacgccaacgataccctgctgctccagctgaccaacaccagcgcctactacatgtacttgttgctgctgctgaagtccgtggtgtacttcgccatcatcacatgctgcctgctgcggagaaccgccttctgctgcaacggcgagaagtctagggccaagcgatctggatctggagcaacaaacttctcactactcaaacaagcaggtgacgtggaggagaatcccgggcctactagtatggactggatttggcgcatccttttccttgtcggcgctgctaccggcgcgcattccgggccccagctccagctgcaagagtctggacctggcctggtcaagcctagcgagacactgagcctgacctgtaccgtgtccggcgatagcatcagcagcggcgattactactggggctggatcagacagcctcctggcaaaggactggaatggatcggccacatctactacagcggcgtgacctactacaaccccagcctgaagtccagagtgaccatcagcgtggacaccagccggaaccagttctccctgaagctgtctagcgtgacagccgccgataccgccgtgtactactgcaccagagaggacagcagcaactggcggagtagaggccagggaacactggtcacagttagctctggatccggcggaggcggaagtggaggcggaggatctggcggcggaggctctttcgaacaggtgcaactggtgcagtctggggccgaagtgaagaaacctggggcctctgtgaaggtgtcctgcaaagccagcggctacacctttaccaactacgacatcaactgggtccgacaggctccaggccaaggactggaatggatcggctggatctatcctggcgacggcagcaccaagtacaacgagaagttcaaggccaaggccacactgaccgccgataccagcacaagcaccgcctacatggaactgcggagcctgagaagcgacgacaccgccgtgtactattgtgcctccggctacgaggacgctatggactattggggccagggcaccaccgtgacagtgtctagtacgcgtgcctctacaaagggaccctccgtgtttcctctggctcccagcagcaagtctacaagcggaggaacagccgctctgggctgcctggtcaaggattactttcccgagcctgtgaccgtgtcctggaatagcggagcactgacaagcggcgtgcacacctttccagccgtgctgcaaagcagcggcctgtactctctgagcagcgtggtcacagtgcctagctctagcctgggcacccagacctacatctgcaatgtgaaccacaagcctagcaacaccaaggtggacaagagagtggaacccaagagctgtgaagtgaaaaccgactccaccgaccacgtgaagcccaaagagacagagaacaccaagcagcccagcaagagctgccacaagcccaaggccatcgtgcacaccgagaaagtgaacatgatgagcctgaccgtgctgggcctgcggatgctgttcgccaaaaccgtggccgtgaacttcctgctgaccgccaagctgttcttcctc

SEQ ID NO: 3128 - DNA, 2751 bp, Artificial Sequence
  Synthetic Polynucloetide
atggccttaccagtgaccgccttgctcctgccgctggccttgctgctccacgccgccaggccggaagtgcagctggttgaatctggcggaggactggttcagcctggcggatctctgagactgtcttgtgccgccagcggcttcagcttcagcgacttttggatgagctgggtccgacaggcccctggcaaaggacttgaatgggtcgccacaatcagccaggccggcagcgagaaggactacgtggactctgtgaagggcagattcaccatcagccgggacaacgccaagaagtccctgtacctccagatgaacagcctgagagccgaggacaccgccgtgtactattgtgcctctggcgtgtacagcttcgactacagaggccagggcaccctggtcacagtctcttctggtaccggcggaggcggatctggcggcggaggtagcggtggcggaggatctgaattcgacatcgtgatgacccagacacctctgagcctgagcgtgacacctggacagcctgccagcattagctgcaagagcagccagtctctgctggacggcgacggcaagacctacctgaattggctgctccagaagcctggacagagccctcagcggctgatctacctggtgtccaagctggatagcggcgtgcccgatagattttctggcagcggctctggcaccgacttcaccctgaagatcagcagagtggaagccgaggacgtgggcgtgtactactgttggcagggcacacacttccccagaacattcggccagggcacaaagctggaaatcaaactcgagggacagcctaaggccaatcctaccgtgacactgttccctccaagcagcgaagaactccaggccaacaaggccacacttgtgtgcctgatctccgacttctaccctggggctgtgacagtggcttggaaggccgatggatctcctgtgaaagccggcgtggaaaccaccaagccatccaagcagagcaacaacaaatacgccgccagctcctacctgagcctgacacctgagcagtggaagtcccacagatcctacagctgccaagtgacccacgaaggcagcaccgtggaaaagacagtggcccctacagagtgcagccccatcaagaccgatgtgattacaatggaccccaaggacaactgctccaaggacgccaacgataccctgctgctccagctgaccaacaccagcgcctactacatgtacttgttgctgctgctgaagtccgtggtgtacttcgccatcatcacatgctgcctgctgcggagaaccgccttctgctgcaacggcgagaagtctagggccaagcgatctggatctggagcaacaaacttctcactactcaaacaagcaggtgacgtggaggagaatcccgggcctactagtatggactggatttggcgcatccttttccttgtcggcgctgctaccggcgcgcattccgggccccagctccagctgcaagagtctggacctggcctggtcaagcctagcgagacactgagcctgacctgtaccgtgtccggcgatagcatcagcagcggcgattactactggggctggatcagacagcctcctggcaaaggactggaatggatcggccacatctactacagcggcgtgacctactacaaccccagcctgaagtccagagtgaccatcagcgtggacaccagccggaaccagttctccctgaagctgtctagcgtgacagccgccgataccgccgtgtactactgcaccagagaggacagcagcaactggcggagtagaggccagggaacactggtcacagttagctctggatccggcggaggcggaagtggaggcggaggatctggcggcggaggctctttcgaacaagtgcaactggttcagagcggagccgaagtgaagaaacctggggcctctgtgaaggtgtcctgcaaggccagcggctacaccttcaaggacacctacatccactgggtccgacaggcccctggacaaggacttgagtggatgggcagaatcgaccccgccaacggcaacaccaaatacgaccccaagttccagggcagagtgaccatgaccagagacaccagcatcagcaccgcctacatggaactgagccggctgagatccgatgacaccgccgtgtactattgcgctagaagaggcggagtggattggggccagggaacactggttaccgtgtctagtacgcgtgcctctacaaagggaccctccgtgtttcctctggctcccagcagcaagtctacaagcggaggaacagccgctctgggctgcctggtcaaggattactttcccgagcctgtgaccgtgtcctggaatagcggagcactgacaagcggcgtgcacacctttccagccgtgctgcaaagcagcggcctgtactctctgagcagcgtggtcacagtgcctagctctagcctgggcacccagacctacatctgcaatgtgaaccacaagcctagcaacaccaaggtggacaagagagtggaacccaagagctgtgaagtgaaaaccgactccaccgaccacgtgaagcccaaagagacagagaacaccaagcagcccagcaagagctgccacaagcccaaggccatcgtgcacaccgagaaagtgaacatgatgagcctgaccgtgctgggcctgcggatgctgttcgccaaaaccgtggccgtgaacttcctgctgaccgccaagctgttcttcctc

SEQ ID NO: 3129 - DNA, 2754 bp, Artificial Sequence
  Synthetic Polynucloetide
atggccttaccagtgaccgccttgctcctgccgctggccttgctgctccacgccgccaggccggaagtgcagctggttgaatctggcggaggactggttcagcctggcggatctctgagactgtcttgtgccgccagcggcttcagcttcagcgacttttggatgagctgggtccgacaggcccctggcaaaggacttgaatgggtcgccacaatcagccaggccggcagcgagaaggactacgtggactctgtgaagggcagattcaccatcagccgggacaacgccaagaagtccctgtacctccagatgaacagcctgagagccgaggacaccgccgtgtactattgtgcctctggcgtgtacagcttcgactacagaggccagggcaccctggtcacagtctcttctggtaccggcggaggcggatctggcggcggaggtagcggtggcggaggatctgaattcgacatccagatgacacagagccctagcagcctgtctgccagcgtgggagacagagtgaccatcacatgcaaggccagccaggatgtgtctacagccgtggcctggttccagcagaagcctggaaaagcccctaagctgctgatctacagccccagctacagatacaccggcgtgcccagcagattttctggcagcggctctggcaccgacttcaccctgacaatatccagcctccagcctgaggacttcacctactactgccagcagctctacagcaccccttacacattcggccagggcaccaaggtggaaatcaaactcgagggacagcctaaggccaatcctaccgtgacactgttccctccaagcagcgaagaactccaggccaacaaggccacacttgtgtgcctgatctccgacttctaccctggggctgtgacagtggcttggaaggccgatggatctcctgtgaaagccggcgtggaaaccaccaagccatccaagcagagcaacaacaaatacgccgccagctcctacctgagcctgacacctgagcagtggaagtcccacagatcctacagctgccaagtgacccacgaaggcagcaccgtggaaaagacagtggcccctacagagtgcagccccatcaagaccgatgtgattacaatggaccccaaggacaactgctccaaggacgccaacgataccctgctgctccagctgaccaacaccagcgcctactacatgtacttgttgctgctgctgaagtccgtggtgtacttcgccatcatcacatgctgcctgctgcggagaaccgccttctgctgcaacggcgagaagtctagggccaagcgatctggatctggagcaacaaacttctcactactcaaacaagcaggtgacgtggaggagaatcccgggcctactagtatggactggatttggcgcatccttttccttgtcggcgctgctaccggcgcgcattccgggccccagctccagctgcaagagtctggacctggcctggtcaagcctagcgagacactgagcctgacctgtaccgtgtccggcgatagcatcagcagcggcgattactactggggctggatcagacagcctcctggcaaaggactggaatggatcggccacatctactacagcggcgtgacctactacaaccccagcctgaagtccagagtgaccatcagcgtggacaccagccggaaccagttctccctgaagctgtctagcgtgacagccgccgataccgccgtgtactactgcaccagagaggacagcagcaactggcggagtagaggccagggaacactggtcacagttagctctggatccggcggaggcggaagtggaggcggaggatctggcggcggaggctctttcgaagaagtgcaactggttcagagcggagccgaagtgaagaaacctggggcctctgtgaaggtgtcctgcaaagccagcggctacacctttaccgactactacctggacgtggtcgtgcggcaagctcctggacaaggactggaatggatcggcagagtgaacccctacaacggcggcaccatctacaaccagaaattcaagggaagagtgaccctgaccagagacaccagcacctccacagcctacctggaactgagcagcctgagaagcgaagataccgccgtgtactactgcgccagggaccactacagatatgaccctctgctggactactggggccagggaaccctggttacagtgtctagtacgcgtgcctctacaaagggaccctccgtgtttcctctggctcccagcagcaagtctacaagcggaggaacagccgctctgggctgcctggtcaaggattactttcccgagcctgtgaccgtgtcctggaatagcggagcactgacaagcggcgtgcacacctttccagccgtgctgcaaagcagcggcctgtactctctgagcagcgtggtcacagtgcctagctctagcctgggcacccagacctacatctgcaatgtgaaccacaagcctagcaacaccaaggtggacaagagagtggaacccaagagctgtgaagtgaaaaccgactccaccgaccacgtgaagcccaaagagacagagaacaccaagcagcccagcaagagctgccacaagcccaaggccatcgtgcacaccgagaaagtgaacatgatgagcctgaccgtgctgggcctgcggatgctgttcgccaaaaccgtggccgtgaacttcctgctgaccgccaagctgttcttcctc

SEQ ID NO: 3130 - DNA, 2772 bp, Artificial Sequence
  Synthetic Polynucloetide
atggccttaccagtgaccgccttgctcctgccgctggccttgctgctccacgccgccaggccggaagtgcagctggttgaatctggcggaggactggttcagcctggcggatctctgagactgtcttgtgccgccagcggcttcagcttcagcgacttttggatgagctgggtccgacaggcccctggcaaaggacttgaatgggtcgccacaatcagccaggccggcagcgagaaggactacgtggactctgtgaagggcagattcaccatcagccgggacaacgccaagaagtccctgtacctccagatgaacagcctgagagccgaggacaccgccgtgtactattgtgcctctggcgtgtacagcttcgactacagaggccagggcaccctggtcacagtctcttctggtaccggcggaggcggatctggcggcggaggtagcggtggcggaggatctgaattcgacatccagatgacacagagccctagcagcctgtctgccagcgtgggagacagagtgaccatcacctgtagagccagccagagcgtgtccaccagcagctacaactacatgcactggtatcagcagaagcccggcaagcctcctaagctgctgattaagtacgccagcaacctggaaagcggcgtgcccagcagattttctggcagcggctctggcaccgacttcaccctgacaatatccagcctccagcctgaggacttcgccacctactactgtcagcactcctgggagatccctctgacattcggccagggcaccaaggtggaaatcaaactcgagggacagcctaaggccaatcctaccgtgacactgttccctccaagcagcgaagaactccaggccaacaaggccacacttgtgtgcctgatctccgacttctaccctggggctgtgacagtggcttggaaggccgatggatctcctgtgaaagccggcgtggaaaccaccaagccatccaagcagagcaacaacaaatacgccgccagctcctacctgagcctgacacctgagcagtggaagtcccacagatcctacagctgccaagtgacccacgaaggcagcaccgtggaaaagacagtggcccctacagagtgcagccccatcaagaccgatgtgattacaatggaccccaaggacaactgctccaaggacgccaacgataccctgctgctccagctgaccaacaccagcgcctactacatgtacttgttgctgctgctgaagtccgtggtgtacttcgccatcatcacatgctgcctgctgcggagaaccgccttctgctgcaacggcgagaagtctagggccaagcgatctggatctggagcaacaaacttctcactactcaaacaagcaggtgacgtggaggagaatcccgggcctactagtatggactggatttggcgcatccttttccttgtcggcgctgctaccggcgcgcattccgggccccagctccagctgcaagagtctggacctggcctggtcaagcctagcgagacactgagcctgacctgtaccgtgtccggcgatagcatcagcagcggcgattactactggggctggatcagacagcctcctggcaaaggactggaatggatcggccacatctactacagcggcgtgacctactacaaccccagcctgaagtccagagtgaccatcagcgtggacaccagccggaaccagttctccctgaagctgtctagcgtgacagccgccgataccgccgtgtactactgcaccagagaggacagcagcaactggcggagtagaggccagggaacactggtcacagttagctctggatccggcggaggcggaagtggaggcggaggatctggcggcggaggctctttcgaagaagtgcaactggttcagagcggagccgaagtgaagaaacctggggcctctgtgaaggtgtcctgcaaggccagcggctacagcttcaccgactattatatgcactgggtccgacaggctccaggccagggacttgagtggatcggcagaatcaacccctacaacggcgctgccttctacagccagaacttcaaggatagagtgaccctgaccgtggacaccagcaccagcacagcctacctggaactgagcagcctgagaagcgaggacaccgccgtgtactactgcgccattgagagaggcgctgacctggaaggctacgctatggattattggggccagggaaccctggtcaccgtgtcatctacgcgtgcctctacaaagggaccctccgtgtttcctctggctcccagcagcaagtctacaagcggaggaacagccgctctgggctgcctggtcaaggattactttcccgagcctgtgaccgtgtcctggaatagcggagcactgacaagcggcgtgcacacctttccagccgtgctgcaaagcagcggcctgtactctctgagcagcgtggtcacagtgcctagctctagcctgggcacccagacctacatctgcaatgtgaaccacaagcctagcaacaccaaggtggacaagagagtggaacccaagagctgtgaagtgaaaaccgactccaccgaccacgtgaagcccaaagagacagagaacaccaagcagcccagcaagagctgccacaagcccaaggccatcgtgcacaccgagaaagtgaacatgatgagcctgaccgtgctgggcctgcggatgctgttcgccaaaaccgtggccgtgaacttcctgctgaccgccaagctgttcttcctc

SEQ ID NO: 3131 - DNA, 2766 bp, Artificial Sequence
  Synthetic Polynucloetide
atggccttaccagtgaccgccttgctcctgccgctggccttgctgctccacgccgccaggccggaagtgcagctggttgaatctggcggaggactggttcagcctggcggatctctgagactgtcttgtgccgccagcggcttcagcttcagcgacttttggatgagctgggtccgacaggcccctggcaaaggacttgaatgggtcgccacaatcagccaggccggcagcgagaaggactacgtggactctgtgaagggcagattcaccatcagccgggacaacgccaagaagtccctgtacctccagatgaacagcctgagagccgaggacaccgccgtgtactattgtgcctctggcgtgtacagcttcgactacagaggccagggcaccctggtcacagtctcttctggtaccggcggaggcggatctggcggcggaggtagcggtggcggaggatctgaattcgagatcgtgctgacacagtctccagccacactgagcgcttctccaggcgagagagtgaccctgacctgtagagccagcagcaacgtgatctccagctacgtgcactggtatcagcagaagcctggcagcagccccagactgtttctgtacagcaccagcaatctggcctccggcgtgccaagcagattttctggctctggcagcggcaccgacttcacctttaccatctctagcctggaagccgaggacgccgccacctactactgtcagcagtacagcggctaccctctgaccttcggccagggcacaagactggaaatcaaactcgagggacagcctaaggccaatcctaccgtgacactgttccctccaagcagcgaagaactccaggccaacaaggccacacttgtgtgcctgatctccgacttctaccctggggctgtgacagtggcttggaaggccgatggatctcctgtgaaagccggcgtggaaaccaccaagccatccaagcagagcaacaacaaatacgccgccagctcctacctgagcctgacacctgagcagtggaagtcccacagatcctacagctgccaagtgacccacgaaggcagcaccgtggaaaagacagtggcccctacagagtgcagccccatcaagaccgatgtgattacaatggaccccaaggacaactgctccaaggacgccaacgataccctgctgctccagctgaccaacaccagcgcctactacatgtacttgttgctgctgctgaagtccgtggtgtacttcgccatcatcacatgctgcctgctgcggagaaccgccttctgctgcaacggcgagaagtctagggccaagcgatctggatctggagcaacaaacttctcactactcaaacaagcaggtgacgtggaggagaatcccgggcctactagtatggactggatttggcgcatccttttccttgtcggcgctgctaccggcgcgcattccgggccccagctccagctgcaagagtctggacctggcctggtcaagcctagcgagacactgagcctgacctgtaccgtgtccggcgatagcatcagcagcggcgattactactggggctggatcagacagcctcctggcaaaggactggaatggatcggccacatctactacagcggcgtgacctactacaaccccagcctgaagtccagagtgaccatcagcgtggacaccagccggaaccagttctccctgaagctgtctagcgtgacagccgccgataccgccgtgtactactgcaccagagaggacagcagcaactggcggagtagaggccagggaacactggtcacagttagctctggatccggcggaggcggaagtggaggcggaggatctggcggcggaggctctttcgaacaagttcagctgcaagagtctggccctggcctggtcaagcctagcgaaacactgagcctgacctgcgccgtgtctggctactctatcaccagcgcctactattggaactggatcagacagcctcctggcaaaggactggaatggatcggctacatcagctacgacggcagaaacaactacaaccccagcctgaagaaccggatcaccatcaatcccgacaccagcaagaaccagttcagcctccagctgaacagcgtgacccctgaggataccgccgtgtactactgtgccagagaaggcgactacgacgtgggcaactactacgctatggactactggggccagggaaccctggtcacagtctcttctacgcgtgcctctacaaagggaccctccgtgtttcctctggctcccagcagcaagtctacaagcggaggaacagccgctctgggctgcctggtcaaggattactttcccgagcctgtgaccgtgtcctggaatagcggagcactgacaagcggcgtgcacacctttccagccgtgctgcaaagcagcggcctgtactctctgagcagcgtggtcacagtgcctagctctagcctgggcacccagacctacatctgcaatgtgaaccacaagcctagcaacaccaaggtggacaagagagtggaacccaagagctgtgaagtgaaaaccgactccaccgaccacgtgaagcccaaagagacagagaacaccaagcagcccagcaagagctgccacaagcccaaggccatcgtgcacaccgagaaagtgaacatgatgagcctgaccgtgctgggcctgcggatgctgttcgccaaaaccgtggccgtgaacttcctgctgaccgccaagctgttcttcctc

SEQ ID NO: 3132 - DNA, 2766 bp, Artificial Sequence
  Synthetic Polynucloetide
atggccttaccagtgaccgccttgctcctgccgctggccttgctgctccacgccgccaggccggaagtgcagctggttgaatctggcggaggactggttcagcctggcggatctctgagactgtcttgtgccgccagcggcttcagcttcagcgacttttggatgagctgggtccgacaggcccctggcaaaggacttgaatgggtcgccacaatcagccaggccggcagcgagaaggactacgtggactctgtgaagggcagattcaccatcagccgggacaacgccaagaagtccctgtacctccagatgaacagcctgagagccgaggacaccgccgtgtactattgtgcctctggcgtgtacagcttcgactacagaggccagggcaccctggtcacagtctcttctggtaccggcggaggcggatctggcggcggaggtagcggtggcggaggatctgaattcgagatcgtgctgacacagtctcccgccacactgtcactgtctccaggcgaaagagccacactgagctgtagagccagcagcaacgtgatctccagctacgtgcactggtatcagcagaagcctggacaggcccctcggctgctgatctacagcacaagcaatctggcctctggcatccccgccagattttctggctctggaagcggcaccgacttcaccctgaccataagcagcctggaacctgaggacttcgccgtgtactactgccagcagtatagcggctaccctctgaccttcggccagggcacaagactggaaatcaaactcgagggacagcctaaggccaatcctaccgtgacactgttccctccaagcagcgaagaactccaggccaacaaggccacacttgtgtgcctgatctccgacttctaccctggggctgtgacagtggcttggaaggccgatggatctcctgtgaaagccggcgtggaaaccaccaagccatccaagcagagcaacaacaaatacgccgccagctcctacctgagcctgacacctgagcagtggaagtcccacagatcctacagctgccaagtgacccacgaaggcagcaccgtggaaaagacagtggcccctacagagtgcagccccatcaagaccgatgtgattacaatggaccccaaggacaactgctccaaggacgccaacgataccctgctgctccagctgaccaacaccagcgcctactacatgtacttgttgctgctgctgaagtccgtggtgtacttcgccatcatcacatgctgcctgctgcggagaaccgccttctgctgcaacggcgagaagtctagggccaagcgatctggatctggagcaacaaacttctcactactcaaacaagcaggtgacgtggaggagaatcccgggcctactagtatggactggatttggcgcatccttttccttgtcggcgctgctaccggcgcgcattccgggccccagctccagctgcaagagtctggacctggcctggtcaagcctagcgagacactgagcctgacctgtaccgtgtccggcgatagcatcagcagcggcgattactactggggctggatcagacagcctcctggcaaaggactggaatggatcggccacatctactacagcggcgtgacctactacaaccccagcctgaagtccagagtgaccatcagcgtggacaccagccggaaccagttctccctgaagctgtctagcgtgacagccgccgataccgccgtgtactactgcaccagagaggacagcagcaactggcggagtagaggccagggaacactggtcacagttagctctggatccggcggaggcggaagtggaggcggaggatctggcggcggaggctctttcgaagaagtgcaactggtggaaagtggcggcggactggtgcaacctggaagaagcctgagactgtcctgtgccgccagcggctactctatcacaagcgcctactactggaactgggtccgacaggctcctggcaaaggactggaatgggtgtcctacatcagctacgacggcagaaacaactacaaccccagcctgaagaaccgcttcaccatcagccgggacaacgccaagaagtccctgtacctccagatgaacagcctgagagccgaggacacagccctgtactattgcgccaaagagggcgactacgacgtcggcaactactacgctatggactactggggccagggaaccaccgtgactgtctcttctacgcgtgcctctacaaagggaccctccgtgtttcctctggctcccagcagcaagtctacaagcggaggaacagccgctctgggctgcctggtcaaggattactttcccgagcctgtgaccgtgtcctggaatagcggagcactgacaagcggcgtgcacacctttccagccgtgctgcaaagcagcggcctgtactctctgagcagcgtggtcacagtgcctagctctagcctgggcacccagacctacatctgcaatgtgaaccacaagcctagcaacaccaaggtggacaagagagtggaacccaagagctgtgaagtgaaaaccgactccaccgaccacgtgaagcccaaagagacagagaacaccaagcagcccagcaagagctgccacaagcccaaggccatcgtgcacaccgagaaagtgaacatgatgagcctgaccgtgctgggcctgcggatgctgttcgccaaaaccgtggccgtgaacttcctgctgaccgccaagctgttcttcctc

SEQ ID NO: 3133 - DNA, 2763 bp, Artificial Sequence
  Synthetic Polynucloetide
atggccttaccagtgaccgccttgctcctgccgctggccttgctgctccacgccgccaggccggaagtgcagctggttgaatctggcggaggactggttcagcctggcggatctctgagactgtcttgtgccgccagcggcttcagcttcagcgacttttggatgagctgggtccgacaggcccctggcaaaggacttgaatgggtcgccacaatcagccaggccggcagcgagaaggactacgtggactctgtgaagggcagattcaccatcagccgggacaacgccaagaagtccctgtacctccagatgaacagcctgagagccgaggacaccgccgtgtactattgtgcctctggcgtgtacagcttcgactacagaggccagggcaccctggtcacagtctcttctggtaccggcggaggcggatctggcggcggaggtagcggtggcggaggatctgaattcgacgtggtcatgacacagaccccactgagcctgcctgtgtctctgggagatcaggccagcatctcctgtagaagcagccagagcctggtgcacagcaacggcaacacctacctgcggtggtatctccagaagcctggacagagccccaaggtgctgatctacaaggtgtccaacagagtgtccggcgtgcccgatagattttctggcagcggctctggcaccgacttcaccctgaagatcaatagagtggaagccgaggacctgggcgtgtacttctgtagccagagcacccatgtgccttggacctttggcggaggcaccaagctggaaatcaagctcgagggacagcctaaggccaatcctaccgtgacactgttccctccaagcagcgaagaactccaggccaacaaggccacacttgtgtgcctgatctccgacttctaccctggggctgtgacagtggcttggaaggccgatggatctcctgtgaaagccggcgtggaaaccaccaagccatccaagcagagcaacaacaaatacgccgccagctcctacctgagcctgacacctgagcagtggaagtcccacagatcctacagctgccaagtgacccacgaaggcagcaccgtggaaaagacagtggcccctacagagtgcagccccatcaagaccgatgtgattacaatggaccccaaggacaactgctccaaggacgccaacgataccctgctgctccagctgaccaacaccagcgcctactacatgtacttgttgctgctgctgaagtccgtggtgtacttcgccatcatcacatgctgcctgctgcggagaaccgccttctgctgcaacggcgagaagtctagggccaagcgatctggatctggagcaacaaacttctcactactcaaacaagcaggtgacgtggaggagaatcccgggcctactagtatggactggatttggcgcatccttttccttgtcggcgctgctaccggcgcgcattccgggccccagctccagctgcaagagtctggacctggcctggtcaagcctagcgagacactgagcctgacctgtaccgtgtccggcgatagcatcagcagcggcgattactactggggctggatcagacagcctcctggcaaaggactggaatggatcggccacatctactacagcggcgtgacctactacaaccccagcctgaagtccagagtgaccatcagcgtggacaccagccggaaccagttctccctgaagctgtctagcgtgacagccgccgataccgccgtgtactactgcaccagagaggacagcagcaactggcggagtagaggccagggaacactggtcacagttagctctggatccggcggaggcggaagtggaggcggaggatctggcggcggaggctctttcgaaggcgtgaagctggacgagacaggcggaggacttgttcaacctggcggagccatgaagctgagctgtgtgaccagcggctttaccttcggccactactggatgaactgggtccgacagtcccctgagaaaggactggaatgggtcgcccagttcagaaacaagccctacaactacgaaacctactacagcgacagcgtgaagggcagattcaccatcagccgggacgacagcaagtccagcgtgtacctccagatgaacaacctgcgcgtggaagataccggcatctactactgtaccggggccagctacggcatggaatatctcggccagggcaccagcgtgaccgtgtctacaacgcgtgcctctacaaagggaccctccgtgtttcctctggctcccagcagcaagtctacaagcggaggaacagccgctctgggctgcctggtcaaggattactttcccgagcctgtgaccgtgtcctggaatagcggagcactgacaagcggcgtgcacacctttccagccgtgctgcaaagcagcggcctgtactctctgagcagcgtggtcacagtgcctagctctagcctgggcacccagacctacatctgcaatgtgaaccacaagcctagcaacaccaaggtggacaagagagtggaacccaagagctgtgaagtgaaaaccgactccaccgaccacgtgaagcccaaagagacagagaacaccaagcagcccagcaagagctgccacaagcccaaggccatcgtgcacaccgagaaagtgaacatgatgagcctgaccgtgctgggcctgcggatgctgttcgccaaaaccgtggccgtgaacttcctgctgaccgccaagctgttcttcctc

SEQ ID NO: 3134 - DNA, 2781 bp, Artificial Sequence
  Synthetic Polynucloetide
atggccttaccagtgaccgccttgctcctgccgctggccttgctgctccacgccgccaggccggaagtgcagctggttgaatctggcggaggactggttcagcctggcggatctctgagactgtcttgtgccgccagcggcttcagcttcagcgacttttggatgagctgggtccgacaggcccctggcaaaggacttgaatgggtcgccacaatcagccaggccggcagcgagaaggactacgtggactctgtgaagggcagattcaccatcagccgggacaacgccaagaagtccctgtacctccagatgaacagcctgagagccgaggacaccgccgtgtactattgtgcctctggcgtgtacagcttcgactacagaggccagggcaccctggtcacagtctcttctggtaccggcggaggcggatctggcggcggaggtagcggtggcggaggatctgaattccaggtgcaactggtggaatctggcggcaatctggttcagcctggcggctctctgagactgtcttgtgccgccagcggcttcaccttcggcagcttttctatgagctgggtccgacaagctcctggcggaggacttgaatgggtggcaggactgtctgccagaagcagcctgacacactacgccgactctgtgaagggcagattcaccatcagccgggacaacgccaagaacagcgtgtacctccagatgaacagcctgagagtggaagataccgccgtgtactactgcgccagaagaagctacgacagcagcggctactggggccacttctacagctacatggatgtgtggggccagggcaccctggttacagtttctctcgagggacagcctaaggccaatcctaccgtgacactgttccctccaagcagcgaagaactccaggccaacaaggccacacttgtgtgcctgatctccgacttctaccctggggctgtgacagtggcttggaaggccgatggatctcctgtgaaagccggcgtggaaaccaccaagccatccaagcagagcaacaacaaatacgccgccagctcctacctgagcctgacacctgagcagtggaagtcccacagatcctacagctgccaagtgacccacgaaggcagcaccgtggaaaagacagtggcccctacagagtgcagccccatcaagaccgatgtgattacaatggaccccaaggacaactgctccaaggacgccaacgataccctgctgctccagctgaccaacaccagcgcctactacatgtacttgttgctgctgctgaagtccgtggtgtacttcgccatcatcacatgctgcctgctgcggagaaccgccttctgctgcaacggcgagaagtctagggccaagcgatctggatctggagcaacaaacttctcactactcaaacaagcaggtgacgtggaggagaatcccgggcctactagtatggactggatttggcgcatccttttccttgtcggcgctgctaccggcgcgcattccgggccccagctccagctgcaagagtctggacctggcctggtcaagcctagcgagacactgagcctgacctgtaccgtgtccggcgatagcatcagcagcggcgattactactggggctggatcagacagcctcctggcaaaggactggaatggatcggccacatctactacagcggcgtgacctactacaaccccagcctgaagtccagagtgaccatcagcgtggacaccagccggaaccagttctccctgaagctgtctagcgtgacagccgccgataccgccgtgtactactgcaccagagaggacagcagcaactggcggagtagaggccagggaacactggtcacagttagctctggatccggcggaggcggaagtggaggcggaggatctggcggcggaggctctttcgaatctgtgctgacccagcctagctccgtgtctgctgctcctggacagaaagtgaccatctcctgtagcggcagcaccagcaacatcggcaacaactacgtgtcctggtatcagcagcaccccggcaaggcccctaagctgatgatctacgacgtgtccaagaggcccagcggcgtgccagatagattttccggcagcaagagcggcaacagcgccagcctggatattagcggactccagtctgaggacgaggccgactactattgcgccgcctgggatgatagcctgagcgagtttctgtttggcaccggcaccaagctgacagtgcttggaacgcgtgcctctacaaagggaccctccgtgtttcctctggctcccagcagcaagtctacaagcggaggaacagccgctctgggctgcctggtcaaggattactttcccgagcctgtgaccgtgtcctggaatagcggagcactgacaagcggcgtgcacacctttccagccgtgctgcaaagcagcggcctgtactctctgagcagcgtggtcacagtgcctagctctagcctgggcacccagacctacatctgcaatgtgaaccacaagcctagcaacaccaaggtggacaagagagtggaacccaagagctgtgaagtgaaaaccgactccaccgaccacgtgaagcccaaagagacagagaacaccaagcagcccagcaagagctgccacaagcccaaggccatcgtgcacaccgagaaagtgaacatgatgagcctgaccgtgctgggcctgcggatgctgttcgccaaaaccgtggccgtgaacttcctgctgaccgccaagctgttcttcctc

SEQ ID NO: 3135 - DNA, 2766 bp, Artificial Sequence
  Synthetic Polynucloetide
atggccttaccagtgaccgccttgctcctgccgctggccttgctgctccacgccgccaggccggaagtgcagctggttgaatctggcggaggactggttcagcctggcggatctctgagactgtcttgtgccgccagcggcttcagcttcagcgacttttggatgagctgggtccgacaggcccctggcaaaggacttgaatgggtcgccacaatcagccaggccggcagcgagaaggactacgtggactctgtgaagggcagattcaccatcagccgggacaacgccaagaagtccctgtacctccagatgaacagcctgagagccgaggacaccgccgtgtactattgtgcctctggcgtgtacagcttcgactacagaggccagggcaccctggtcacagtctcttctggtaccggcggaggcggatctggcggcggaggtagcggtggcggaggatctgaattcgacgtggtcatgacacagagcccttctagcctgtctgccagcgtgggcgacagagtgacaatcacctgtcagagcagcctggacatcagccactacctgaactggtatcagcagaagcccggcaaggcccctaagctgctgatctacgacgccagcaatctggaaaccggcgtgcccagcagattttctggcagcggaagcggcacccacttcaccttcacaatatccagcctccagcctgaggacttcgccacctactactgccagcagtacgacaacctgcctctgacctttggcggaggcaccaagctggaaatcaagagactcgagggacagcctaaggccaatcctaccgtgacactgttccctccaagcagcgaagaactccaggccaacaaggccacacttgtgtgcctgatctccgacttctaccctggggctgtgacagtggcttggaaggccgatggatctcctgtgaaagccggcgtggaaaccaccaagccatccaagcagagcaacaacaaatacgccgccagctcctacctgagcctgacacctgagcagtggaagtcccacagatcctacagctgccaagtgacccacgaaggcagcaccgtggaaaagacagtggcccctacagagtgcagccccatcaagaccgatgtgattacaatggaccccaaggacaactgctccaaggacgccaacgataccctgctgctccagctgaccaacaccagcgcctactacatgtacttgttgctgctgctgaagtccgtggtgtacttcgccatcatcacatgctgcctgctgcggagaaccgccttctgctgcaacggcgagaagtctagggccaagcgatctggatctggagcaacaaacttctcactactcaaacaagcaggtgacgtggaggagaatcccgggcctactagtatggactggatttggcgcatccttttccttgtcggcgctgctaccggcgcgcattccgggccccagctccagctgcaagagtctggacctggcctggtcaagcctagcgagacactgagcctgacctgtaccgtgtccggcgatagcatcagcagcggcgattactactggggctggatcagacagcctcctggcaaaggactggaatggatcggccacatctactacagcggcgtgacctactacaaccccagcctgaagtccagagtgaccatcagcgtggacaccagccggaaccagttctccctgaagctgtctagcgtgacagccgccgataccgccgtgtactactgcaccagagaggacagcagcaactggcggagtagaggccagggaacactggtcacagttagctctggatccggcggaggcggaagtggaggcggaggatctggcggcggaggctctttcgaacaagttcaactggttcaatcaggcggaggcgtggtgcaacctggtggctctctgagagtgtcttgtgctgcctctggcgtgaccctgagcgactatggaatgcactgggtccgacaggcccctggcaaaggacttgagtgggtcgccttcatcagaaacgacggcagcgacaagtattacgccgacagcgtgaagggcagattcaccatcagccgggacaacagcgagaaaaccgtgtctctccagatgtctagcctgagagccgaggacaccgccgtgtactactgtgccaagaatggcgagagcggccctctggactactggtatctggatctgtggggcagaggcaccctggtcacagtctcttctacgcgtgcctctacaaagggaccctccgtgtttcctctggctcccagcagcaagtctacaagcggaggaacagccgctctgggctgcctggtcaaggattactttcccgagcctgtgaccgtgtcctggaatagcggagcactgacaagcggcgtgcacacctttccagccgtgctgcaaagcagcggcctgtactctctgagcagcgtggtcacagtgcctagctctagcctgggcacccagacctacatctgcaatgtgaaccacaagcctagcaacaccaaggtggacaagagagtggaacccaagagctgtgaagtgaaaaccgactccaccgaccacgtgaagcccaaagagacagagaacaccaagcagcccagcaagagctgccacaagcccaaggccatcgtgcacaccgagaaagtgaacatgatgagcctgaccgtgctgggcctgcggatgctgttcgccaaaaccgtggccgtgaacttcctgctgaccgccaagctgttcttcctc

SEQ ID NO: 3136 - DNA, 2778 bp, Artificial Sequence
  Synthetic Polynucloetide
atggccttaccagtgaccgccttgctcctgccgctggccttgctgctccacgccgccaggccggaagtgcagctggttgaatctggcggaggactggttcagcctggcggatctctgagactgtcttgtgccgccagcggcttcagcttcagcgacttttggatgagctgggtccgacaggcccctggcaaaggacttgaatgggtcgccacaatcagccaggccggcagcgagaaggactacgtggactctgtgaagggcagattcaccatcagccgggacaacgccaagaagtccctgtacctccagatgaacagcctgagagccgaggacaccgccgtgtactattgtgcctctggcgtgtacagcttcgactacagaggccagggcaccctggtcacagtctcttctggtaccggcggaggcggatctggcggcggaggtagcggtggcggaggatctgaattcagctacgagctgacacagcctccatccgtgtctggcacacctggacagagagtggctatctcctgtagcggcagcagcagcaacatcggcaccagaatggtcacctggtatcagcacgtgccaggcacagcccctaagctgctgatcttcaacaacaaccagcggcctagcggcgtgcccgatagattttctgccagcaagagcggcacaagcgccagcctggctatcatcggactccagtctgacgacgaggccgactactactgtgccacctgggacgacaacgtgaagtcctacgtgttcggcaccggcaccaaagtgacagtgcttggaagtagactcgagggacagcctaaggccaatcctaccgtgacactgttccctccaagcagcgaagaactccaggccaacaaggccacacttgtgtgcctgatctccgacttctaccctggggctgtgacagtggcttggaaggccgatggatctcctgtgaaagccggcgtggaaaccaccaagccatccaagcagagcaacaacaaatacgccgccagctcctacctgagcctgacacctgagcagtggaagtcccacagatcctacagctgccaagtgacccacgaaggcagcaccgtggaaaagacagtggcccctacagagtgcagccccatcaagaccgatgtgattacaatggaccccaaggacaactgctccaaggacgccaacgataccctgctgctccagctgaccaacaccagcgcctactacatgtacttgttgctgctgctgaagtccgtggtgtacttcgccatcatcacatgctgcctgctgcggagaaccgccttctgctgcaacggcgagaagtctagggccaagcgatctggatctggagcaacaaacttctcactactcaaacaagcaggtgacgtggaggagaatcccgggcctactagtatggactggatttggcgcatccttttccttgtcggcgctgctaccggcgcgcattccgggccccagctccagctgcaagagtctggacctggcctggtcaagcctagcgagacactgagcctgacctgtaccgtgtccggcgatagcatcagcagcggcgattactactggggctggatcagacagcctcctggcaaaggactggaatggatcggccacatctactacagcggcgtgacctactacaaccccagcctgaagtccagagtgaccatcagcgtggacaccagccggaaccagttctccctgaagctgtctagcgtgacagccgccgataccgccgtgtactactgcaccagagaggacagcagcaactggcggagtagaggccagggaacactggtcacagttagctctggatccggcggaggcggaagtggaggcggaggatctggcggcggaggctctttcgaacttgaaatggcccaggttcagctccagcagtggggagctggactgctgaagcctagcgagacactgagcctgacctgtgctgtgtacggcggcagcttcagcggctactactggtcctggatcagacagcctcctggcaaaggactggaatggatcggcgagatcaaccacagcggctccaccaactacaaccccagcctgaagtccagagtgaccatcagcgtggacaccagcaagaaccagttctccctgaagctgagcagcgtgacagccgctgataccgccgtgtactattgcgctagagcccctcagtcttggtacgtgggagatgtgtggggccagggcacactggttacagtgtcatctacgcgtgcctctacaaagggaccctccgtgtttcctctggctcccagcagcaagtctacaagcggaggaacagccgctctgggctgcctggtcaaggattactttcccgagcctgtgaccgtgtcctggaatagcggagcactgacaagcggcgtgcacacctttccagccgtgctgcaaagcagcggcctgtactctctgagcagcgtggtcacagtgcctagctctagcctgggcacccagacctacatctgcaatgtgaaccacaagcctagcaacaccaaggtggacaagagagtggaacccaagagctgtgaagtgaaaaccgactccaccgaccacgtgaagcccaaagagacagagaacaccaagcagcccagcaagagctgccacaagcccaaggccatcgtgcacaccgagaaagtgaacatgatgagcctgaccgtgctgggcctgcggatgctgttcgccaaaaccgtggccgtgaacttcctgctgaccgccaagctgttcttcctc

SEQ ID NO: 3137 - DNA, 2769 bp, Artificial Sequence
  Synthetic Polynucloetide
atggccttaccagtgaccgccttgctcctgccgctggccttgctgctccacgccgccaggccggaagtgcagctggttgaatctggcggaggactggttcagcctggcggatctctgagactgtcttgtgccgccagcggcttcagcttcagcgacttttggatgagctgggtccgacaggcccctggcaaaggacttgaatgggtcgccacaatcagccaggccggcagcgagaaggactacgtggactctgtgaagggcagattcaccatcagccgggacaacgccaagaagtccctgtacctccagatgaacagcctgagagccgaggacaccgccgtgtactattgtgcctctggcgtgtacagcttcgactacagaggccagggcaccctggtcacagtctcttctggtaccggcggaggcggatctggcggcggaggtagcggtggcggaggatctgaattccagtctgtgctgacacagcctcctagcctgtctgtggcccctggaaagacagccagcatcacatgcggcggcaacaacatcggcatgaagtccgtgcactggtatcagcagaggccaggacaggctcctgtgctggtcatctactacgacagcgacagaccctctggcatccccggcagattttccggcagcaactctggcaataccgccacactgaccatctccagagtggaagctggcgacgaggccgactactactgccaagtgtgggataccaccggcgatcaccctggctatgtgtttggcaccggcaccaaagtgacagtgcttctcgagggacagcctaaggccaatcctaccgtgacactgttccctccaagcagcgaagaactccaggccaacaaggccacacttgtgtgcctgatctccgacttctaccctggggctgtgacagtggcttggaaggccgatggatctcctgtgaaagccggcgtggaaaccaccaagccatccaagcagagcaacaacaaatacgccgccagctcctacctgagcctgacacctgagcagtggaagtcccacagatcctacagctgccaagtgacccacgaaggcagcaccgtggaaaagacagtggcccctacagagtgcagccccatcaagaccgatgtgattacaatggaccccaaggacaactgctccaaggacgccaacgataccctgctgctccagctgaccaacaccagcgcctactacatgtacttgttgctgctgctgaagtccgtggtgtacttcgccatcatcacatgctgcctgctgcggagaaccgccttctgctgcaacggcgagaagtctagggccaagcgatctggatctggagcaacaaacttctcactactcaaacaagcaggtgacgtggaggagaatcccgggcctactagtatggactggatttggcgcatccttttccttgtcggcgctgctaccggcgcgcattccgggccccagctccagctgcaagagtctggacctggcctggtcaagcctagcgagacactgagcctgacctgtaccgtgtccggcgatagcatcagcagcggcgattactactggggctggatcagacagcctcctggcaaaggactggaatggatcggccacatctactacagcggcgtgacctactacaaccccagcctgaagtccagagtgaccatcagcgtggacaccagccggaaccagttctccctgaagctgtctagcgtgacagccgccgataccgccgtgtactactgcaccagagaggacagcagcaactggcggagtagaggccagggaacactggtcacagttagctctggatccggcggaggcggaagtggaggcggaggatctggcggcggaggctctttcgaacaagttcaactggttcagagcggagccgaagtgaagaaacctggcagcagcgtgaaggtgtcctgcaaagcaagcggcggcacctttagcagctacgccatctcttgggtccgacaggcacctggacaaggactggaatggatgggcggcatcatccccatcttcggcacagccaattacgcccagaaattccagggcagagtgaccatcaccgccgacgagtctacaagcaccgcctacatggaactgagcagcctgagaagcgaggacaccgccgtgtactattgtgccagaggcgtgtacggctacagcggctctgccccttatgatgagtggggccagggaaccctggtcaccgtttcttctacgcgtgcctctacaaagggaccctccgtgtttcctctggctcccagcagcaagtctacaagcggaggaacagccgctctgggctgcctggtcaaggattactttcccgagcctgtgaccgtgtcctggaatagcggagcactgacaagcggcgtgcacacctttccagccgtgctgcaaagcagcggcctgtactctctgagcagcgtggtcacagtgcctagctctagcctgggcacccagacctacatctgcaatgtgaaccacaagcctagcaacaccaaggtggacaagagagtggaacccaagagctgtgaagtgaaaaccgactccaccgaccacgtgaagcccaaagagacagagaacaccaagcagcccagcaagagctgccacaagcccaaggccatcgtgcacaccgagaaagtgaacatgatgagcctgaccgtgctgggcctgcggatgctgttcgccaaaaccgtggccgtgaacttcctgctgaccgccaagctgttcttcctc

SEQ ID NO: 3138 - DNA, 2763 bp, Artificial Sequence
  Synthetic Polynucloetide
atggccttaccagtgaccgccttgctcctgccgctggccttgctgctccacgccgccaggccggaagtgcagctggttgaatctggcggaggactggttcagcctggcggatctctgagactgtcttgtgccgccagcggcttcagcttcagcgacttttggatgagctgggtccgacaggcccctggcaaaggacttgaatgggtcgccacaatcagccaggccggcagcgagaaggactacgtggactctgtgaagggcagattcaccatcagccgggacaacgccaagaagtccctgtacctccagatgaacagcctgagagccgaggacaccgccgtgtactattgtgcctctggcgtgtacagcttcgactacagaggccagggcaccctggtcacagtctcttctggtaccggcggaggcggatctggcggcggaggtagcggtggcggaggatctgaattcgaggtgcaactggttgagtctggcggaggactggtgcagcctggaagaagcctgagactgtcttgtgccgccagcggcttcaccttcgacgattatgccatgcactgggtccgacaggcccctggcaaaggacttgaatgggtgtccggcatctcctggaacagcggctctatcggctacgccgattccgtgaagggcagattcaccatcagccgggacaacgccaagaacagcctgtacctccagatgaactccctgagagccgaggacacagccctgtactactgcgccaaagacaaaggcggaggctactacgacttttggagcggcagcgattattggggccagggcacactggtcacagtgtctagcctcgagggacagcctaaggccaatcctaccgtgacactgttccctccaagcagcgaagaactccaggccaacaaggccacacttgtgtgcctgatctccgacttctaccctggggctgtgacagtggcttggaaggccgatggatctcctgtgaaagccggcgtggaaaccaccaagccatccaagcagagcaacaacaaatacgccgccagctcctacctgagcctgacacctgagcagtggaagtcccacagatcctacagctgccaagtgacccacgaaggcagcaccgtggaaaagacagtggcccctacagagtgcagccccatcaagaccgatgtgattacaatggaccccaaggacaactgctccaaggacgccaacgataccctgctgctccagctgaccaacaccagcgcctactacatgtacttgttgctgctgctgaagtccgtggtgtacttcgccatcatcacatgctgcctgctgcggagaaccgccttctgctgcaacggcgagaagtctagggccaagcgatctggatctggagcaacaaacttctcactactcaaacaagcaggtgacgtggaggagaatcccgggcctactagtatggactggatttggcgcatccttttccttgtcggcgctgctaccggcgcgcattccgggccccagctccagctgcaagagtctggacctggcctggtcaagcctagcgagacactgagcctgacctgtaccgtgtccggcgatagcatcagcagcggcgattactactggggctggatcagacagcctcctggcaaaggactggaatggatcggccacatctactacagcggcgtgacctactacaaccccagcctgaagtccagagtgaccatcagcgtggacaccagccggaaccagttctccctgaagctgtctagcgtgacagccgccgataccgccgtgtactactgcaccagagaggacagcagcaactggcggagtagaggccagggaacactggtcacagttagctctggatccggcggaggcggaagtggaggcggaggatctggcggcggaggctctttcgaatcttctgagctgacacaggaccctgccgtgtctgttgctctgggccagacagtgcggattacctgtcagggcgatagcctgagaagctactacgcctcctggtatcagcagaagccaggccaggctcctgtgctggtcatctacggcaagaacaacagacccagcggcatccccgatagattcagcggaagcagctctggcaataccgccagcctgacaattactggcgctcaggccgaggacgaggccgactactactgcaacagcagagatagcagcggctgggttttcggcggaggcacaaaactgacagtgctgacgcgtgcctctacaaagggaccctccgtgtttcctctggctcccagcagcaagtctacaagcggaggaacagccgctctgggctgcctggtcaaggattactttcccgagcctgtgaccgtgtcctggaatagcggagcactgacaagcggcgtgcacacctttccagccgtgctgcaaagcagcggcctgtactctctgagcagcgtggtcacagtgcctagctctagcctgggcacccagacctacatctgcaatgtgaaccacaagcctagcaacaccaaggtggacaagagagtggaacccaagagctgtgaagtgaaaaccgactccaccgaccacgtgaagcccaaagagacagagaacaccaagcagcccagcaagagctgccacaagcccaaggccatcgtgcacaccgagaaagtgaacatgatgagcctgaccgtgctgggcctgcggatgctgttcgccaaaaccgtggccgtgaacttcctgctgaccgccaagctgttcttcctc

SEQ ID NO: 3139 - DNA, 2790 bp, Artificial Sequence
  Synthetic Polynucloetide
atggccttaccagtgaccgccttgctcctgccgctggccttgctgctccacgccgccaggccggaagtgcagctggttgaatctggcggaggactggttcagcctggcggatctctgagactgtcttgtgccgccagcggcttcagcttcagcgacttttggatgagctgggtccgacaggcccctggcaaaggacttgaatgggtcgccacaatcagccaggccggcagcgagaaggactacgtggactctgtgaagggcagattcaccatcagccgggacaacgccaagaagtccctgtacctccagatgaacagcctgagagccgaggacaccgccgtgtactattgtgcctctggcgtgtacagcttcgactacagaggccagggcaccctggtcacagtctcttctggtaccggcggaggcggatctggcggcggaggtagcggtggcggaggatctgaattcgaagtgcagctccagcagtctggacctggcctggttaagcctagccagacactgagcctgacctgtgccatcagcggcgatagcgtgctgagcaacagcgacacctggaactggatcagacagagccctagcagaggactggaatggctgggcagaacctaccacagaagcacttggtacgacgactacgccagctctgtgcggggcagagtgtccatcaatgtggacaccagcaagaaccagtacagcctgcaactgaacgccgtgacacctgaggataccggcgtgtactactgcgccagagacagactccaggacggcaactcttggagcgacgcctttgatgtgtggggccagggcacaatggtcaccgtttctagcctcgagggacagcctaaggccaatcctaccgtgacactgttccctccaagcagcgaagaactccaggccaacaaggccacacttgtgtgcctgatctccgacttctaccctggggctgtgacagtggcttggaaggccgatggatctcctgtgaaagccggcgtggaaaccaccaagccatccaagcagagcaacaacaaatacgccgccagctcctacctgagcctgacacctgagcagtggaagtcccacagatcctacagctgccaagtgacccacgaaggcagcaccgtggaaaagacagtggcccctacagagtgcagccccatcaagaccgatgtgattacaatggaccccaaggacaactgctccaaggacgccaacgataccctgctgctccagctgaccaacaccagcgcctactacatgtacttgttgctgctgctgaagtccgtggtgtacttcgccatcatcacatgctgcctgctgcggagaaccgccttctgctgcaacggcgagaagtctagggccaagcgatctggatctggagcaacaaacttctcactactcaaacaagcaggtgacgtggaggagaatcccgggcctactagtatggactggatttggcgcatccttttccttgtcggcgctgctaccggcgcgcattccgggccccagctccagctgcaagagtctggacctggcctggtcaagcctagcgagacactgagcctgacctgtaccgtgtccggcgatagcatcagcagcggcgattactactggggctggatcagacagcctcctggcaaaggactggaatggatcggccacatctactacagcggcgtgacctactacaaccccagcctgaagtccagagtgaccatcagcgtggacaccagccggaaccagttctccctgaagctgtctagcgtgacagccgccgataccgccgtgtactactgcaccagagaggacagcagcaactggcggagtagaggccagggaacactggtcacagttagctctggatccggcggaggcggaagtggaggcggaggatctggcggcggaggctctttcgaacaatctgctctgacacagcctgccagcgtgtcaggatctcctggacagagcatcaccatctcttgcaccggcaccagctctgatgtcggcggctacaattacgtgtcctggtatcagcagcaccccggcaaggcccctaagctgatgatctacgacgtgtccaacagacccagcggcgtgtccaatagattctccggcagcaagagcggcaacaccgccagcctgacaatttctggactgcaagccgaggacgaggccgactactactgtagcagctacaccagcagcagcacactggtgtacgtgttcggcacaggcaccaaagtgaccgtgcttacgcgtgcctctacaaagggaccctccgtgtttcctctggctcccagcagcaagtctacaagcggaggaacagccgctctgggctgcctggtcaaggattactttcccgagcctgtgaccgtgtcctggaatagcggagcactgacaagcggcgtgcacacctttccagccgtgctgcaaagcagcggcctgtactctctgagcagcgtggtcacagtgcctagctctagcctgggcacccagacctacatctgcaatgtgaaccacaagcctagcaacaccaaggtggacaagagagtggaacccaagagctgtgaagtgaaaaccgactccaccgaccacgtgaagcccaaagagacagagaacaccaagcagcccagcaagagctgccacaagcccaaggccatcgtgcacaccgagaaagtgaacatgatgagcctgaccgtgctgggcctgcggatgctgttcgccaaaaccgtggccgtgaacttcctgctgaccgccaagctgttcttcctc

SEQ ID NO: 3140 - DNA, 2724 bp, Artificial Sequence
  Synthetic Polynucloetide
atggccttaccagtgaccgccttgctcctgccgctggccttgctgctccacgccgccaggccggaagtgcagctggttgaatctggcggaggactggttcagcctggcggatctctgagactgtcttgtgccgccagcggcttcagcttcagcgacttttggatgagctgggtccgacaggcccctggcaaaggacttgaatgggtcgccacaatcagccaggccggcagcgagaaggactacgtggactctgtgaagggcagattcaccatcagccgggacaacgccaagaagtccctgtacctccagatgaacagcctgagagccgaggacaccgccgtgtactattgtgcctctggcgtgtacagcttcgactacagaggccagggcaccctggtcacagtctcttctggtaccggcggaggcggatctggcggcggaggtagcggtggcggaggatctgaattccaggtgcaactggttcagtctggggccgaagtgaagaaacctggggcctctgtgaaggtgtcctgcaaggcttccggctacacctttaccagctacgacatcaactgggtccgacaggccacaggccaaggactggaatggatgggctggatgaaccccaacagcggcaataccggctacgcccagaaattccagggcagagtgaccatgaccagaaacaccagcatcagcaccgcctacatggaactgagcagcctgagaagcgaggacaccgccgtgtactattgcgccagaggcgacagcaccaaggtggaaatcaaactcgagggacagcctaaggccaatcctaccgtgacactgttccctccaagcagcgaagaactccaggccaacaaggccacacttgtgtgcctgatctccgacttctaccctggggctgtgacagtggcttggaaggccgatggatctcctgtgaaagccggcgtggaaaccaccaagccatccaagcagagcaacaacaaatacgccgccagctcctacctgagcctgacacctgagcagtggaagtcccacagatcctacagctgccaagtgacccacgaaggcagcaccgtggaaaagacagtggcccctacagagtgcagccccatcaagaccgatgtgattacaatggaccccaaggacaactgctccaaggacgccaacgataccctgctgctccagctgaccaacaccagcgcctactacatgtacttgttgctgctgctgaagtccgtggtgtacttcgccatcatcacatgctgcctgctgcggagaaccgccttctgctgcaacggcgagaagtctagggccaagcgatctggatctggagcaacaaacttctcactactcaaacaagcaggtgacgtggaggagaatcccgggcctactagtatggactggatttggcgcatccttttccttgtcggcgctgctaccggcgcgcattccgggccccagctccagctgcaagagtctggacctggcctggtcaagcctagcgagacactgagcctgacctgtaccgtgtccggcgatagcatcagcagcggcgattactactggggctggatcagacagcctcctggcaaaggactggaatggatcggccacatctactacagcggcgtgacctactacaaccccagcctgaagtccagagtgaccatcagcgtggacaccagccggaaccagttctccctgaagctgtctagcgtgacagccgccgataccgccgtgtactactgcaccagagaggacagcagcaactggcggagtagaggccagggaacactggtcacagttagctctggatccggcggaggcggaagtggaggcggaggatctggcggcggaggctctttcgaacaatctgtgctgacccagcctagatccgtgtctggctctcctggacagagcgtgaccatctcttgtaccggcaccagctctgatgtcggcggctacaattacgtgtcctggtatcagcagcaccccggcgaagcccctaagctgattatctacgacgccgacaagcggcccagcggcatcagcaatagattcagctctggcaagagcggcaacaccgccagcctgacaatcagcggactccaggtggaagatgaggccgactactactgctgctcctatgccggcggaagcacctgggttttcggaggcggtacaaaagtgaccgtgctgacgcgtgcctctacaaagggaccctccgtgtttcctctggctcccagcagcaagtctacaagcggaggaacagccgctctgggctgcctggtcaaggattactttcccgagcctgtgaccgtgtcctggaatagcggagcactgacaagcggcgtgcacacctttccagccgtgctgcaaagcagcggcctgtactctctgagcagcgtggtcacagtgcctagctctagcctgggcacccagacctacatctgcaatgtgaaccacaagcctagcaacaccaaggtggacaagagagtggaacccaagagctgtgaagtgaaaaccgactccaccgaccacgtgaagcccaaagagacagagaacaccaagcagcccagcaagagctgccacaagcccaaggccatcgtgcacaccgagaaagtgaacatgatgagcctgaccgtgctgggcctgcggatgctgttcgccaaaaccgtggccgtgaacttcctgctgaccgccaagctgttcttcctc

SEQ ID NO: 3141 - DNA, 2790 bp, Artificial Sequence
  Synthetic Polynucloetide
atggccttaccagtgaccgccttgctcctgccgctggccttgctgctccacgccgccaggccggaagtgcagctggttgaatctggcggaggactggttcagcctggcggatctctgagactgtcttgtgccgccagcggcttcagcttcagcgacttttggatgagctgggtccgacaggcccctggcaaaggacttgaatgggtcgccacaatcagccaggccggcagcgagaaggactacgtggactctgtgaagggcagattcaccatcagccgggacaacgccaagaagtccctgtacctccagatgaacagcctgagagccgaggacaccgccgtgtactattgtgcctctggcgtgtacagcttcgactacagaggccagggcaccctggtcacagtctcttctggtaccggcggaggcggatctggcggcggaggtagcggtggcggaggatctgaattcgaagtgcagctccagcagtctggacctggcctggttaagcctagccagacactgagcctgacctgtgccatcagcggcgatagcgtgtcctctaatagcgccgcctggaactggatcagacagagccctagcagaggactggaatggctgggcagaacctactaccgcagcaagtggtacagcgactacgccgtgtccgtgaagtcccggatcaccatcaatcccgacaccagcaagaaccagttcagcctgcaactgaacagcgtgacccctgaggataccgccgtgtactactgcgccagagatccctacgacttttggagcggctaccccgacgcctttgacatctggggacagggcacaatggtcaccgtttctagcctcgagggacagcctaaggccaatcctaccgtgacactgttccctccaagcagcgaagaactccaggccaacaaggccacacttgtgtgcctgatctccgacttctaccctggggctgtgacagtggcttggaaggccgatggatctcctgtgaaagccggcgtggaaaccaccaagccatccaagcagagcaacaacaaatacgccgccagctcctacctgagcctgacacctgagcagtggaagtcccacagatcctacagctgccaagtgacccacgaaggcagcaccgtggaaaagacagtggcccctacagagtgcagccccatcaagaccgatgtgattacaatggaccccaaggacaactgctccaaggacgccaacgataccctgctgctccagctgaccaacaccagcgcctactacatgtacttgttgctgctgctgaagtccgtggtgtacttcgccatcatcacatgctgcctgctgcggagaaccgccttctgctgcaacggcgagaagtctagggccaagcgatctggatctggagcaacaaacttctcactactcaaacaagcaggtgacgtggaggagaatcccgggcctactagtatggactggatttggcgcatccttttccttgtcggcgctgctaccggcgcgcattccgggccccagctccagctgcaagagtctggacctggcctggtcaagcctagcgagacactgagcctgacctgtaccgtgtccggcgatagcatcagcagcggcgattactactggggctggatcagacagcctcctggcaaaggactggaatggatcggccacatctactacagcggcgtgacctactacaaccccagcctgaagtccagagtgaccatcagcgtggacaccagccggaaccagttctccctgaagctgtctagcgtgacagccgccgataccgccgtgtactactgcaccagagaggacagcagcaactggcggagtagaggccagggaacactggtcacagttagctctggatccggcggaggcggaagtggaggcggaggatctggcggcggaggctctttcgaacaatctgctctgacacagcctgccagcgtgtcaggatctcctggacagagcatcaccatctcttgcaccggcaccagctctgatgtcggcggctacaattacgtgtcctggtatcagcagcaccccggcaaggcccctaaagtgattatcagcgaagtgaacaacagacccagcggcgtgtcccacagattcagcggctctaagtctggcaacaccgccagcctgacaatctctggactgcaagccgaggacgaggccgactacttctgtagcagctacaccagcggcagaaccctgtacgtgttcggcacaggcagcaaagtgacagtgctgggaacgcgtgcctctacaaagggaccctccgtgtttcctctggctcccagcagcaagtctacaagcggaggaacagccgctctgggctgcctggtcaaggattactttcccgagcctgtgaccgtgtcctggaatagcggagcactgacaagcggcgtgcacacctttccagccgtgctgcaaagcagcggcctgtactctctgagcagcgtggtcacagtgcctagctctagcctgggcacccagacctacatctgcaatgtgaaccacaagcctagcaacaccaaggtggacaagagagtggaacccaagagctgtgaagtgaaaaccgactccaccgaccacgtgaagcccaaagagacagagaacaccaagcagcccagcaagagctgccacaagcccaaggccatcgtgcacaccgagaaagtgaacatgatgagcctgaccgtgctgggcctgcggatgctgttcgccaaaaccgtggccgtgaacttcctgctgaccgccaagctgttcttcctc

SEQ ID NO: 3142 - DNA, 2787 bp, Artificial Sequence
  Synthetic Polynucloetide
atggccttaccagtgaccgccttgctcctgccgctggccttgctgctccacgccgccaggccggaagtgcagctggttgaatctggcggaggactggttcagcctggcggatctctgagactgtcttgtgccgccagcggcttcagcttcagcgacttttggatgagctgggtccgacaggcccctggcaaaggacttgaatgggtcgccacaatcagccaggccggcagcgagaaggactacgtggactctgtgaagggcagattcaccatcagccgggacaacgccaagaagtccctgtacctccagatgaacagcctgagagccgaggacaccgccgtgtactattgtgcctctggcgtgtacagcttcgactacagaggccagggcaccctggtcacagtctcttctggtaccggcggaggcggatctggcggcggaggtagcggtggcggaggatctgaattccaatctgctctgacacagcctgccagcgcctctggatctcctggacagagcgtgaccatctcctgtaccggcacctcttctgatgtcggcggctacaactacgtgtcctggtatcagcagcaccccggcaaggcccctaagctgatgatctacgacgtgtccaacagacccagcggcgtgtccaatagattctccggcagcaagagcggcaacaccgccagcctgacaatttctggactgcaagccgaggacgaggccgactactactgtagcagctacaccagcagcagcacactgtacgtgttcggcacaggcacccagctcacagttcttctcgagggacagcctaaggccaatcctaccgtgacactgttccctccaagcagcgaagaactccaggccaacaaggccacacttgtgtgcctgatctccgacttctaccctggggctgtgacagtggcttggaaggccgatggatctcctgtgaaagccggcgtggaaaccaccaagccatccaagcagagcaacaacaaatacgccgccagctcctacctgagcctgacacctgagcagtggaagtcccacagatcctacagctgccaagtgacccacgaaggcagcaccgtggaaaagacagtggcccctacagagtgcagccccatcaagaccgatgtgattacaatggaccccaaggacaactgctccaaggacgccaacgataccctgctgctccagctgaccaacaccagcgcctactacatgtacttgttgctgctgctgaagtccgtggtgtacttcgccatcatcacatgctgcctgctgcggagaaccgccttctgctgcaacggcgagaagtctagggccaagcgatctggatctggagcaacaaacttctcactactcaaacaagcaggtgacgtggaggagaatcccgggcctactagtatggactggatttggcgcatccttttccttgtcggcgctgctaccggcgcgcattccgggccccagctccagctgcaagagtctggacctggcctggtcaagcctagcgagacactgagcctgacctgtaccgtgtccggcgatagcatcagcagcggcgattactactggggctggatcagacagcctcctggcaaaggactggaatggatcggccacatctactacagcggcgtgacctactacaaccccagcctgaagtccagagtgaccatcagcgtggacaccagccggaaccagttctccctgaagctgtctagcgtgacagccgccgataccgccgtgtactactgcaccagagaggacagcagcaactggcggagtagaggccagggaacactggtcacagttagctctggatccggcggaggcggaagtggaggcggaggatctggcggcggaggctctttcgaagaagtgcagctccagcagtctggacctggcctggttaagcctagccagacactgagcctgacctgtgccatcagcggcgattccatgctgagcaacagcgacacctggaactggatcagacagagccccagcagaggcctggaatggctgggcagaacataccacagaagcacttggtacgacgactacgccagctctgtgcggggcagagtgtccatcaatgtggacaccagcaagaaccagtacagcctgcaactgaacgccgtgacacctgaggataccggcgtgtactactgtgccagagtgcggctccaggacggcaattcttggagcgacgcctttgatgtgtggggccagggcacaatggtcaccgtttctagcacgcgtgcctctacaaagggaccctccgtgtttcctctggctcccagcagcaagtctacaagcggaggaacagccgctctgggctgcctggtcaaggattactttcccgagcctgtgaccgtgtcctggaatagcggagcactgacaagcggcgtgcacacctttccagccgtgctgcaaagcagcggcctgtactctctgagcagcgtggtcacagtgcctagctctagcctgggcacccagacctacatctgcaatgtgaaccacaagcctagcaacaccaaggtggacaagagagtggaacccaagagctgtgaagtgaaaaccgactccaccgaccacgtgaagcccaaagagacagagaacaccaagcagcccagcaagagctgccacaagcccaaggccatcgtgcacaccgagaaagtgaacatgatgagcctgaccgtgctgggcctgcggatgctgttcgccaaaaccgtggccgtgaacttcctgctgaccgccaagctgttcttcctc

SEQ ID NO: 3143 - DNA, 2787 bp, Artificial Sequence
  Synthetic Polynucloetide
atggccttaccagtgaccgccttgctcctgccgctggccttgctgctccacgccgccaggccggaagtgcagctggttgaatctggcggaggactggttcagcctggcggatctctgagactgtcttgtgccgccagcggcttcagcttcagcgacttttggatgagctgggtccgacaggcccctggcaaaggacttgaatgggtcgccacaatcagccaggccggcagcgagaaggactacgtggactctgtgaagggcagattcaccatcagccgggacaacgccaagaagtccctgtacctccagatgaacagcctgagagccgaggacaccgccgtgtactattgtgcctctggcgtgtacagcttcgactacagaggccagggcaccctggtcacagtctcttctggtaccggcggaggcggatctggcggcggaggtagcggtggcggaggatctgaattcgacgtgatgctgacccagacaccactgagcctgcctgtgtctctgggcgatcaggccagcatctcctgtagaagcagccagagcatcctgcacagcaccggcgatacctacctggaatggtatctccagaagcctggacagagccccaagctgctgattaacaaggtgtccaaccggctgagcggcgtgcccgatagattttctggcagcggctctggcaccgacttcaccctgaagatcagcagagtggaagccgaggacctgggcgtgtactactgcttccaaggcagccatgttccttggacctttggcggaggcaccaagctggaaatcaagagagctgacgccgctcctaccgtgtccatctttcctctcgagggacagcctaaggccaatcctaccgtgacactgttccctccaagcagcgaagaactccaggccaacaaggccacacttgtgtgcctgatctccgacttctaccctggggctgtgacagtggcttggaaggccgatggatctcctgtgaaagccggcgtggaaaccaccaagccatccaagcagagcaacaacaaatacgccgccagctcctacctgagcctgacacctgagcagtggaagtcccacagatcctacagctgccaagtgacccacgaaggcagcaccgtggaaaagacagtggcccctacagagtgcagccccatcaagaccgatgtgattacaatggaccccaaggacaactgctccaaggacgccaacgataccctgctgctccagctgaccaacaccagcgcctactacatgtacttgttgctgctgctgaagtccgtggtgtacttcgccatcatcacatgctgcctgctgcggagaaccgccttctgctgcaacggcgagaagtctagggccaagcgatctggatctggagcaacaaacttctcactactcaaacaagcaggtgacgtggaggagaatcccgggcctactagtatggactggatttggcgcatccttttccttgtcggcgctgctaccggcgcgcattccgggccccagctccagctgcaagagtctggacctggcctggtcaagcctagcgagacactgagcctgacctgtaccgtgtccggcgatagcatcagcagcggcgattactactggggctggatcagacagcctcctggcaaaggactggaatggatcggccacatctactacagcggcgtgacctactacaaccccagcctgaagtccagagtgaccatcagcgtggacaccagccggaaccagttctccctgaagctgtctagcgtgacagccgccgataccgccgtgtactactgcaccagagaggacagcagcaactggcggagtagaggccagggaacactggtcacagttagctctggatccggcggaggcggaagtggaggcggaggatctggcggcggaggctctttcgaacaagtgaagctccagcagagcggccctagccttgtgaaacctggcgcttccgtgaagatgagctgcaaggccagcggctacaccttcaccgatttctacatgaaatgggtcaagcagagccacggcaagtctctggaatggatcggcgacatcaaccccaacatcggagacaccttctacaaccagaagttcaagggcaaagccacactgaccgtggacaagagcagcagcaccgcctacatgcagctcaacagcctgaccagcgaggacagcgccgtgtacttttgttccgtgggctacttcgacgtgtggggagccggaacaaccgtgacagtctcttctacgcgtgcctctacaaagggaccctccgtgtttcctctggctcccagcagcaagtctacaagcggaggaacagccgctctgggctgcctggtcaaggattactttcccgagcctgtgaccgtgtcctggaatagcggagcactgacaagcggcgtgcacacctttccagccgtgctgcaaagcagcggcctgtactctctgagcagcgtggtcacagtgcctagctctagcctgggcacccagacctacatctgcaatgtgaaccacaagcctagcaacaccaaggtggacaagagagtggaacccaagagctgtgaagtgaaaaccgactccaccgaccacgtgaagcccaaagagacagagaacaccaagcagcccagcaagagctgccacaagcccaaggccatcgtgcacaccgagaaagtgaacatgatgagcctgaccgtgctgggcctgcggatgctgttcgccaaaaccgtggccgtgaacttcctgctgaccgccaagctgttcttcctc

SEQ ID NO: 3144 - DNA, 2775 bp, Artificial Sequence
  Synthetic Polynucloetide
atggccttaccagtgaccgccttgctcctgccgctggccttgctgctccacgccgccaggccggaagtgcagctggttgaatctggcggaggactggttcagcctggcggatctctgagactgtcttgtgccgccagcggcttcagcttcagcgacttttggatgagctgggtccgacaggcccctggcaaaggacttgaatgggtcgccacaatcagccaggccggcagcgagaaggactacgtggactctgtgaagggcagattcaccatcagccgggacaacgccaagaagtccctgtacctccagatgaacagcctgagagccgaggacaccgccgtgtactattgtgcctctggcgtgtacagcttcgactacagaggccagggcaccctggtcacagtctcttctggtaccggcggaggcggatctggcggcggaggtagcggtggcggaggatctgaattcgagatcgtgctgacacagtctcccgccacactgtcactgtctccaggcgaaagagccacactgagctgtagagccagccagagcgtgtccatctacctggcctggtatcagcagaagcctggacaggctccccggctgctgatctacgatgccagcaatagagccacaggcatccccgccagattttctggctctggcagcggcaccgatttcaccctgaccataagcagcctggaacctgaggacttcgccgtgtactactgccagcagagaagcaactggcctcctttcacattcggccctggcaccaaggtggacatcaaactcgagggacagcctaaggccaatcctaccgtgacactgttccctccaagcagcgaagaactccaggccaacaaggccacacttgtgtgcctgatctccgacttctaccctggggctgtgacagtggcttggaaggccgatggatctcctgtgaaagccggcgtggaaaccaccaagccatccaagcagagcaacaacaaatacgccgccagctcctacctgagcctgacacctgagcagtggaagtcccacagatcctacagctgccaagtgacccacgaaggcagcaccgtggaaaagacagtggcccctacagagtgcagccccatcaagaccgatgtgattacaatggaccccaaggacaactgctccaaggacgccaacgataccctgctgctccagctgaccaacaccagcgcctactacatgtacttgttgctgctgctgaagtccgtggtgtacttcgccatcatcacatgctgcctgctgcggagaaccgccttctgctgcaacggcgagaagtctagggccaagcgatctggatctggagcaacaaacttctcactactcaaacaagcaggtgacgtggaggagaatcccgggcctactagtatggactggatttggcgcatccttttccttgtcggcgctgctaccggcgcgcattccgggccccagctccagctgcaagagtctggacctggcctggtcaagcctagcgagacactgagcctgacctgtaccgtgtccggcgatagcatcagcagcggcgattactactggggctggatcagacagcctcctggcaaaggactggaatggatcggccacatctactacagcggcgtgacctactacaaccccagcctgaagtccagagtgaccatcagcgtggacaccagccggaaccagttctccctgaagctgtctagcgtgacagccgccgataccgccgtgtactactgcaccagagaggacagcagcaactggcggagtagaggccagggaacactggtcacagttagctctggatccggcggaggcggaagtggaggcggaggatctggcggcggaggctctttcgaacaggtgcagcttgttgaaagcggaggcggagttgtgcagcctggcagaagtctgagactgtcttgtgccgccagcggcttcaccttcagcagctatggaatgcactgggtccgacaggcccctggcaaaggacttgaatgggttgccgtgatctgggacgacggcagcaacaagtattacgtggacagcgtgaagggcagattcaccatcagccgggacaacagcaagaacaccctgtacctccagatgaacagcctgagagccgaggacacagccgtgtattattgcgccagagatgactactacggcagcggctccttcaacagctactatggcacagacgtgtggggccagggcacaacagttaccgttagctctacgcgtgcctctacaaagggaccctccgtgtttcctctggctcccagcagcaagtctacaagcggaggaacagccgctctgggctgcctggtcaaggattactttcccgagcctgtgaccgtgtcctggaatagcggagcactgacaagcggcgtgcacacctttccagccgtgctgcaaagcagcggcctgtactctctgagcagcgtggtcacagtgcctagctctagcctgggcacccagacctacatctgcaatgtgaaccacaagcctagcaacaccaaggtggacaagagagtggaacccaagagctgtgaagtgaaaaccgactccaccgaccacgtgaagcccaaagagacagagaacaccaagcagcccagcaagagctgccacaagcccaaggccatcgtgcacaccgagaaagtgaacatgatgagcctgaccgtgctgggcctgcggatgctgttcgccaaaaccgtggccgtgaacttcctgctgaccgccaagctgttcttcctc

SEQ ID NO: 3145 - DNA, 2730 bp, Artificial Sequence
  Synthetic Polynucloetide
atggccttaccagtgaccgccttgctcctgccgctggccttgctgctccacgccgccaggccggaagtgcagctggttgaatctggcggaggactggttcagcctggcggatctctgagactgtcttgtgccgccagcggcttcagcttcagcgacttttggatgagctgggtccgacaggcccctggcaaaggacttgaatgggtcgccacaatcagccaggccggcagcgagaaggactacgtggactctgtgaagggcagattcaccatcagccgggacaacgccaagaagtccctgtacctccagatgaacagcctgagagccgaggacaccgccgtgtactattgtgcctctggcgtgtacagcttcgactacagaggccagggcaccctggtcacagtctcttctggtaccggcggaggcggatctggcggcggaggtagcggtggcggaggatctgaattcgacatccagatgacacagagccctagcagcctgtctgccagcgtgggagacagagtgaccatcacctgtagagccagccagggcatctcttcttggctggcctggtatcagcagaagcccgagaaggcccctaagagcctgatctatgccgccagctctctccagagcggagtgcctagcagattttctggcagcggctccggcaccgatttcaccctgacaatatccagcctccagcctgaggacttcgccacctactactgccagcagtacaacagctacccctacaccttcggccagggcaccaagctggaaatcaaactcgagggacagcctaaggccaatcctaccgtgacactgttccctccaagcagcgaagaactccaggccaacaaggccacacttgtgtgcctgatctccgacttctaccctggggctgtgacagtggcttggaaggccgatggatctcctgtgaaagccggcgtggaaaccaccaagccatccaagcagagcaacaacaaatacgccgccagctcctacctgagcctgacacctgagcagtggaagtcccacagatcctacagctgccaagtgacccacgaaggcagcaccgtggaaaagacagtggcccctacagagtgcagccccatcaagaccgatgtgattacaatggaccccaaggacaactgctccaaggacgccaacgataccctgctgctccagctgaccaacaccagcgcctactacatgtacttgttgctgctgctgaagtccgtggtgtacttcgccatcatcacatgctgcctgctgcggagaaccgccttctgctgcaacggcgagaagtctagggccaagcgatctggatctggagcaacaaacttctcactactcaaacaagcaggtgacgtggaggagaatcccgggcctactagtatggactggatttggcgcatccttttccttgtcggcgctgctaccggcgcgcattccgggccccagctccagctgcaagagtctggacctggcctggtcaagcctagcgagacactgagcctgacctgtaccgtgtccggcgatagcatcagcagcggcgattactactggggctggatcagacagcctcctggcaaaggactggaatggatcggccacatctactacagcggcgtgacctactacaaccccagcctgaagtccagagtgaccatcagcgtggacaccagccggaaccagttctccctgaagctgtctagcgtgacagccgccgataccgccgtgtactactgcaccagagaggacagcagcaactggcggagtagaggccagggaacactggtcacagttagctctggatccggcggaggcggaagtggaggcggaggatctggcggcggaggctctttcgaagaagtgcaactggttcaatctggcggcggactggttcatccaggcggttctctgagactgagctgtgccggctctggcttcaccttcagcacctacctgatgtactgggtccgacaggcccctggcaagacactggaatgggtgtccgctattggcagcggaggcgatacctactacgccgactctgtgaagggcagattcaccatcagccgggacaacgccaagaacagcctgtacctccagatgaactccctgagagccgaggacatggccgtgtactactgtgccagaggactcggctattggggccagggaacactggtcacagtgtcctctacgcgtgcctctacaaagggaccctccgtgtttcctctggctcccagcagcaagtctacaagcggaggaacagccgctctgggctgcctggtcaaggattactttcccgagcctgtgaccgtgtcctggaatagcggagcactgacaagcggcgtgcacacctttccagccgtgctgcaaagcagcggcctgtactctctgagcagcgtggtcacagtgcctagctctagcctgggcacccagacctacatctgcaatgtgaaccacaagcctagcaacaccaaggtggacaagagagtggaacccaagagctgtgaagtgaaaaccgactccaccgaccacgtgaagcccaaagagacagagaacaccaagcagcccagcaagagctgccacaagcccaaggccatcgtgcacaccgagaaagtgaacatgatgagcctgaccgtgctgggcctgcggatgctgttcgccaaaaccgtggccgtgaacttcctgctgaccgccaagctgttcttcctc

SEQ ID NO: 3146 - DNA, 2787 bp, Artificial Sequence
  Synthetic Polynucloetide
atggccttaccagtgaccgccttgctcctgccgctggccttgctgctccacgccgccaggccggaagtgcagctggttgaatctggcggaggactggttcagcctggcggatctctgagactgtcttgtgccgccagcggcttcagcttcagcgacttttggatgagctgggtccgacaggcccctggcaaaggacttgaatgggtcgccacaatcagccaggccggcagcgagaaggactacgtggactctgtgaagggcagattcaccatcagccgggacaacgccaagaagtccctgtacctccagatgaacagcctgagagccgaggacaccgccgtgtactattgtgcctctggcgtgtacagcttcgactacagaggccagggcaccctggtcacagtctcttctggtaccggcggaggcggatctggcggcggaggtagcggtggcggaggatctgaattcctgcctgttctgacacagcctccatccgtgtctgtggcccctggaaagaccgccagaatcacatgcggcggcaacaacatcggcagcaagagcgtgcactggtatcagcagaagcctggacaggctcctgtgctggtggtgtacgacgacagcgatagacctagcggcatccccgagagattcagcggcagcaattccggcaataccgccacactgaccatcagcagagtggaagctggcgacgaggccgactactactgccaagtgtgggacagcagcagcgactacgtggtgtttggcggcggaacaaagctgacagtgcttctcgagggacagcctaaggccaatcctaccgtgacactgttccctccaagcagcgaagaactccaggccaacaaggccacacttgtgtgcctgatctccgacttctaccctggggctgtgacagtggcttggaaggccgatggatctcctgtgaaagccggcgtggaaaccaccaagccatccaagcagagcaacaacaaatacgccgccagctcctacctgagcctgacacctgagcagtggaagtcccacagatcctacagctgccaagtgacccacgaaggcagcaccgtggaaaagacagtggcccctacagagtgcagccccatcaagaccgatgtgattacaatggaccccaaggacaactgctccaaggacgccaacgataccctgctgctccagctgaccaacaccagcgcctactacatgtacttgttgctgctgctgaagtccgtggtgtacttcgccatcatcacatgctgcctgctgcggagaaccgccttctgctgcaacggcgagaagtctagggccaagcgatctggatctggagcaacaaacttctcactactcaaacaagcaggtgacgtggaggagaatcccgggcctactagtatggactggatttggcgcatccttttccttgtcggcgctgctaccggcgcgcattccgggccccagctccagctgcaagagtctggacctggcctggtcaagcctagcgagacactgagcctgacctgtaccgtgtccggcgatagcatcagcagcggcgattactactggggctggatcagacagcctcctggcaaaggactggaatggatcggccacatctactacagcggcgtgacctactacaaccccagcctgaagtccagagtgaccatcagcgtggacaccagccggaaccagttctccctgaagctgtctagcgtgacagccgccgataccgccgtgtactactgcaccagagaggacagcagcaactggcggagtagaggccagggaacactggtcacagttagctctggatccggcggaggcggaagtggaggcggaggatctggcggcggaggctctttcgaagaagttcaactggtgcagagcggagccgaagtgaagaagccaggcgagagcctgaagattagctgcaaaggcagcggctacagcttcaccagctactggatcggctgggtccgacagatgcctggcaaaggactggaatggatgggcatcatctaccccggcgacagcgacaccagatacagccctagctttcagggccaagtgaccatctccgccgacaagagcatcagcacagcctacctccagtggtcctctctgaaggccagcgataccgccatgtactactgcgccagacaagtctggggatggcaaggcggcatgtaccccaggtctaactggtggtacaacctggactcttggggccagggcacactggtcacagtctcttctacgcgtgcctctacaaagggaccctccgtgtttcctctggctcccagcagcaagtctacaagcggaggaacagccgctctgggctgcctggtcaaggattactttcccgagcctgtgaccgtgtcctggaatagcggagcactgacaagcggcgtgcacacctttccagccgtgctgcaaagcagcggcctgtactctctgagcagcgtggtcacagtgcctagctctagcctgggcacccagacctacatctgcaatgtgaaccacaagcctagcaacaccaaggtggacaagagagtggaacccaagagctgtgaagtgaaaaccgactccaccgaccacgtgaagcccaaagagacagagaacaccaagcagcccagcaagagctgccacaagcccaaggccatcgtgcacaccgagaaagtgaacatgatgagcctgaccgtgctgggcctgcggatgctgttcgccaaaaccgtggccgtgaacttcctgctgaccgccaagctgttcttcctc

SEQ ID NO: 3147 - DNA, 2766 bp, Artificial Sequence
  Synthetic Polynucloetide
atggccttaccagtgaccgccttgctcctgccgctggccttgctgctccacgccgccaggccggaagtgcagctggttgaatctggcggaggactggttcagcctggcggatctctgagactgtcttgtgccgccagcggcttcagcttcagcgacttttggatgagctgggtccgacaggcccctggcaaaggacttgaatgggtcgccacaatcagccaggccggcagcgagaaggactacgtggactctgtgaagggcagattcaccatcagccgggacaacgccaagaagtccctgtacctccagatgaacagcctgagagccgaggacaccgccgtgtactattgtgcctctggcgtgtacagcttcgactacagaggccagggcaccctggtcacagtctcttctggtaccggcggaggcggatctggcggcggaggtagcggtggcggaggatctgaattcgagctggtcatgacacagagccctgcttctctggccgtgtcactgggacagagagccaccatctcttgcagagccagcgagagcgtggacagctacggcaagagcttcatgcactggtatcagctcaagcccggccagcctcctaagctgctgatctacagagcctccaacctggaaagcggcgtgccagccagattttctggcagcggcagcagaaccgacttcaccctgaccattgatcccgtggaagccgatgatgccgccacctactactgccagcagaacaacgaggacccctggacatttggcggaggcaccaagctggaaatcaaactcgagggacagcctaaggccaatcctaccgtgacactgttccctccaagcagcgaagaactccaggccaacaaggccacacttgtgtgcctgatctccgacttctaccctggggctgtgacagtggcttggaaggccgatggatctcctgtgaaagccggcgtggaaaccaccaagccatccaagcagagcaacaacaaatacgccgccagctcctacctgagcctgacacctgagcagtggaagtcccacagatcctacagctgccaagtgacccacgaaggcagcaccgtggaaaagacagtggcccctacagagtgcagccccatcaagaccgatgtgattacaatggaccccaaggacaactgctccaaggacgccaacgataccctgctgctccagctgaccaacaccagcgcctactacatgtacttgttgctgctgctgaagtccgtggtgtacttcgccatcatcacatgctgcctgctgcggagaaccgccttctgctgcaacggcgagaagtctagggccaagcgatctggatctggagcaacaaacttctcactactcaaacaagcaggtgacgtggaggagaatcccgggcctactagtatggactggatttggcgcatccttttccttgtcggcgctgctaccggcgcgcattccgggccccagctccagctgcaagagtctggacctggcctggtcaagcctagcgagacactgagcctgacctgtaccgtgtccggcgatagcatcagcagcggcgattactactggggctggatcagacagcctcctggcaaaggactggaatggatcggccacatctactacagcggcgtgacctactacaaccccagcctgaagtccagagtgaccatcagcgtggacaccagccggaaccagttctccctgaagctgtctagcgtgacagccgccgataccgccgtgtactactgcaccagagaggacagcagcaactggcggagtagaggccagggaacactggtcacagttagctctggatccggcggaggcggaagtggaggcggaggatctggcggcggaggctctttcgaagaagtgcagctcgaacagtctggccccgagcttgtgaaacctggcgcttccgtgaagatgagctgcaaggccagcggctacaccttcaccaactactacatgaaatgggtcaagcagagccacggcaagtccctggaatggatcggcgatctgaaccccaacaacggcgacaccttctacaaccagaagttcaagggcaaagccacactgaccgtggacaagagcagcaacaccgcctacatgcagctcaactccctgaccagcgaggacagcgccgtgtactactgtgccagaaccggcagatacgaagagaacgctatggactactggggccagggcacaagcgtgacagtctcttctacgcgtgcctctacaaagggaccctccgtgtttcctctggctcccagcagcaagtctacaagcggaggaacagccgctctgggctgcctggtcaaggattactttcccgagcctgtgaccgtgtcctggaatagcggagcactgacaagcggcgtgcacacctttccagccgtgctgcaaagcagcggcctgtactctctgagcagcgtggtcacagtgcctagctctagcctgggcacccagacctacatctgcaatgtgaaccacaagcctagcaacaccaaggtggacaagagagtggaacccaagagctgtgaagtgaaaaccgactccaccgaccacgtgaagcccaaagagacagagaacaccaagcagcccagcaagagctgccacaagcccaaggccatcgtgcacaccgagaaagtgaacatgatgagcctgaccgtgctgggcctgcggatgctgttcgccaaaaccgtggccgtgaacttcctgctgaccgccaagctgttcttcctc

SEQ ID NO: 3148 - DNA, 2748 bp, Artificial Sequence
  Synthetic Polynucloetide
atggccttaccagtgaccgccttgctcctgccgctggccttgctgctccacgccgccaggccggaagtgcagctggttgaatctggcggaggactggttcagcctggcggatctctgagactgtcttgtgccgccagcggcttcagcttcagcgacttttggatgagctgggtccgacaggcccctggcaaaggacttgaatgggtcgccacaatcagccaggccggcagcgagaaggactacgtggactctgtgaagggcagattcaccatcagccgggacaacgccaagaagtccctgtacctccagatgaacagcctgagagccgaggacaccgccgtgtactattgtgcctctggcgtgtacagcttcgactacagaggccagggcaccctggtcacagtctcttctggtaccggcggaggcggatctggcggcggaggtagcggtggcggaggatctgaattcgacgtggtcatgacacagagcccttctagcctgtctgccagcgtgggcgacagagtgaccatcacctgtatggcctccgaggacatctacatccggctggcctggtatcagcagaagcctggaaacgcccctaagctgctgatctacgccgccacctctctggaaacaggcgtgccaagcagattttccggcagcggctctggcaccgatttcaccctgacaatatccagcctccagcctgaggacttcgccacctactactgccagcagtattggagcagcccctggacatttggcggaggcaccaaggtggaaatcaaactcgagggacagcctaaggccaatcctaccgtgacactgttccctccaagcagcgaagaactccaggccaacaaggccacacttgtgtgcctgatctccgacttctaccctggggctgtgacagtggcttggaaggccgatggatctcctgtgaaagccggcgtggaaaccaccaagccatccaagcagagcaacaacaaatacgccgccagctcctacctgagcctgacacctgagcagtggaagtcccacagatcctacagctgccaagtgacccacgaaggcagcaccgtggaaaagacagtggcccctacagagtgcagccccatcaagaccgatgtgattacaatggaccccaaggacaactgctccaaggacgccaacgataccctgctgctccagctgaccaacaccagcgcctactacatgtacttgttgctgctgctgaagtccgtggtgtacttcgccatcatcacatgctgcctgctgcggagaaccgccttctgctgcaacggcgagaagtctagggccaagcgatctggatctggagcaacaaacttctcactactcaaacaagcaggtgacgtggaggagaatcccgggcctactagtatggactggatttggcgcatccttttccttgtcggcgctgctaccggcgcgcattccgggccccagctccagctgcaagagtctggacctggcctggtcaagcctagcgagacactgagcctgacctgtaccgtgtccggcgatagcatcagcagcggcgattactactggggctggatcagacagcctcctggcaaaggactggaatggatcggccacatctactacagcggcgtgacctactacaaccccagcctgaagtccagagtgaccatcagcgtggacaccagccggaaccagttctccctgaagctgtctagcgtgacagccgccgataccgccgtgtactactgcaccagagaggacagcagcaactggcggagtagaggccagggaacactggtcacagttagctctggatccggcggaggcggaagtggaggcggaggatctggcggcggaggctctttcgaacaggttcagctgcaagagtctggccccggactggtcaagcctagccaaacactgagcctgacctgtaccgtgtccggctacagcatcaccagcgactacacctggaactggatcagacagcctcctggcaacggactggaatggatcggctacatcacctacagcggcagcaccagctacaaccccagcctgaaaagccgggtgctgatctccgtggacaccagcaagaatcaggtgtccctgaagctgagcagcgtgacagccgctgataccgccgtgtactactgtgccagactggggagaagatacacaatggactactggggccagggcaccaccgtgacagtttcttctacgcgtgcctctacaaagggaccctccgtgtttcctctggctcccagcagcaagtctacaagcggaggaacagccgctctgggctgcctggtcaaggattactttcccgagcctgtgaccgtgtcctggaatagcggagcactgacaagcggcgtgcacacctttccagccgtgctgcaaagcagcggcctgtactctctgagcagcgtggtcacagtgcctagctctagcctgggcacccagacctacatctgcaatgtgaaccacaagcctagcaacaccaaggtggacaagagagtggaacccaagagctgtgaagtgaaaaccgactccaccgaccacgtgaagcccaaagagacagagaacaccaagcagcccagcaagagctgccacaagcccaaggccatcgtgcacaccgagaaagtgaacatgatgagcctgaccgtgctgggcctgcggatgctgttcgccaaaaccgtggccgtgaacttcctgctgaccgccaagctgttcttcctc

SEQ ID NO: 3149 - DNA, 2760 bp, Artificial Sequence
  Synthetic Polynucloetide
atggccttaccagtgaccgccttgctcctgccgctggccttgctgctccacgccgccaggccggaagtgcagctggttgaatctggcggaggactggttcagcctggcggatctctgagactgtcttgtgccgccagcggcttcagcttcagcgacttttggatgagctgggtccgacaggcccctggcaaaggacttgaatgggtcgccacaatcagccaggccggcagcgagaaggactacgtggactctgtgaagggcagattcaccatcagccgggacaacgccaagaagtccctgtacctccagatgaacagcctgagagccgaggacaccgccgtgtactattgtgcctctggcgtgtacagcttcgactacagaggccagggcaccctggtcacagtctcttctggtaccggcggaggcggatctggcggcggaggtagcggtggcggaggatctgaattcgatattgtgctgactcagagccctgccactctgagccttagtccaggcgacagagctaccatctcctgtagggcctctgaatccgtgaccattctgggctctcatctcatatattggtatcaacaaaagccgggccagcctccacggctgctcattcaactggcctctaacgtgcagaccggcgtgccagctagattttctggctctggctcccggaccgactttacactgacaatcagctccgtggaacccgaagattttgccgtctattattgcctccagtccaggaccattcctcggacattcggccagggaacaaaactcgaaatcaagcggctcgagggacagcctaaggccaatcctaccgtgacactgttccctccaagcagcgaagaactccaggccaacaaggccacacttgtgtgcctgatctccgacttctaccctggggctgtgacagtggcttggaaggccgatggatctcctgtgaaagccggcgtggaaaccaccaagccatccaagcagagcaacaacaaatacgccgccagctcctacctgagcctgacacctgagcagtggaagtcccacagatcctacagctgccaagtgacccacgaaggcagcaccgtggaaaagacagtggcccctacagagtgcagccccatcaagaccgatgtgattacaatggaccccaaggacaactgctccaaggacgccaacgataccctgctgctccagctgaccaacaccagcgcctactacatgtacttgttgctgctgctgaagtccgtggtgtacttcgccatcatcacatgctgcctgctgcggagaaccgccttctgctgcaacggcgagaagtctagggccaagcgatctggatctggagcaacaaacttctcactactcaaacaagcaggtgacgtggaggagaatcccgggcctactagtatggactggatttggcgcatccttttccttgtcggcgctgctaccggcgcgcattccgggccccagctccagctgcaagagtctggacctggcctggtcaagcctagcgagacactgagcctgacctgtaccgtgtccggcgatagcatcagcagcggcgattactactggggctggatcagacagcctcctggcaaaggactggaatggatcggccacatctactacagcggcgtgacctactacaaccccagcctgaagtccagagtgaccatcagcgtggacaccagccggaaccagttctccctgaagctgtctagcgtgacagccgccgataccgccgtgtactactgcaccagagaggacagcagcaactggcggagtagaggccagggaacactggtcacagttagctctggatccggcggaggcggaagtggaggcggaggatctggcggcggaggctctttcgaacaggtgcagctcgttcagagtggccccgaagtgaaaaagccaggcgagtccgtgaagatttcctgcaaagcctccggctacacattccggcactactctatgaattgggtcaagcaggccccaggccagggccttaagtggatgggacgcatcaataccgagtccggcgtgccaatctacgccgatgacttcaaaggccggttcagcttcaccgtggatacctctgcctccaccgcctacctggaaatcagcagcctgaccagcgaggatacagctgtgtacttctgtagcaacgattacctctacagcctggatttctggggacagggaaccacactgaccgtgtctagcacgcgtgcctctacaaagggaccctccgtgtttcctctggctcccagcagcaagtctacaagcggaggaacagccgctctgggctgcctggtcaaggattactttcccgagcctgtgaccgtgtcctggaatagcggagcactgacaagcggcgtgcacacctttccagccgtgctgcaaagcagcggcctgtactctctgagcagcgtggtcacagtgcctagctctagcctgggcacccagacctacatctgcaatgtgaaccacaagcctagcaacaccaaggtggacaagagagtggaacccaagagctgtgaagtgaaaaccgactccaccgaccacgtgaagcccaaagagacagagaacaccaagcagcccagcaagagctgccacaagcccaaggccatcgtgcacaccgagaaagtgaacatgatgagcctgaccgtgctgggcctgcggatgctgttcgccaaaaccgtggccgtgaacttcctgctgaccgccaagctgttcttcctc

SEQ ID NO: 3150 - DNA, 2760 bp, Artificial Sequence
  Synthetic Polynucloetide
atggccttaccagtgaccgccttgctcctgccgctggccttgctgctccacgccgccaggccggaagtgcagctggttgaatctggcggaggactggttcagcctggcggatctctgagactgtcttgtgccgccagcggcttcagcttcagcgacttttggatgagctgggtccgacaggcccctggcaaaggacttgaatgggtcgccacaatcagccaggccggcagcgagaaggactacgtggactctgtgaagggcagattcaccatcagccgggacaacgccaagaagtccctgtacctccagatgaacagcctgagagccgaggacaccgccgtgtactattgtgcctctggcgtgtacagcttcgactacagaggccagggcaccctggtcacagtctcttctggtaccggcggaggcggatctggcggcggaggtagcggtggcggaggatctgaattcgacatcgtgctgacacagtctcccgccacactgtcactgagccctggcgatagagccacactgagctgtagagccagcgagagcgtgacaatcctgggcagccacctgatctactggtatcagcagaagcccggacaggcccctagactgctgattcagctcgccagcaatgtgcagacaggcatccctgccagattttccggcagcggcagcagaaccgatttcaccctgaccataagcagcctggaacctgaggacttcgccgtgtactactgcctccagagccggacaatccccagaacctttggacagggcaccaagctggaaatcaagagactcgagggacagcctaaggccaatcctaccgtgacactgttccctccaagcagcgaagaactccaggccaacaaggccacacttgtgtgcctgatctccgacttctaccctggggctgtgacagtggcttggaaggccgatggatctcctgtgaaagccggcgtggaaaccaccaagccatccaagcagagcaacaacaaatacgccgccagctcctacctgagcctgacacctgagcagtggaagtcccacagatcctacagctgccaagtgacccacgaaggcagcaccgtggaaaagacagtggcccctacagagtgcagccccatcaagaccgatgtgattacaatggaccccaaggacaactgctccaaggacgccaacgataccctgctgctccagctgaccaacaccagcgcctactacatgtacttgttgctgctgctgaagtccgtggtgtacttcgccatcatcacatgctgcctgctgcggagaaccgccttctgctgcaacggcgagaagtctagggccaagcgatctggatctggagcaacaaacttctcactactcaaacaagcaggtgacgtggaggagaatcccgggcctactagtatggactggatttggcgcatccttttccttgtcggcgctgctaccggcgcgcattccgggccccagctccagctgcaagagtctggacctggcctggtcaagcctagcgagacactgagcctgacctgtaccgtgtccggcgatagcatcagcagcggcgattactactggggctggatcagacagcctcctggcaaaggactggaatggatcggccacatctactacagcggcgtgacctactacaaccccagcctgaagtccagagtgaccatcagcgtggacaccagccggaaccagttctccctgaagctgtctagcgtgacagccgccgataccgccgtgtactactgcaccagagaggacagcagcaactggcggagtagaggccagggaacactggtcacagttagctctggatccggcggaggcggaagtggaggcggaggatctggcggcggaggctctttcgaacaggttcagctggtgcagtctggcagcgagctgaagaaacctggcgagagcgtgaagatcagctgcaaggccagcggctacaccttcacacactacagcatgaactgggtccgacaggcccctggacaaggactggaatggatgggcagaatcaacaccgagacaggcgagcccctgtacgccgacgatttcaagggcagattcgtgttcagcctggacaccagcgccagcacagcctatctccagatcagctctctgaaggccgaggacaccgccgtgtactactgctccaacgactacctgtactccctggactattggggccagggcacactggtcacagtgtctagtacgcgtgcctctacaaagggaccctccgtgtttcctctggctcccagcagcaagtctacaagcggaggaacagccgctctgggctgcctggtcaaggattactttcccgagcctgtgaccgtgtcctggaatagcggagcactgacaagcggcgtgcacacctttccagccgtgctgcaaagcagcggcctgtactctctgagcagcgtggtcacagtgcctagctctagcctgggcacccagacctacatctgcaatgtgaaccacaagcctagcaacaccaaggtggacaagagagtggaacccaagagctgtgaagtgaaaaccgactccaccgaccacgtgaagcccaaagagacagagaacaccaagcagcccagcaagagctgccacaagcccaaggccatcgtgcacaccgagaaagtgaacatgatgagcctgaccgtgctgggcctgcggatgctgttcgccaaaaccgtggccgtgaacttcctgctgaccgccaagctgttcttcctc

SEQ ID NO: 3151 - DNA, 2763 bp, Artificial Sequence
  Synthetic Polynucloetide
atggccttaccagtgaccgccttgctcctgccgctggccttgctgctccacgccgccaggccggaagtgcagctggttgaatctggcggaggactggttcagcctggcggatctctgagactgtcttgtgccgccagcggcttcagcttcagcgacttttggatgagctgggtccgacaggcccctggcaaaggacttgaatgggtcgccacaatcagccaggccggcagcgagaaggactacgtggactctgtgaagggcagattcaccatcagccgggacaacgccaagaagtccctgtacctccagatgaacagcctgagagccgaggacaccgccgtgtactattgtgcctctggcgtgtacagcttcgactacagaggccagggcaccctggtcacagtctcttctggtaccggcggaggcggatctggcggcggaggtagcggtggcggaggatctgaattcgacatccagctgactcagagccctagctttctgagcgccagcgtgggcgacagagtgaccattacatgtagagccagccagggcatcagcaccgacctgaactggtatcagcagaagcctggcaaggcccctaagctgctgatctacgccgccagcaatctggaaagcggcgtgccaagcagattttccggctctggcagcggcaccgagttcaccctgacaatatctagcctccagcctgaggacttcgccacctactactgccagcagagctacaactggccctacacctttggcggaggcaccaaggtggaaatcaagagactcgagggacagcctaaggccaatcctaccgtgacactgttccctccaagcagcgaagaactccaggccaacaaggccacacttgtgtgcctgatctccgacttctaccctggggctgtgacagtggcttggaaggccgatggatctcctgtgaaagccggcgtggaaaccaccaagccatccaagcagagcaacaacaaatacgccgccagctcctacctgagcctgacacctgagcagtggaagtcccacagatcctacagctgccaagtgacccacgaaggcagcaccgtggaaaagacagtggcccctacagagtgcagccccatcaagaccgatgtgattacaatggaccccaaggacaactgctccaaggacgccaacgataccctgctgctccagctgaccaacaccagcgcctactacatgtacttgttgctgctgctgaagtccgtggtgtacttcgccatcatcacatgctgcctgctgcggagaaccgccttctgctgcaacggcgagaagtctagggccaagcgatctggatctggagcaacaaacttctcactactcaaacaagcaggtgacgtggaggagaatcccgggcctactagtatggactggatttggcgcatccttttccttgtcggcgctgctaccggcgcgcattccgggccccagctccagctgcaagagtctggacctggcctggtcaagcctagcgagacactgagcctgacctgtaccgtgtccggcgatagcatcagcagcggcgattactactggggctggatcagacagcctcctggcaaaggactggaatggatcggccacatctactacagcggcgtgacctactacaaccccagcctgaagtccagagtgaccatcagcgtggacaccagccggaaccagttctccctgaagctgtctagcgtgacagccgccgataccgccgtgtactactgcaccagagaggacagcagcaactggcggagtagaggccagggaacactggtcacagttagctctggatccggcggaggcggaagtggaggcggaggatctggcggcggaggctctttcgaagaagttcagctggttgaatcaggcggaggactcgtgaaacctggcggctctctgagactgtcttgtgccgccagcggcttcaccttcagcaacttcgagatgaactgggtccgacaggccccaggcaaaggactggaatgggtgtccggcatcagctccaatggccggtacatcaactacgccgacagcgtgaagggcagattcaccatcagccgggacaacgccaagaacagcctgtacctccagatgaactccctgagagccgaggacaccgccgtgtactattgtgccagagtggtggacttcgaccaggactacaacggcttcgactattggggccagggcaccctggttaccgttagctctacgcgtgcctctacaaagggaccctccgtgtttcctctggctcccagcagcaagtctacaagcggaggaacagccgctctgggctgcctggtcaaggattactttcccgagcctgtgaccgtgtcctggaatagcggagcactgacaagcggcgtgcacacctttccagccgtgctgcaaagcagcggcctgtactctctgagcagcgtggtcacagtgcctagctctagcctgggcacccagacctacatctgcaatgtgaaccacaagcctagcaacaccaaggtggacaagagagtggaacccaagagctgtgaagtgaaaaccgactccaccgaccacgtgaagcccaaagagacagagaacaccaagcagcccagcaagagctgccacaagcccaaggccatcgtgcacaccgagaaagtgaacatgatgagcctgaccgtgctgggcctgcggatgctgttcgccaaaaccgtggccgtgaacttcctgctgaccgccaagctgttcttcctc

SEQ ID NO: 3152 - DNA, 2757 bp, Artificial Sequence
  Synthetic Polynucloetide
atggccttaccagtgaccgccttgctcctgccgctggccttgctgctccacgccgccaggccggaagtgcagctggttgaatctggcggaggactggttcagcctggcggatctctgagactgtcttgtgccgccagcggcttcagcttcagcgacttttggatgagctgggtccgacaggcccctggcaaaggacttgaatgggtcgccacaatcagccaggccggcagcgagaaggactacgtggactctgtgaagggcagattcaccatcagccgggacaacgccaagaagtccctgtacctccagatgaacagcctgagagccgaggacaccgccgtgtactattgtgcctctggcgtgtacagcttcgactacagaggccagggcaccctggtcacagtctcttctggtaccggcggaggcggatctggcggcggaggtagcggtggcggaggatctgaattcgacatccaactgactcagagccccagctttctgagcgcctctgtgggcgacagagtgaccatcacatgtagtctcagcctgggcatcagcacatggcgggattggtttccgccgaggcttggcaggggccttgagccgctgacctacgccgccagcacactgcaaagcggagtgcctagcagattttccggcagcggctctggcaccgagttcaccctgacaatatccagcctccagcctgaggacttcgccacctactactgccagcagctcaacagctaccctctgacctttggcggaggcaccaaggtggaaatcaagagactcgagggacagcctaaggccaatcctaccgtgacactgttccctccaagcagcgaagaactccaggccaacaaggccacacttgtgtgcctgatctccgacttctaccctggggctgtgacagtggcttggaaggccgatggatctcctgtgaaagccggcgtggaaaccaccaagccatccaagcagagcaacaacaaatacgccgccagctcctacctgagcctgacacctgagcagtggaagtcccacagatcctacagctgccaagtgacccacgaaggcagcaccgtggaaaagacagtggcccctacagagtgcagccccatcaagaccgatgtgattacaatggaccccaaggacaactgctccaaggacgccaacgataccctgctgctccagctgaccaacaccagcgcctactacatgtacttgttgctgctgctgaagtccgtggtgtacttcgccatcatcacatgctgcctgctgcggagaaccgccttctgctgcaacggcgagaagtctagggccaagcgatctggatctggagcaacaaacttctcactactcaaacaagcaggtgacgtggaggagaatcccgggcctactagtatggactggatttggcgcatccttttccttgtcggcgctgctaccggcgcgcattccgggccccagctccagctgcaagagtctggacctggcctggtcaagcctagcgagacactgagcctgacctgtaccgtgtccggcgatagcatcagcagcggcgattactactggggctggatcagacagcctcctggcaaaggactggaatggatcggccacatctactacagcggcgtgacctactacaaccccagcctgaagtccagagtgaccatcagcgtggacaccagccggaaccagttctccctgaagctgtctagcgtgacagccgccgataccgccgtgtactactgcaccagagaggacagcagcaactggcggagtagaggccagggaacactggtcacagttagctctggatccggcggaggcggaagtggaggcggaggatctggcggcggaggctctttcgaagaagttcaactggttgagtctggtggcggcctggttaagcctggcggatctctgagactgagctgtgccgccagcggcttcacctttagcacatacggcatgagctgggtccgacaggcccctggaaaaggacttgagtgggtcgcctacatcaacaacggctccggctacatctactacgccgacagcgtgaagggcagattcaccatcagccgggacaacgccaagaacagcctgtacctccagatgaactccctgagagccgaggacaccgccgtgtactattgtgccagaggacagtggtggagcggcggagactttgattattggggccagggcaccctggtcaccgtttcttctacgcgtgcctctacaaagggaccctccgtgtttcctctggctcccagcagcaagtctacaagcggaggaacagccgctctgggctgcctggtcaaggattactttcccgagcctgtgaccgtgtcctggaatagcggagcactgacaagcggcgtgcacacctttccagccgtgctgcaaagcagcggcctgtactctctgagcagcgtggtcacagtgcctagctctagcctgggcacccagacctacatctgcaatgtgaaccacaagcctagcaacaccaaggtggacaagagagtggaacccaagagctgtgaagtgaaaaccgactccaccgaccacgtgaagcccaaagagacagagaacaccaagcagcccagcaagagctgccacaagcccaaggccatcgtgcacaccgagaaagtgaacatgatgagcctgaccgtgctgggcctgcggatgctgttcgccaaaaccgtggccgtgaacttcctgctgaccgccaagctgttcttcctc

SEQ ID NO: 3153 - DNA, 2760 bp, Artificial Sequence
  Synthetic Polynucloetide
atggccttaccagtgaccgccttgctcctgccgctggccttgctgctccacgccgccaggccggaagtgcagctggttgaatctggcggaggactggttcagcctggcggatctctgagactgtcttgtgccgccagcggcttcagcttcagcgacttttggatgagctgggtccgacaggcccctggcaaaggacttgaatgggtcgccacaatcagccaggccggcagcgagaaggactacgtggactctgtgaagggcagattcaccatcagccgggacaacgccaagaagtccctgtacctccagatgaacagcctgagagccgaggacaccgccgtgtactattgtgcctctggcgtgtacagcttcgactacagaggccagggcaccctggtcacagtctcttctggtaccggcggaggcggatctggcggcggaggtagcggtggcggaggatctgaattcgagatcgtgctgacacagtctcccgccacactgtcactgtctccaggcgaaagagccacactgagctgtagcgccagcagcagcgtgtcctacatgtactggtatcagcagaagcccggacaggcccctagactgctgatctacagaaccagcaacctggcctctggcatccccgccagattttctggctctggcagcggcaccgatttcaccctgaccataagcagcctggaacctgaggacttcgccgtgtactactgccagcagtaccacagctaccccaccacctttggacagggcaccaaggtggaaatcaagcggacagttctcgagggacagcctaaggccaatcctaccgtgacactgttccctccaagcagcgaagaactccaggccaacaaggccacacttgtgtgcctgatctccgacttctaccctggggctgtgacagtggcttggaaggccgatggatctcctgtgaaagccggcgtggaaaccaccaagccatccaagcagagcaacaacaaatacgccgccagctcctacctgagcctgacacctgagcagtggaagtcccacagatcctacagctgccaagtgacccacgaaggcagcaccgtggaaaagacagtggcccctacagagtgcagccccatcaagaccgatgtgattacaatggaccccaaggacaactgctccaaggacgccaacgataccctgctgctccagctgaccaacaccagcgcctactacatgtacttgttgctgctgctgaagtccgtggtgtacttcgccatcatcacatgctgcctgctgcggagaaccgccttctgctgcaacggcgagaagtctagggccaagcgatctggatctggagcaacaaacttctcactactcaaacaagcaggtgacgtggaggagaatcccgggcctactagtatggactggatttggcgcatccttttccttgtcggcgctgctaccggcgcgcattccgggccccagctccagctgcaagagtctggacctggcctggtcaagcctagcgagacactgagcctgacctgtaccgtgtccggcgatagcatcagcagcggcgattactactggggctggatcagacagcctcctggcaaaggactggaatggatcggccacatctactacagcggcgtgacctactacaaccccagcctgaagtccagagtgaccatcagcgtggacaccagccggaaccagttctccctgaagctgtctagcgtgacagccgccgataccgccgtgtactactgcaccagagaggacagcagcaactggcggagtagaggccagggaacactggtcacagttagctctggatccggcggaggcggaagtggaggcggaggatctggcggcggaggctctttcgaagaagtgcagctggttgaatcaggtggcggcctggttcaacctggcggatctctgagactgtcttgtgccgccagcggcttcagcttcaacacctacgccatgaactgggtccgacaggctcctggcaaaggactggaatgggtgtcccacatcagaagcaagagcaacaacttcgccacctactacgccgacagcgtgaaggacagattcaccatcagccgggacaacgccaagaacagcctgtacctccagatgaactccctgagagccgaggacaccgccgtgtattattgcgccagacaaggcggcgacttccctatggattattggggccagggcaccctggtcaccgtttcttctacgcgtgcctctacaaagggaccctccgtgtttcctctggctcccagcagcaagtctacaagcggaggaacagccgctctgggctgcctggtcaaggattactttcccgagcctgtgaccgtgtcctggaatagcggagcactgacaagcggcgtgcacacctttccagccgtgctgcaaagcagcggcctgtactctctgagcagcgtggtcacagtgcctagctctagcctgggcacccagacctacatctgcaatgtgaaccacaagcctagcaacaccaaggtggacaagagagtggaacccaagagctgtgaagtgaaaaccgactccaccgaccacgtgaagcccaaagagacagagaacaccaagcagcccagcaagagctgccacaagcccaaggccatcgtgcacaccgagaaagtgaacatgatgagcctgaccgtgctgggcctgcggatgctgttcgccaaaaccgtggccgtgaacttcctgctgaccgccaagctgttcttcctc

SEQ ID NO: 3154 - DNA, 2748 bp, Artificial Sequence
  Synthetic Polynucloetide
atggccttaccagtgaccgccttgctcctgccgctggccttgctgctccacgccgccaggccggaagtgcagctggttgaatctggcggaggactggttcagcctggcggatctctgagactgtcttgtgccgccagcggcttcagcttcagcgacttttggatgagctgggtccgacaggcccctggcaaaggacttgaatgggtcgccacaatcagccaggccggcagcgagaaggactacgtggactctgtgaagggcagattcaccatcagccgggacaacgccaagaagtccctgtacctccagatgaacagcctgagagccgaggacaccgccgtgtactattgtgcctctggcgtgtacagcttcgactacagaggccagggcaccctggtcacagtctcttctggtaccggcggaggcggatctggcggcggaggtagcggtggcggaggatctgaattcgacgtggtcatgacacagagcccttctagcctgtctgccagcgtgggcgacagagtgaccatcacctgtaaagccagcgaggacatctacatccggctggcctggtatcagcagaagcctggaaaggcccctaagctgctgatctacgccgccacctctctggaaacaggcgtgccaagcagattttccggcagcggctctggcaccgatttcaccctgacaatatccagcctccagcctgaggacttcgccacctactactgccagcagtattggaccacaccttggacctttggcggaggcaccaaggtggaaatcaaactcgagggacagcctaaggccaatcctaccgtgacactgttccctccaagcagcgaagaactccaggccaacaaggccacacttgtgtgcctgatctccgacttctaccctggggctgtgacagtggcttggaaggccgatggatctcctgtgaaagccggcgtggaaaccaccaagccatccaagcagagcaacaacaaatacgccgccagctcctacctgagcctgacacctgagcagtggaagtcccacagatcctacagctgccaagtgacccacgaaggcagcaccgtggaaaagacagtggcccctacagagtgcagccccatcaagaccgatgtgattacaatggaccccaaggacaactgctccaaggacgccaacgataccctgctgctccagctgaccaacaccagcgcctactacatgtacttgttgctgctgctgaagtccgtggtgtacttcgccatcatcacatgctgcctgctgcggagaaccgccttctgctgcaacggcgagaagtctagggccaagcgatctggatctggagcaacaaacttctcactactcaaacaagcaggtgacgtggaggagaatcccgggcctactagtatggactggatttggcgcatccttttccttgtcggcgctgctaccggcgcgcattccgggccccagctccagctgcaagagtctggacctggcctggtcaagcctagcgagacactgagcctgacctgtaccgtgtccggcgatagcatcagcagcggcgattactactggggctggatcagacagcctcctggcaaaggactggaatggatcggccacatctactacagcggcgtgacctactacaaccccagcctgaagtccagagtgaccatcagcgtggacaccagccggaaccagttctccctgaagctgtctagcgtgacagccgccgataccgccgtgtactactgcaccagagaggacagcagcaactggcggagtagaggccagggaacactggtcacagttagctctggatccggcggaggcggaagtggaggcggaggatctggcggcggaggctctttcgaacaggtgcagctccaagagtctggccctggactggtcaagcctagccagacactgagcctgacctgtaccgtgtccggctacagcatcaccatcgactacacctggaactggatcagacagcctcctggcaaaggactggaatggatcggctacatcacctacagcggcagcaccgactacaaccccagcctgaaaagccgggtgctgatctccgtggacaccagcaagaatcaggtgtccctgaagctgagcagcgtgacagccgctgataccgccgtgtactactgtgccagactgggcagaagatacgccctggattattggggccagggcaccaccgtgacagtgtcatctacgcgtgcctctacaaagggaccctccgtgtttcctctggctcccagcagcaagtctacaagcggaggaacagccgctctgggctgcctggtcaaggattactttcccgagcctgtgaccgtgtcctggaatagcggagcactgacaagcggcgtgcacacctttccagccgtgctgcaaagcagcggcctgtactctctgagcagcgtggtcacagtgcctagctctagcctgggcacccagacctacatctgcaatgtgaaccacaagcctagcaacaccaaggtggacaagagagtggaacccaagagctgtgaagtgaaaaccgactccaccgaccacgtgaagcccaaagagacagagaacaccaagcagcccagcaagagctgccacaagcccaaggccatcgtgcacaccgagaaagtgaacatgatgagcctgaccgtgctgggcctgcggatgctgttcgccaaaaccgtggccgtgaacttcctgctgaccgccaagctgttcttcctc

SEQ ID NO: 3155 - DNA, 2763 bp, Artificial Sequence
  Synthetic Polynucloetide
atggccttaccagtgaccgccttgctcctgccgctggccttgctgctccacgccgccaggccggaagtgcagctggttgaatctggcggaggactggttcagcctggcggatctctgagactgtcttgtgccgccagcggcttcagcttcagcgacttttggatgagctgggtccgacaggcccctggcaaaggacttgaatgggtcgccacaatcagccaggccggcagcgagaaggactacgtggactctgtgaagggcagattcaccatcagccgggacaacgccaagaagtccctgtacctccagatgaacagcctgagagccgaggacaccgccgtgtactattgtgcctctggcgtgtacagcttcgactacagaggccagggcaccctggtcacagtctcttctggtaccggcggaggcggatctggcggcggaggtagcggtggcggaggatctgaattcgacatccagatgacccagaccacaagcagcctgtctgccagcctgggcgacagagtgaccatctcttgtagagccagccaggacatcagcaactacctgaactggtatcagcagaaacccgacggcaccgtgaagctgctgatctactacaccagcatcctgcacagcggcgtgcccagcagattttctggctctggcagcggcaccgactacagcctgaccatcagcaatctggaacaagaggacttcgctacctacttctgccagcaaggcaacaccctgccttggacatttggcggaggcaccaagctggaaatcaaagctctcgagggacagcctaaggccaatcctaccgtgacactgttccctccaagcagcgaagaactccaggccaacaaggccacacttgtgtgcctgatctccgacttctaccctggggctgtgacagtggcttggaaggccgatggatctcctgtgaaagccggcgtggaaaccaccaagccatccaagcagagcaacaacaaatacgccgccagctcctacctgagcctgacacctgagcagtggaagtcccacagatcctacagctgccaagtgacccacgaaggcagcaccgtggaaaagacagtggcccctacagagtgcagccccatcaagaccgatgtgattacaatggaccccaaggacaactgctccaaggacgccaacgataccctgctgctccagctgaccaacaccagcgcctactacatgtacttgttgctgctgctgaagtccgtggtgtacttcgccatcatcacatgctgcctgctgcggagaaccgccttctgctgcaacggcgagaagtctagggccaagcgatctggatctggagcaacaaacttctcactactcaaacaagcaggtgacgtggaggagaatcccgggcctactagtatggactggatttggcgcatccttttccttgtcggcgctgctaccggcgcgcattccgggccccagctccagctgcaagagtctggacctggcctggtcaagcctagcgagacactgagcctgacctgtaccgtgtccggcgatagcatcagcagcggcgattactactggggctggatcagacagcctcctggcaaaggactggaatggatcggccacatctactacagcggcgtgacctactacaaccccagcctgaagtccagagtgaccatcagcgtggacaccagccggaaccagttctccctgaagctgtctagcgtgacagccgccgataccgccgtgtactactgcaccagagaggacagcagcaactggcggagtagaggccagggaacactggtcacagttagctctggatccggcggaggcggaagtggaggcggaggatctggcggcggaggctctttcgaagaagtgcaactggttgaatctggcggcggactggttaagcctggcggatctctgaagctgagctgtgccgcctctggcttcgccttcagcatctacgatatgagctgggtccgacagacccctgagaagagactggaatgggtcgcctacatctctagcggcggagggacctactatcccgacacagtgaagggcagattcaccatctccagagacaacgccaagaacaccctgtacctccagatgagcagcctgaagtccgaggacaccgccatgtactactgcgccagacacagcggctatggcacacattggggagtgctgtttgcctactggggccagggaacactggtcacagtttctgctacgcgtgcctctacaaagggaccctccgtgtttcctctggctcccagcagcaagtctacaagcggaggaacagccgctctgggctgcctggtcaaggattactttcccgagcctgtgaccgtgtcctggaatagcggagcactgacaagcggcgtgcacacctttccagccgtgctgcaaagcagcggcctgtactctctgagcagcgtggtcacagtgcctagctctagcctgggcacccagacctacatctgcaatgtgaaccacaagcctagcaacaccaaggtggacaagagagtggaacccaagagctgtgaagtgaaaaccgactccaccgaccacgtgaagcccaaagagacagagaacaccaagcagcccagcaagagctgccacaagcccaaggccatcgtgcacaccgagaaagtgaacatgatgagcctgaccgtgctgggcctgcggatgctgttcgccaaaaccgtggccgtgaacttcctgctgaccgccaagctgttcttcctc

SEQ ID NO: 3156 - DNA, 2793 bp, Artificial Sequence
  Synthetic Polynucloetide
atggccttaccagtgaccgccttgctcctgccgctggccttgctgctccacgccgccaggccggaagtgcagctggttgaatctggcggaggactggttcagcctggcggatctctgagactgtcttgtgccgccagcggcttcagcttcagcgacttttggatgagctgggtccgacaggcccctggcaaaggacttgaatgggtcgccacaatcagccaggccggcagcgagaaggactacgtggactctgtgaagggcagattcaccatcagccgggacaacgccaagaagtccctgtacctccagatgaacagcctgagagccgaggacaccgccgtgtactattgtgcctctggcgtgtacagcttcgactacagaggccagggcaccctggtcacagtctcttctggtaccggcggaggcggatctggcggcggaggtagcggtggcggaggatctgaattcgacatcgtgatgacacagagccctgatagcctggccgtgtctctgggagagagagccaccatcaactgcaagagcagccagagcctgctgtacagaagcaaccagaagaactacctggcctggtatcagcagaagcccggccagcctcctaagctgctgatctactgggccagcaccagagaaagcggcgtgcccgatagattttctggctctggcagcggcaccgacttcaccctgacaatttctagcctgcaagccgaggacgtggccgtgtactactgccagcagtattacaactaccccagaaccttcggccagggcaccaaggtggaaatcaagagaacagttctcgagggacagcctaaggccaatcctaccgtgacactgttccctccaagcagcgaagaactccaggccaacaaggccacacttgtgtgcctgatctccgacttctaccctggggctgtgacagtggcttggaaggccgatggatctcctgtgaaagccggcgtggaaaccaccaagccatccaagcagagcaacaacaaatacgccgccagctcctacctgagcctgacacctgagcagtggaagtcccacagatcctacagctgccaagtgacccacgaaggcagcaccgtggaaaagacagtggcccctacagagtgcagccccatcaagaccgatgtgattacaatggaccccaaggacaactgctccaaggacgccaacgataccctgctgctccagctgaccaacaccagcgcctactacatgtacttgttgctgctgctgaagtccgtggtgtacttcgccatcatcacatgctgcctgctgcggagaaccgccttctgctgcaacggcgagaagtctagggccaagcgatctggatctggagcaacaaacttctcactactcaaacaagcaggtgacgtggaggagaatcccgggcctactagtatggactggatttggcgcatccttttccttgtcggcgctgctaccggcgcgcattccgggccccagctccagctgcaagagtctggacctggcctggtcaagcctagcgagacactgagcctgacctgtaccgtgtccggcgatagcatcagcagcggcgattactactggggctggatcagacagcctcctggcaaaggactggaatggatcggccacatctactacagcggcgtgacctactacaaccccagcctgaagtccagagtgaccatcagcgtggacaccagccggaaccagttctccctgaagctgtctagcgtgacagccgccgataccgccgtgtactactgcaccagagaggacagcagcaactggcggagtagaggccagggaacactggtcacagttagctctggatccggcggaggcggaagtggaggcggaggatctggcggcggaggctctttcgaagaagttcagctgcttgaatcaggcggcggactggttcaacctggcggatctctgagactgagctgtgccgccagcggctacagcatcacaagcgactatgcctggaactgggtccgacaggcccctggcaaaggactggaatgggtgtcctacatcagcaacagcggcagcaccagctacaaccccagcctgaagtcccggttcaccatcagcagagacaacagcaagaacaccctgtacctccagatgaacagcctgagagctgaggacaccgccgtgtattattgcgccaaagagcggaactacgactacgacgattactactacgctatggactactggggccagggaaccctggtcacagtctcttctacgcgtgcctctacaaagggaccctccgtgtttcctctggctcccagcagcaagtctacaagcggaggaacagccgctctgggctgcctggtcaaggattactttcccgagcctgtgaccgtgtcctggaatagcggagcactgacaagcggcgtgcacacctttccagccgtgctgcaaagcagcggcctgtactctctgagcagcgtggtcacagtgcctagctctagcctgggcacccagacctacatctgcaatgtgaaccacaagcctagcaacaccaaggtggacaagagagtggaacccaagagctgtgaagtgaaaaccgactccaccgaccacgtgaagcccaaagagacagagaacaccaagcagcccagcaagagctgccacaagcccaaggccatcgtgcacaccgagaaagtgaacatgatgagcctgaccgtgctgggcctgcggatgctgttcgccaaaaccgtggccgtgaacttcctgctgaccgccaagctgttcttcctc

SEQ ID NO: 3157 - DNA, 2772 bp, Artificial Sequence
  Synthetic Polynucloetide
atggccttaccagtgaccgccttgctcctgccgctggccttgctgctccacgccgccaggccggaagtgcagctggttgaatctggcggaggactggttcagcctggcggatctctgagactgtcttgtgccgccagcggcttcagcttcagcgacttttggatgagctgggtccgacaggcccctggcaaaggacttgaatgggtcgccacaatcagccaggccggcagcgagaaggactacgtggactctgtgaagggcagattcaccatcagccgggacaacgccaagaagtccctgtacctccagatgaacagcctgagagccgaggacaccgccgtgtactattgtgcctctggcgtgtacagcttcgactacagaggccagggcaccctggtcacagtctcttctggtaccggcggaggcggatctggcggcggaggtagcggtggcggaggatctgaattcgacgtggtcatgacacagagccctctgagcctgcctgtgacacttggacagcctgccagcatcagctgtagaagcagccagagcctgctgcacagcagcggcaatacctacctggaatggtatcagcagaggcccggacagagccccagacctctgatctacaagatcagcacccggttcagcggcgtgcccgatagattttctggctctggcagcggcaccgacttcaccctgaagattagcagagtggaagccgaggacgtgggcgtgtactactgcttccaaggcagccacgtgccatacacctttggcggcggaacaaaggtggaaatcaagagactcgagggacagcctaaggccaatcctaccgtgacactgttccctccaagcagcgaagaactccaggccaacaaggccacacttgtgtgcctgatctccgacttctaccctggggctgtgacagtggcttggaaggccgatggatctcctgtgaaagccggcgtggaaaccaccaagccatccaagcagagcaacaacaaatacgccgccagctcctacctgagcctgacacctgagcagtggaagtcccacagatcctacagctgccaagtgacccacgaaggcagcaccgtggaaaagacagtggcccctacagagtgcagccccatcaagaccgatgtgattacaatggaccccaaggacaactgctccaaggacgccaacgataccctgctgctccagctgaccaacaccagcgcctactacatgtacttgttgctgctgctgaagtccgtggtgtacttcgccatcatcacatgctgcctgctgcggagaaccgccttctgctgcaacggcgagaagtctagggccaagcgatctggatctggagcaacaaacttctcactactcaaacaagcaggtgacgtggaggagaatcccgggcctactagtatggactggatttggcgcatccttttccttgtcggcgctgctaccggcgcgcattccgggccccagctccagctgcaagagtctggacctggcctggtcaagcctagcgagacactgagcctgacctgtaccgtgtccggcgatagcatcagcagcggcgattactactggggctggatcagacagcctcctggcaaaggactggaatggatcggccacatctactacagcggcgtgacctactacaaccccagcctgaagtccagagtgaccatcagcgtggacaccagccggaaccagttctccctgaagctgtctagcgtgacagccgccgataccgccgtgtactactgcaccagagaggacagcagcaactggcggagtagaggccagggaacactggtcacagttagctctggatccggcggaggcggaagtggaggcggaggatctggcggcggaggctctttcgaacaagttcagctggttcagagcggagccgaagtgaagaaacctggggcctctgtgaaggtgtcctgcaaagcctctggcctgaccatcgaggactactacatgcactgggtccgacaggcccctggacaaggacttgaatggatgggctggatcgaccccgagaacggcgatacagagtacggccctaagttccagggcagagtgaccatgaccagagacaccagcatcaacaccgcctacatggaactgagccggctgagatccgatgacaccgccgtgtactattgcgccgtgcacaatgcccactacggcacttggtttgcctattggggccagggcacactggtcaccgttagctctacgcgtgcctctacaaagggaccctccgtgtttcctctggctcccagcagcaagtctacaagcggaggaacagccgctctgggctgcctggtcaaggattactttcccgagcctgtgaccgtgtcctggaatagcggagcactgacaagcggcgtgcacacctttccagccgtgctgcaaagcagcggcctgtactctctgagcagcgtggtcacagtgcctagctctagcctgggcacccagacctacatctgcaatgtgaaccacaagcctagcaacaccaaggtggacaagagagtggaacccaagagctgtgaagtgaaaaccgactccaccgaccacgtgaagcccaaagagacagagaacaccaagcagcccagcaagagctgccacaagcccaaggccatcgtgcacaccgagaaagtgaacatgatgagcctgaccgtgctgggcctgcggatgctgttcgccaaaaccgtggccgtgaacttcctgctgaccgccaagctgttcttcctc

SEQ ID NO: 3158 - DNA, 2748 bp, Artificial Sequence
  Synthetic Polynucloetide
atggccttaccagtgaccgccttgctcctgccgctggccttgctgctccacgccgccaggccggaagtgcagctggttgaatctggcggaggactggttcagcctggcggatctctgagactgtcttgtgccgccagcggcttcagcttcagcgacttttggatgagctgggtccgacaggcccctggcaaaggacttgaatgggtcgccacaatcagccaggccggcagcgagaaggactacgtggactctgtgaagggcagattcaccatcagccgggacaacgccaagaagtccctgtacctccagatgaacagcctgagagccgaggacaccgccgtgtactattgtgcctctggcgtgtacagcttcgactacagaggccagggcaccctggtcacagtctcttctggtaccggcggaggcggatctggcggcggaggtagcggtggcggaggatctgaattcgacatccagatgacacagagccctagcagcctgtctgccagcgtgggagacagagtgaccatcacctgtagagccagcgagaacatctacagcaacctggcctggtatcagcagaagcctggcaaggcccctaagctgctgatctacgccgccaccaatctggctgatggcgtgccaagcagattttccggctctggcagcggcaccgatttcaccctgacaatatccagcctccagcctgaggacttcgccacctactactgccagcacttttggggcacccctacattcggccagggcaccaaggtggaaatcaagagaacagttctcgagggacagcctaaggccaatcctaccgtgacactgttccctccaagcagcgaagaactccaggccaacaaggccacacttgtgtgcctgatctccgacttctaccctggggctgtgacagtggcttggaaggccgatggatctcctgtgaaagccggcgtggaaaccaccaagccatccaagcagagcaacaacaaatacgccgccagctcctacctgagcctgacacctgagcagtggaagtcccacagatcctacagctgccaagtgacccacgaaggcagcaccgtggaaaagacagtggcccctacagagtgcagccccatcaagaccgatgtgattacaatggaccccaaggacaactgctccaaggacgccaacgataccctgctgctccagctgaccaacaccagcgcctactacatgtacttgttgctgctgctgaagtccgtggtgtacttcgccatcatcacatgctgcctgctgcggagaaccgccttctgctgcaacggcgagaagtctagggccaagcgatctggatctggagcaacaaacttctcactactcaaacaagcaggtgacgtggaggagaatcccgggcctactagtatggactggatttggcgcatccttttccttgtcggcgctgctaccggcgcgcattccgggccccagctccagctgcaagagtctggacctggcctggtcaagcctagcgagacactgagcctgacctgtaccgtgtccggcgatagcatcagcagcggcgattactactggggctggatcagacagcctcctggcaaaggactggaatggatcggccacatctactacagcggcgtgacctactacaaccccagcctgaagtccagagtgaccatcagcgtggacaccagccggaaccagttctccctgaagctgtctagcgtgacagccgccgataccgccgtgtactactgcaccagagaggacagcagcaactggcggagtagaggccagggaacactggtcacagttagctctggatccggcggaggcggaagtggaggcggaggatctggcggcggaggctctttcgaagaagtgcagctggttgaatcaggtggcggcctggttcaacctggcggatctctgagactgagctgtgccgcctctggcttcagcctgacaaattacggcgtgcactgggtccgacaggcccctggaaaaggactggaatgggtgtccgtgatttggagcggcggcagcaccgattacaacgccgccttcatcagccggttcaccatcagcgccgacaccagcaagaataccgcctacctccagatgaactccctgagagccgaggacaccgccgtgtactattgcgccagagaactgatccacgctatggacaactggggccagggaaccctggtcacagtctcttctacgcgtgcctctacaaagggaccctccgtgtttcctctggctcccagcagcaagtctacaagcggaggaacagccgctctgggctgcctggtcaaggattactttcccgagcctgtgaccgtgtcctggaatagcggagcactgacaagcggcgtgcacacctttccagccgtgctgcaaagcagcggcctgtactctctgagcagcgtggtcacagtgcctagctctagcctgggcacccagacctacatctgcaatgtgaaccacaagcctagcaacaccaaggtggacaagagagtggaacccaagagctgtgaagtgaaaaccgactccaccgaccacgtgaagcccaaagagacagagaacaccaagcagcccagcaagagctgccacaagcccaaggccatcgtgcacaccgagaaagtgaacatgatgagcctgaccgtgctgggcctgcggatgctgttcgccaaaaccgtggccgtgaacttcctgctgaccgccaagctgttcttcctc

SEQ ID NO: 3159 - DNA, 2769 bp, Artificial Sequence
  Synthetic Polynucloetide
atggccttaccagtgaccgccttgctcctgccgctggccttgctgctccacgccgccaggccggaagtgcagctggttgaatctggcggaggactggttcagcctggcggatctctgagactgtcttgtgccgccagcggcttcagcttcagcgacttttggatgagctgggtccgacaggcccctggcaaaggacttgaatgggtcgccacaatcagccaggccggcagcgagaaggactacgtggactctgtgaagggcagattcaccatcagccgggacaacgccaagaagtccctgtacctccagatgaacagcctgagagccgaggacaccgccgtgtactattgtgcctctggcgtgtacagcttcgactacagaggccagggcaccctggtcacagtctcttctggtaccggcggaggcggatctggcggcggaggtagcggtggcggaggatctgaattcgacttcgtgatgacacagagccctctgagcctgcctgtgacacctggcgaacctgccagcatcagctgtagaagcagccagagcatcgtgcacagcaacggcaacacctacctggaatggtatctccagaagcctggacagagcccacagctgctgatctacaaggtgtccaacagattcagcggcgtgcccgacagattttctggcagcggctctggcaccgacttcaccctgaagattagcagagtggaagccgaggacgtgggcgtgtactactgcttccaaggctctcacgtgcccctgacctttggacagggcaccaagctggaaatcaagagactcgagggacagcctaaggccaatcctaccgtgacactgttccctccaagcagcgaagaactccaggccaacaaggccacacttgtgtgcctgatctccgacttctaccctggggctgtgacagtggcttggaaggccgatggatctcctgtgaaagccggcgtggaaaccaccaagccatccaagcagagcaacaacaaatacgccgccagctcctacctgagcctgacacctgagcagtggaagtcccacagatcctacagctgccaagtgacccacgaaggcagcaccgtggaaaagacagtggcccctacagagtgcagccccatcaagaccgatgtgattacaatggaccccaaggacaactgctccaaggacgccaacgataccctgctgctccagctgaccaacaccagcgcctactacatgtacttgttgctgctgctgaagtccgtggtgtacttcgccatcatcacatgctgcctgctgcggagaaccgccttctgctgcaacggcgagaagtctagggccaagcgatctggatctggagcaacaaacttctcactactcaaacaagcaggtgacgtggaggagaatcccgggcctactagtatggactggatttggcgcatccttttccttgtcggcgctgctaccggcgcgcattccgggccccagctccagctgcaagagtctggacctggcctggtcaagcctagcgagacactgagcctgacctgtaccgtgtccggcgatagcatcagcagcggcgattactactggggctggatcagacagcctcctggcaaaggactggaatggatcggccacatctactacagcggcgtgacctactacaaccccagcctgaagtccagagtgaccatcagcgtggacaccagccggaaccagttctccctgaagctgtctagcgtgacagccgccgataccgccgtgtactactgcaccagagaggacagcagcaactggcggagtagaggccagggaacactggtcacagttagctctggatccggcggaggcggaagtggaggcggaggatctggcggcggaggctctttcgaagaagtgcagctggttgaaagcggagccgaagtgaagaaacctggggcctctgtgaaggtgtcctgcaaggccagcggctacacctttaccagctactggattcactgggtccgacaggcccctggacaaggacttgagtggatgggcgagaacgacccctccaacggcaggaccaactacaacgagaagttcaagaaccgcgtgaccctgaccgtggacaccagcatctctaccgcctacatggaactgagccggctgagatccgatgacaccgccgtgtactattgcgccagaggacccaactacttttacagcatggactactggggccagggcacaatggtcaccgttagctctacgcgtgcctctacaaagggaccctccgtgtttcctctggctcccagcagcaagtctacaagcggaggaacagccgctctgggctgcctggtcaaggattactttcccgagcctgtgaccgtgtcctggaatagcggagcactgacaagcggcgtgcacacctttccagccgtgctgcaaagcagcggcctgtactctctgagcagcgtggtcacagtgcctagctctagcctgggcacccagacctacatctgcaatgtgaaccacaagcctagcaacaccaaggtggacaagagagtggaacccaagagctgtgaagtgaaaaccgactccaccgaccacgtgaagcccaaagagacagagaacaccaagcagcccagcaagagctgccacaagcccaaggccatcgtgcacaccgagaaagtgaacatgatgagcctgaccgtgctgggcctgcggatgctgttcgccaaaaccgtggccgtgaacttcctgctgaccgccaagctgttcttcctc

SEQ ID NO: 3160 - DNA, 2748 bp, Artificial Sequence
  Synthetic Polynucloetide
atggccttaccagtgaccgccttgctcctgccgctggccttgctgctccacgccgccaggccggaagtgcagctggttgaatctggcggaggactggttcagcctggcggatctctgagactgtcttgtgccgccagcggcttcagcttcagcgacttttggatgagctgggtccgacaggcccctggcaaaggacttgaatgggtcgccacaatcagccaggccggcagcgagaaggactacgtggactctgtgaagggcagattcaccatcagccgggacaacgccaagaagtccctgtacctccagatgaacagcctgagagccgaggacaccgccgtgtactattgtgcctctggcgtgtacagcttcgactacagaggccagggcaccctggtcacagtctcttctggtaccggcggaggcggatctggcggcggaggtagcggtggcggaggatctgaattcgacatccagctgactcagagccctagctttctgagcgccagcgtgggcgacagagtgaccatcacatgtagcgccagatccagcatcagcttcatgtactggtatcagcagaagcccggcaaggcccctaagctgctgatctacgacaccagcaatctggcctctggcgtgcccagcagattttctggaagcggcagcggcaccgagttcaccctgacaatctctagcctggaagccgaggatgccgccacctactattgccagcagtggtccagctatcccctgacatttggacagggcaccaagctggaaatcaaactcgagggacagcctaaggccaatcctaccgtgacactgttccctccaagcagcgaagaactccaggccaacaaggccacacttgtgtgcctgatctccgacttctaccctggggctgtgacagtggcttggaaggccgatggatctcctgtgaaagccggcgtggaaaccaccaagccatccaagcagagcaacaacaaatacgccgccagctcctacctgagcctgacacctgagcagtggaagtcccacagatcctacagctgccaagtgacccacgaaggcagcaccgtggaaaagacagtggcccctacagagtgcagccccatcaagaccgatgtgattacaatggaccccaaggacaactgctccaaggacgccaacgataccctgctgctccagctgaccaacaccagcgcctactacatgtacttgttgctgctgctgaagtccgtggtgtacttcgccatcatcacatgctgcctgctgcggagaaccgccttctgctgcaacggcgagaagtctagggccaagcgatctggatctggagcaacaaacttctcactactcaaacaagcaggtgacgtggaggagaatcccgggcctactagtatggactggatttggcgcatccttttccttgtcggcgctgctaccggcgcgcattccgggccccagctccagctgcaagagtctggacctggcctggtcaagcctagcgagacactgagcctgacctgtaccgtgtccggcgatagcatcagcagcggcgattactactggggctggatcagacagcctcctggcaaaggactggaatggatcggccacatctactacagcggcgtgacctactacaaccccagcctgaagtccagagtgaccatcagcgtggacaccagccggaaccagttctccctgaagctgtctagcgtgacagccgccgataccgccgtgtactactgcaccagagaggacagcagcaactggcggagtagaggccagggaacactggtcacagttagctctggatccggcggaggcggaagtggaggcggaggatctggcggcggaggctctttcgaacaggttcagctggttcagtctggggccgaagtgaagaaacctggggcctctgtgaaggtgtcctgcaaggcttccggctacacctttaccggctcttggatgaactgggtccgacaggctcctggacagggactcgaatggatcggcagaatctatcctggcgacggcgagacaaactacaacggcaagttcaaggaccgcgtgacaatcaccgccgacaagagcacaagcaccgcctacatggaactgagcagcctgcggagcgaagataccgccgtgtactactgcgcccggatctacggcaacaacgtgtacttcgatgtgtggggccagggcacaaccgtgacagtctcttctacgcgtgcctctacaaagggaccctccgtgtttcctctggctcccagcagcaagtctacaagcggaggaacagccgctctgggctgcctggtcaaggattactttcccgagcctgtgaccgtgtcctggaatagcggagcactgacaagcggcgtgcacacctttccagccgtgctgcaaagcagcggcctgtactctctgagcagcgtggtcacagtgcctagctctagcctgggcacccagacctacatctgcaatgtgaaccacaagcctagcaacaccaaggtggacaagagagtggaacccaagagctgtgaagtgaaaaccgactccaccgaccacgtgaagcccaaagagacagagaacaccaagcagcccagcaagagctgccacaagcccaaggccatcgtgcacaccgagaaagtgaacatgatgagcctgaccgtgctgggcctgcggatgctgttcgccaaaaccgtggccgtgaacttcctgctgaccgccaagctgttcttcctc

SEQ ID NO: 3161 - DNA, 2772 bp, Artificial Sequence
  Synthetic Polynucloetide
atggccttaccagtgaccgccttgctcctgccgctggccttgctgctccacgccgccaggccggaagtgcagctggttgaatctggcggaggactggttcagcctggcggatctctgagactgtcttgtgccgccagcggcttcagcttcagcgacttttggatgagctgggtccgacaggcccctggcaaaggacttgaatgggtcgccacaatcagccaggccggcagcgagaaggactacgtggactctgtgaagggcagattcaccatcagccgggacaacgccaagaagtccctgtacctccagatgaacagcctgagagccgaggacaccgccgtgtactattgtgcctctggcgtgtacagcttcgactacagaggccagggcaccctggtcacagtctcttctggtaccggcggaggcggatctggcggcggaggtagcggtggcggaggatctgaattccagctggtgctgacacagtctccaagcgcctctgccagcctgggatctagcgtgaagctgacctgtacactgagcagcggccacaagaccgacaccatcgactggtatcagcagcagcctggcaaggcccctagatacctgatgaagctggaaggcagcggcagctacaacaaaggctctggcgtgcccgatagattcagcggcagttcttctggcgctgattggtatctgaccatcagcagcctccagagcgaggacgaggccgattactactgcggcacagactaccccggcaactacctgtttggcggcggaacacagctgacagtgcttggcctcgagggacagcctaaggccaatcctaccgtgacactgttccctccaagcagcgaagaactccaggccaacaaggccacacttgtgtgcctgatctccgacttctaccctggggctgtgacagtggcttggaaggccgatggatctcctgtgaaagccggcgtggaaaccaccaagccatccaagcagagcaacaacaaatacgccgccagctcctacctgagcctgacacctgagcagtggaagtcccacagatcctacagctgccaagtgacccacgaaggcagcaccgtggaaaagacagtggcccctacagagtgcagccccatcaagaccgatgtgattacaatggaccccaaggacaactgctccaaggacgccaacgataccctgctgctccagctgaccaacaccagcgcctactacatgtacttgttgctgctgctgaagtccgtggtgtacttcgccatcatcacatgctgcctgctgcggagaaccgccttctgctgcaacggcgagaagtctagggccaagcgatctggatctggagcaacaaacttctcactactcaaacaagcaggtgacgtggaggagaatcccgggcctactagtatggactggatttggcgcatccttttccttgtcggcgctgctaccggcgcgcattccgggccccagctccagctgcaagagtctggacctggcctggtcaagcctagcgagacactgagcctgacctgtaccgtgtccggcgatagcatcagcagcggcgattactactggggctggatcagacagcctcctggcaaaggactggaatggatcggccacatctactacagcggcgtgacctactacaaccccagcctgaagtccagagtgaccatcagcgtggacaccagccggaaccagttctccctgaagctgtctagcgtgacagccgccgataccgccgtgtactactgcaccagagaggacagcagcaactggcggagtagaggccagggaacactggtcacagttagctctggatccggcggaggcggaagtggaggcggaggatctggcggcggaggctctttcgaacaagaacagctggttgaaagcggcggaggactggttcaacctggcggttctctgagactgagctgtgccgccagcggcttcaccttcagcgactactacatgagctggatcagacaggccccaggcaaaggactggaatgggtcgccacaatctaccccagcagcggcaagacctactacgccgattctgccaagggcagactgaccatctccagcgacaacgccaaggacagcctgtacctccagatgaacagcctgagagccgaggacaccgccgtgtactactgcaccagagatagctacgccgacgacgccgctctgtttgacatttggggccagggcaccaccgtgaccgtttcttctacgcgtgcctctacaaagggaccctccgtgtttcctctggctcccagcagcaagtctacaagcggaggaacagccgctctgggctgcctggtcaaggattactttcccgagcctgtgaccgtgtcctggaatagcggagcactgacaagcggcgtgcacacctttccagccgtgctgcaaagcagcggcctgtactctctgagcagcgtggtcacagtgcctagctctagcctgggcacccagacctacatctgcaatgtgaaccacaagcctagcaacaccaaggtggacaagagagtggaacccaagagctgtgaagtgaaaaccgactccaccgaccacgtgaagcccaaagagacagagaacaccaagcagcccagcaagagctgccacaagcccaaggccatcgtgcacaccgagaaagtgaacatgatgagcctgaccgtgctgggcctgcggatgctgttcgccaaaaccgtggccgtgaacttcctgctgaccgccaagctgttcttcctc

SEQ ID NO: 3162 - DNA, 2737 bp, Artificial Sequence
  Synthetic Polynucloetide
atggccttaccagtgaccgccttgctcctgccgctggccttgctgctccacgccgccaggccggaagtgcagctggttgaatctggcggaggactggttcagcctggcggatctctgagactgtcttgtgccgccagcggcttcagcttcagcgacttttggatgagctgggtccgacaggcccctggcaaaggacttgaatgggtcgccacaatcagccaggccggcagcgagaaggactacgtggactctgtgaagggcagattcaccatcagccgggacaacgccaagaagtccctgtacctccagatgaacagcctgagagccgaggacaccgccgtgtactattgtgcctctggcgtgtacagcttcgactacagaggccagggcaccctggtcacagtctcttctggtaccggcggaggcggatctggcggcggaggtagcggtggcggaggatctgaattcgagattgtgttgacacagtctcccgataccctgtcactgtcacccggcgagaaggcaacgctgagttgcagagcaagccagtcagtctcctcttcttttctggcctggtatcagcaaaaaccaggtcaggcaccatctctcctgatttacgttgccagcagacgggcggctggcattcccgacaggttctctggaagcggatctgggaccgattttaccctgacaattagccgcttggagcccgaagactttggtatgttttactgccagcactacggaaggacacctttcacatttggcccggctcgagggacagcctaaggccaatcctaccgtgacactgttccctccaagcagcgaagaactccaggccaacaaggccacacttgtgtgcctgatctccgacttctaccctggggctgtgacagtggcttggaaggccgatggatctcctgtgaaagccggcgtggaaaccaccaagccatccaagcagagcaacaacaaatacgccgccagctcctacctgagcctgacacctgagcagtggaagtcccacagatcctacagctgccaagtgacccacgaaggcagcaccgtggaaaagacagtggcccctacagagtgcagccccatcaagaccgatgtgattacaatggaccccaaggacaactgctccaaggacgccaacgataccctgctgctccagctgaccaacaccagcgcctactacatgtacttgttgctgctgctgaagtccgtggtgtacttcgccatcatcacatgctgcctgctgcggagaaccgccttctgctgcaacggcgagaagtctagggccaagcgatctggatctggagcaacaaacttctcactactcaaacaagcaggtgacgtggaggagaatcccgggcctactagtatggactggatttggcgcatccttttccttgtcggcgctgctaccggcgcgcattccgggccccagctccagctgcaagagtctggacctggcctggtcaagcctagcgagacactgagcctgacctgtaccgtgtccggcgatagcatcagcagcggcgattactactggggctggatcagacagcctcctggcaaaggactggaatggatcggccacatctactacagcggcgtgacctactacaaccccagcctgaagtccagagtgaccatcagcgtggacaccagccggaaccagttctccctgaagctgtctagcgtgacagccgccgataccgccgtgtactactgcaccagagaggacagcagcaactggcggagtagaggccagggaacactggtcacagttagctctggatccggcggaggcggaagtggaggcggaggatctggcggcggaggctctttcgaacagatccagttggtggaatcagggggcggtgtggtgcagccgggtaggagcctgagactgtcatgcgtggcgtctggcttcacattcaagaactacggcatgcactgggtgcgacaggcccccggaaagggtttggagtgggtcgccgtgatctggtacgacggatctaatgagtattacggagatcctgtgaagggaaggttcaccatctcccgcgacaatagcaaaaatatgctctacctgcaaatgaactcactcagggcggatgatacggcggtctactattgcgctcgctcagggattgctgtggccggcgcattcgattactggggacagggtaccctggtgacagtatcaagcacgcgtgcctctacaaagggaccctccgtgtttcctctggctcccagcagcaagtctacaagcggaggaacagccgctctgggctgcctggtcaaggattactttcccgagcctgtgaccgtgtcctggaatagcggagcactgacaagcggcgtgcacacctttccagccgtgctgcaaagcagcggcctgtactctctgagcagcgtggtcacagtgcctagctctagcctgggcacccagacctacatctgcaatgtgaaccacaagcctagcaacaccaaggtggacaagagagtggaacccaagagctgtgaagtgaaaaccgactccaccgaccacgtgaagcccaaagagacagagaacaccaagcagcccagcaagagctgccacaagcccaaggccatcgtgcacaccgagaaagtgaacatgatgagcctgaccgtgctgggcctgcggatgctgttcgccaaaaccgtggccgtgaacttcctgctgaccgccaagctgttcttcctc

SEQ ID NO: 3163 - DNA, 2786 bp, Artificial Sequence
  Synthetic Polynucloetide
atggccttaccagtgaccgccttgctcctgccgctggccttgctgctccacgccgccaggccggaagtgcagctggttgaatctggcggaggactggttcagcctggcggatctctgagactgtcttgtgccgccagcggcttcagcttcagcgacttttggatgagctgggtccgacaggcccctggcaaaggacttgaatgggtcgccacaatcagccaggccggcagcgagaaggactacgtggactctgtgaagggcagattcaccatcagccgggacaacgccaagaagtccctgtacctccagatgaacagcctgagagccgaggacaccgccgtgtactattgtgcctctggcgtgtacagcttcgactacagaggccagggcaccctggtcacagtctcttctggtaccggcggaggcggatctggcggcggaggtagcggtggcggaggatctgaattcgacattcagatgacccaaagcccgtccagcctgtccgccagcctgggagatagagtgacaatcacgtgtagagcttcccaagggataagaaatgatctcgggtggtatcagcagaagcccggcaaagcccccaaaaggcttatatatgctagtagtacactgcagtctggagttccttcccgattttcaggtagcggctccggtacagagttcaccctcacgataagctcactccagcctgaggatttcgcaacgtactactgcctccagcacaacaattttccctggactttcggccagggcaccaaggtggagatcaagaggctcgagggacagcctaaggccaatcctaccgtgacactgttccctccaagcagcgaagaactccaggccaacaaggccacacttgtgtgcctgatctccgacttctaccctggggctgtgacagtggcttggaaggccgatggatctcctgtgaaagccggcgtggaaaccaccaagccatccaagcagagcaacaacaaatacgccgccagctcctacctgagcctgacacctgagcagtggaagtcccacagatcctacagctgccaagtgacccacgaaggcagcaccgtggaaaagacagtggcccctacagagtgcagccccatcaagaccgatgtgattacaatggaccccaaggacaactgctccaaggacgccaacgataccctgctgctccagctgaccaacaccagcgcctactacatgtacttgttgctgctgctgaagtccgtggtgtacttcgccatcatcacatgctgcctgctgcggagaaccgccttctgctgcaacggcgagaagtctagggccaagcgatctggatctggagcaacaaacttctcactactcaaacaagcaggtgacgtggaggagaatcccgggcctactagtatggactggatttggcgcatccttttccttgtcggcgctgctaccggcgcgcattccgggccccagctccagctgcaagagtctggacctggcctggtcaagcctagcgagacactgagcctgacctgtaccgtgtccggcgatagcatcagcagcggcgattactactggggctggatcagacagcctcctggcaaaggactggaatggatcggccacatctactacagcggcgtgacctactacaaccccagcctgaagtccagagtgaccatcagcgtggacaccagccggaaccagttctccctgaagctgtctagcgtgacagccgccgataccgccgtgtactactgcaccagagaggacagcagcaactggcggagtagaggccagggaacactggtcacagttagctctggatccggcggaggcggaagtggaggcggaggatctggcggcggaggctctttcgaacacgcccgcaagttactttgaaggagtctggacctgtactggtgaagccaaccgagacactgacactcacgtgtacagtgagtggtttttccttgatcaacgcaaggatgggcgtcagctggatcaggcaaccccctggcaaggctctggaatggctcgctcacatattcagcaatgccgaaaaaagctaccggacaagcctgaaatcccgcctgactatttccaaggacacttctaagtctcaggtggtgctgaccatgaccaacatggacccggtggacaccgccacctattactgcgcaagaatccctgggtatggtgggaatggtgactaccattattatgggatggatgtgtgggggcaaggcacaaccgtaacggtctcaagcacgcgtgcctctacaaagggaccctccgtgtttcctctggctcccagcagcaagtctacaagcggaggaacagccgctctgggctgcctggtcaaggattactttcccgagcctgtgaccgtgtcctggaatagcggagcactgacaagcggcgtgcacacctttccagccgtgctgcaaagcagcggcctgtactctctgagcagcgtggtcacagtgcctagctctagcctgggcacccagacctacatctgcaatgtgaaccacaagcctagcaacaccaaggtggacaagagagtggaacccaagagctgtgaagtgaaaaccgactccaccgaccacgtgaagcccaaagagacagagaacaccaagcagcccagcaagagctgccacaagcccaaggccatcgtgcacaccgagaaagtgaacatgatgagcctgaccgtgctgggcctgcggatgctgttcgccaaaaccgtggccgtgaacttcctgctgaccgccaagctgttcttcctc

SEQ ID NO: 3164 - DNA, 2757 bp, Artificial Sequence
  Synthetic Polynucloetide
atggccttaccagtgaccgccttgctcctgccgctggccttgctgctccacgccgccaggccggaagtgcagctggttgaatctggcggaggactggttcagcctggcggatctctgagactgtcttgtgccgccagcggcttcagcttcagcgacttttggatgagctgggtccgacaggcccctggcaaaggacttgaatgggtcgccacaatcagccaggccggcagcgagaaggactacgtggactctgtgaagggcagattcaccatcagccgggacaacgccaagaagtccctgtacctccagatgaacagcctgagagccgaggacaccgccgtgtactattgtgcctctggcgtgtacagcttcgactacagaggccagggcaccctggtcacagtctcttctggtaccggcggaggcggatctggcggcggaggtagcggtggcggaggatctgaattcgacatcgtgctgacacagagccctccaagcctggctatgagcctgggaaagagagccaccatcagctgtagagccagcgagagcgtgacaatcctgggctctcacctgatccactggtatcagcagaagcccggccagcctcctacactgctgattcagctggcctccaatgtgcagacaggcgtgccagccagattttctggcagcggcagcagaaccgacttcaccctgaccattgatcccgtggaagaggacgacgtggccgtgtactactgcctccagagcagaacaatccccagaacctttggcggaggcaccaagctggaaatcaaactcgagggacagcctaaggccaatcctaccgtgacactgttccctccaagcagcgaagaactccaggccaacaaggccacacttgtgtgcctgatctccgacttctaccctggggctgtgacagtggcttggaaggccgatggatctcctgtgaaagccggcgtggaaaccaccaagccatccaagcagagcaacaacaaatacgccgccagctcctacctgagcctgacacctgagcagtggaagtcccacagatcctacagctgccaagtgacccacgaaggcagcaccgtggaaaagacagtggcccctacagagtgcagccccatcaagaccgatgtgattacaatggaccccaaggacaactgctccaaggacgccaacgataccctgctgctccagctgaccaacaccagcgcctactacatgtacttgttgctgctgctgaagtccgtggtgtacttcgccatcatcacatgctgcctgctgcggagaaccgccttctgctgcaacggcgagaagtctagggccaagcgatctggatctggagcaacaaacttctcactactcaaacaagcaggtgacgtggaggagaatcccgggcctactagtatggactggatttggcgcatccttttccttgtcggcgctgctaccggcgcgcattccgggccccagctccagctgcaagagtctggacctggcctggtcaagcctagcgagacactgagcctgacctgtaccgtgtccggcgatagcatcagcagcggcgattactactggggctggatcagacagcctcctggcaaaggactggaatggatcggccacatctactacagcggcgtgacctactacaaccccagcctgaagtccagagtgaccatcagcgtggacaccagccggaaccagttctccctgaagctgtctagcgtgacagccgccgataccgccgtgtactactgcaccagagaggacagcagcaactggcggagtagaggccagggaacactggtcacagttagctctggatccggcggaggcggaagtggaggcggaggatctggcggcggaggctctttcgaacaaatccagctggtgcagtctggccccgagctgaagaaacctggcgagacagtgaagatcagctgcaaggccagcggctacaccttcaccgactacagcatcaactgggtcaagagagcccctggcaagggcctgaaatggatgggctggatcaacaccgaaaccagagagcccgcctacgcctacgacttcagaggcagattcgccttcagcctggaaaccagcgccagcacagcctacctccagatcaacaacctgaagtacgaggacaccgccacctacttttgcgccctggactacagctacgctatggactattggggccagggcaccagcgtgacagtctcttctacgcgtgcctctacaaagggaccctccgtgtttcctctggctcccagcagcaagtctacaagcggaggaacagccgctctgggctgcctggtcaaggattactttcccgagcctgtgaccgtgtcctggaatagcggagcactgacaagcggcgtgcacacctttccagccgtgctgcaaagcagcggcctgtactctctgagcagcgtggtcacagtgcctagctctagcctgggcacccagacctacatctgcaatgtgaaccacaagcctagcaacaccaaggtggacaagagagtggaacccaagagctgtgaagtgaaaaccgactccaccgaccacgtgaagcccaaagagacagagaacaccaagcagcccagcaagagctgccacaagcccaaggccatcgtgcacaccgagaaagtgaacatgatgagcctgaccgtgctgggcctgcggatgctgttcgccaaaaccgtggccgtgaacttcctgctgaccgccaagctgttcttcctc

SEQ ID NO: 3165 - DNA, 2762 bp, Artificial Sequence
  Synthetic Polynucloetide
atggccttaccagtgaccgccttgctcctgccgctggccttgctgctccacgccgccaggccggaagtgcagctggttgaatctggcggaggactggttcagcctggcggatctctgagactgtcttgtgccgccagcggcttcagcttcagcgacttttggatgagctgggtccgacaggcccctggcaaaggacttgaatgggtcgccacaatcagccaggccggcagcgagaaggactacgtggactctgtgaagggcagattcaccatcagccgggacaacgccaagaagtccctgtacctccagatgaacagcctgagagccgaggacaccgccgtgtactattgtgcctctggcgtgtacagcttcgactacagaggccagggcaccctggtcacagtctcttctggtaccggcggaggcggatctggcggcggaggtagcggtggcggaggatctgaattcgatattcaactgacacaatcccccagctcactcagcgccagcgtgggggacagggttagctttacctgtcaagcctctcaggatataaataactttctgaactggtatcaacagaagcctgggaaggcgcccaaactcctgatctatgatgcgtccaacctggaaactggcgtgccttcacgctttagcggctctggcagtggtacagacttcacttttaccatctcttcacttcagccggaggacatcgccacatattactgtcaacagtacggaaacttgccctttacttttggaggcggcaccaaagttgaaatcaaaagctcgagggacagcctaaggccaatcctaccgtgacactgttccctccaagcagcgaagaactccaggccaacaaggccacacttgtgtgcctgatctccgacttctaccctggggctgtgacagtggcttggaaggccgatggatctcctgtgaaagccggcgtggaaaccaccaagccatccaagcagagcaacaacaaatacgccgccagctcctacctgagcctgacacctgagcagtggaagtcccacagatcctacagctgccaagtgacccacgaaggcagcaccgtggaaaagacagtggcccctacagagtgcagccccatcaagaccgatgtgattacaatggaccccaaggacaactgctccaaggacgccaacgataccctgctgctccagctgaccaacaccagcgcctactacatgtacttgttgctgctgctgaagtccgtggtgtacttcgccatcatcacatgctgcctgctgcggagaaccgccttctgctgcaacggcgagaagtctagggccaagcgatctggatctggagcaacaaacttctcactactcaaacaagcaggtgacgtggaggagaatcccgggcctactagtatggactggatttggcgcatccttttccttgtcggcgctgctaccggcgcgcattccgggccccagctccagctgcaagagtctggacctggcctggtcaagcctagcgagacactgagcctgacctgtaccgtgtccggcgatagcatcagcagcggcgattactactggggctggatcagacagcctcctggcaaaggactggaatggatcggccacatctactacagcggcgtgacctactacaaccccagcctgaagtccagagtgaccatcagcgtggacaccagccggaaccagttctccctgaagctgtctagcgtgacagccgccgataccgccgtgtactactgcaccagagaggacagcagcaactggcggagtagaggccagggaacactggtcacagttagctctggatccggcggaggcggaagtggaggcggaggatctggcggcggaggctctttcgaacaggtccaactgcaagaaagcggacccggactggtgaagccttctgagacacttagtctgacgtgcacggtcagtggcggctccatctcctcctattattggtcatggatacgacaacccccaggtaagggcctggaatggattggctatatctactattcaggaagcacgaactacaatcccagcctgaagtcccgagtgacaatttcagtagataccagtaaaaaccagttcagtcttaaactgtcaagcgtgacagctgccgacaccgctgtgtattactgcgtctcactggtgtattgtggaggggattgttatagcgggttcgattattggggacagggaaccctggtgactgtatcttccacgcgtgcctctacaaagggaccctccgtgtttcctctggctcccagcagcaagtctacaagcggaggaacagccgctctgggctgcctggtcaaggattactttcccgagcctgtgaccgtgtcctggaatagcggagcactgacaagcggcgtgcacacctttccagccgtgctgcaaagcagcggcctgtactctctgagcagcgtggtcacagtgcctagctctagcctgggcacccagacctacatctgcaatgtgaaccacaagcctagcaacaccaaggtggacaagagagtggaacccaagagctgtgaagtgaaaaccgactccaccgaccacgtgaagcccaaagagacagagaacaccaagcagcccagcaagagctgccacaagcccaaggccatcgtgcacaccgagaaagtgaacatgatgagcctgaccgtgctgggcctgcggatgctgttcgccaaaaccgtggccgtgaacttcctgctgaccgccaagctgttcttcctc

SEQ ID NO: 3166 - DNA, 2769 bp, Artificial Sequence
  Synthetic Polynucloetide
atggccttaccagtgaccgccttgctcctgccgctggccttgctgctccacgccgccaggccggaagtgcagctggttgaatctggcggaggactggttcagcctggcggatctctgagactgtcttgtgccgccagcggcttcagcttcagcgacttttggatgagctgggtccgacaggcccctggcaaaggacttgaatgggtcgccacaatcagccaggccggcagcgagaaggactacgtggactctgtgaagggcagattcaccatcagccgggacaacgccaagaagtccctgtacctccagatgaacagcctgagagccgaggacaccgccgtgtactattgtgcctctggcgtgtacagcttcgactacagaggccagggcaccctggtcacagtctcttctggtaccggcggaggcggatctggcggcggaggtagcggtggcggaggatctgaattcgatatccagctcactcaaagcccctctagtctctctgcctcagtgggggatcgggtcagttttacttgtcaagcttcacaggatatcaacaacttccttaattggtatcagcagaagccaggaaaagcacccaagctgctcatctatgatgcctcaaatttggagacgggtgttcccagtcgattctctgggtcagggtccgggaccgactttacgtttacgatctcctctctgcagcccgaagacatcgccacatactattgtcaacagtacggcaacttgcctttcacatttgggggcgggactaaggttgaaatcaagaggctcgagggacagcctaaggccaatcctaccgtgacactgttccctccaagcagcgaagaactccaggccaacaaggccacacttgtgtgcctgatctccgacttctaccctggggctgtgacagtggcttggaaggccgatggatctcctgtgaaagccggcgtggaaaccaccaagccatccaagcagagcaacaacaaatacgccgccagctcctacctgagcctgacacctgagcagtggaagtcccacagatcctacagctgccaagtgacccacgaaggcagcaccgtggaaaagacagtggcccctacagagtgcagccccatcaagaccgatgtgattacaatggaccccaaggacaactgctccaaggacgccaacgataccctgctgctccagctgaccaacaccagcgcctactacatgtacttgttgctgctgctgaagtccgtggtgtacttcgccatcatcacatgctgcctgctgcggagaaccgccttctgctgcaacggcgagaagtctagggccaagcgatctggatctggagcaacaaacttctcactactcaaacaagcaggtgacgtggaggagaatcccgggcctactagtatggactggatttggcgcatccttttccttgtcggcgctgctaccggcgcgcattccgggccccagctccagctgcaagagtctggacctggcctggtcaagcctagcgagacactgagcctgacctgtaccgtgtccggcgatagcatcagcagcggcgattactactggggctggatcagacagcctcctggcaaaggactggaatggatcggccacatctactacagcggcgtgacctactacaaccccagcctgaagtccagagtgaccatcagcgtggacaccagccggaaccagttctccctgaagctgtctagcgtgacagccgccgataccgccgtgtactactgcaccagagaggacagcagcaactggcggagtagaggccagggaacactggtcacagttagctctggatccggcggaggcggaagtggaggcggaggatctggcggcggaggctctttcgaacaggtacagctgcaggaatctgggcccggacttgtcaagccaagtcagacactttctcttacatgtaccgtgagcggcggaagtataagcagtggaggcttttactggtcttggatacggcagcacccaggcaaaggcttggagtggattggatacattcatcattcaggatctacacactataatccatcccttaagtcccgggtcaccattagcattgatacgtctaagaatctgttcagtctcaggctgtcctccgtcactgctgccgacacagccgtgtactactgcgcctccttggtttactgcggaggcgactgttatagcggctttgattattgggggcaggggaccctcgtaaccgtgagctctacgcgtgcctctacaaagggaccctccgtgtttcctctggctcccagcagcaagtctacaagcggaggaacagccgctctgggctgcctggtcaaggattactttcccgagcctgtgaccgtgtcctggaatagcggagcactgacaagcggcgtgcacacctttccagccgtgctgcaaagcagcggcctgtactctctgagcagcgtggtcacagtgcctagctctagcctgggcacccagacctacatctgcaatgtgaaccacaagcctagcaacaccaaggtggacaagagagtggaacccaagagctgtgaagtgaaaaccgactccaccgaccacgtgaagcccaaagagacagagaacaccaagcagcccagcaagagctgccacaagcccaaggccatcgtgcacaccgagaaagtgaacatgatgagcctgaccgtgctgggcctgcggatgctgttcgccaaaaccgtggccgtgaacttcctgctgaccgccaagctgttcttcctc

SEQ ID NO: 3167 - DNA, 2757 bp, Artificial Sequence
  Synthetic Polynucloetide
atggccttaccagtgaccgccttgctcctgccgctggccttgctgctccacgccgccaggccggaagtgcagctggttgaatctggcggaggactggttcagcctggcggatctctgagactgtcttgtgccgccagcggcttcagcttcagcgacttttggatgagctgggtccgacaggcccctggcaaaggacttgaatgggtcgccacaatcagccaggccggcagcgagaaggactacgtggactctgtgaagggcagattcaccatcagccgggacaacgccaagaagtccctgtacctccagatgaacagcctgagagccgaggacaccgccgtgtactattgtgcctctggcgtgtacagcttcgactacagaggccagggcaccctggtcacagtctcttctggtaccggcggaggcggatctggcggcggaggtagcggtggcggaggatctgaattcgacattcagatgacacagagccctagcagcctgagcgcctctgtgggagacagagtgaccatcacatgcaagagcagccagagcgtgctgtactccagcaatcagaagaactacctggcctggttccagcagaagcctggcaaggctcctaagctgctgatctactgggccagcaccagagaaagcggcgtgccaagcagattttctggcagcggctctggcaccgacttcaccctgacaatatccagcctccagcctgaggacttcgccacctacttttgccaccagtacctgagcagctacacattcggacagggcaccaaggtggaaatcaagcggctcgagggacagcctaaggccaatcctaccgtgacactgttccctccaagcagcgaagaactccaggccaacaaggccacacttgtgtgcctgatctccgacttctaccctggggctgtgacagtggcttggaaggccgatggatctcctgtgaaagccggcgtggaaaccaccaagccatccaagcagagcaacaacaaatacgccgccagctcctacctgagcctgacacctgagcagtggaagtcccacagatcctacagctgccaagtgacccacgaaggcagcaccgtggaaaagacagtggcccctacagagtgcagccccatcaagaccgatgtgattacaatggaccccaaggacaactgctccaaggacgccaacgataccctgctgctccagctgaccaacaccagcgcctactacatgtacttgttgctgctgctgaagtccgtggtgtacttcgccatcatcacatgctgcctgctgcggagaaccgccttctgctgcaacggcgagaagtctagggccaagcgatctggatctggagcaacaaacttctcactactcaaacaagcaggtgacgtggaggagaatcccgggcctactagtatggactggatttggcgcatccttttccttgtcggcgctgctaccggcgcgcattccgggccccagctccagctgcaagagtctggacctggcctggtcaagcctagcgagacactgagcctgacctgtaccgtgtccggcgatagcatcagcagcggcgattactactggggctggatcagacagcctcctggcaaaggactggaatggatcggccacatctactacagcggcgtgacctactacaaccccagcctgaagtccagagtgaccatcagcgtggacaccagccggaaccagttctccctgaagctgtctagcgtgacagccgccgataccgccgtgtactactgcaccagagaggacagcagcaactggcggagtagaggccagggaacactggtcacagttagctctggatccggcggaggcggaagtggaggcggaggatctggcggcggaggctctttcgaagaggtgcagctggttgaatctggcggaggactggttcagcctggcggatctctgagactgtcttgtgccgccagcggctacaccttcaccacctattggatgcactgggtccgacaggcccctggcaaaggacttgagtgggtcggatatatcaggcccagcaccggctacacagagtacaaccagaagttcaaggaccgcttcaccatcagcgccgacaccagcaagaataccgcctacctccagatgaacagcctgagagccgaggacaccgccgtgtactactgtgccagatccagatggctgctggactattggggccagggcacactggttacagtttctacgcgtgcctctacaaagggaccctccgtgtttcctctggctcccagcagcaagtctacaagcggaggaacagccgctctgggctgcctggtcaaggattactttcccgagcctgtgaccgtgtcctggaatagcggagcactgacaagcggcgtgcacacctttccagccgtgctgcaaagcagcggcctgtactctctgagcagcgtggtcacagtgcctagctctagcctgggcacccagacctacatctgcaatgtgaaccacaagcctagcaacaccaaggtggacaagagagtggaacccaagagctgtgaagtgaaaaccgactccaccgaccacgtgaagcccaaagagacagagaacaccaagcagcccagcaagagctgccacaagcccaaggccatcgtgcacaccgagaaagtgaacatgatgagcctgaccgtgctgggcctgcggatgctgttcgccaaaaccgtggccgtgaacttcctgctgaccgccaagctgttcttcctc

SEQ ID NO: 3168 - DNA, 2748 bp, Artificial Sequence
  Synthetic Polynucloetide
atggccttaccagtgaccgccttgctcctgccgctggccttgctgctccacgccgccaggccggaagtgcagctggttgaatctggcggaggactggttcagcctggcggatctctgagactgtcttgtgccgccagcggcttcagcttcagcgacttttggatgagctgggtccgacaggcccctggcaaaggacttgaatgggtcgccacaatcagccaggccggcagcgagaaggactacgtggactctgtgaagggcagattcaccatcagccgggacaacgccaagaagtccctgtacctccagatgaacagcctgagagccgaggacaccgccgtgtactattgtgcctctggcgtgtacagcttcgactacagaggccagggcaccctggtcacagtctcttctggtaccggcggaggcggatctggcggcggaggtagcggtggcggaggatctgaattcgacatccagatgacacagagccctagcagcctgtctgccagcgtgggagacagagtgaccatcacctgtagagccagccaggacatcagcaactacctgaactggtatcagcagaagcccggcaaggcccctaagctgctgatctactacaccagcagactgcacagcggcgtgcccagcagattttctggctctggcagcggcaccgacttcaccctgacaatatctagcctccagcctgaggacttcgccacctactattgccagcagggcaacaccctgccttacacatttggacagggcaccaaggtggaaatcaagagactcgagggacagcctaaggccaatcctaccgtgacactgttccctccaagcagcgaagaactccaggccaacaaggccacacttgtgtgcctgatctccgacttctaccctggggctgtgacagtggcttggaaggccgatggatctcctgtgaaagccggcgtggaaaccaccaagccatccaagcagagcaacaacaaatacgccgccagctcctacctgagcctgacacctgagcagtggaagtcccacagatcctacagctgccaagtgacccacgaaggcagcaccgtggaaaagacagtggcccctacagagtgcagccccatcaagaccgatgtgattacaatggaccccaaggacaactgctccaaggacgccaacgataccctgctgctccagctgaccaacaccagcgcctactacatgtacttgttgctgctgctgaagtccgtggtgtacttcgccatcatcacatgctgcctgctgcggagaaccgccttctgctgcaacggcgagaagtctagggccaagcgatctggatctggagcaacaaacttctcactactcaaacaagcaggtgacgtggaggagaatcccgggcctactagtatggactggatttggcgcatccttttccttgtcggcgctgctaccggcgcgcattccgggccccagctccagctgcaagagtctggacctggcctggtcaagcctagcgagacactgagcctgacctgtaccgtgtccggcgatagcatcagcagcggcgattactactggggctggatcagacagcctcctggcaaaggactggaatggatcggccacatctactacagcggcgtgacctactacaaccccagcctgaagtccagagtgaccatcagcgtggacaccagccggaaccagttctccctgaagctgtctagcgtgacagccgccgataccgccgtgtactactgcaccagagaggacagcagcaactggcggagtagaggccagggaacactggtcacagttagctctggatccggcggaggcggaagtggaggcggaggatctggcggcggaggctctttcgaagaagtgcagctggttgaatcaggtggcggcctggttcaacctggcggatctctgagactgagctgtgccgccagcggcttcaccttcagcgactactttatgagctgggtccgacaggcccctggcaaaggacttgaatgggtcgccaccatcagcaatggcggcacctacacttactaccccgacagcgtgaagggcagattcaccatctccagagacaacagcaagaacaccctgtacctccagatgaactccctgagagccgaggacaccgccgtgtactactgcgccagattcgacggctacatcttcgactattggggccagggcaccctggtcacagtctcttctacgcgtgcctctacaaagggaccctccgtgtttcctctggctcccagcagcaagtctacaagcggaggaacagccgctctgggctgcctggtcaaggattactttcccgagcctgtgaccgtgtcctggaatagcggagcactgacaagcggcgtgcacacctttccagccgtgctgcaaagcagcggcctgtactctctgagcagcgtggtcacagtgcctagctctagcctgggcacccagacctacatctgcaatgtgaaccacaagcctagcaacaccaaggtggacaagagagtggaacccaagagctgtgaagtgaaaaccgactccaccgaccacgtgaagcccaaagagacagagaacaccaagcagcccagcaagagctgccacaagcccaaggccatcgtgcacaccgagaaagtgaacatgatgagcctgaccgtgctgggcctgcggatgctgttcgccaaaaccgtggccgtgaacttcctgctgaccgccaagctgttcttcctc

SEQ ID NO: 3169 - DNA, 2283 bp, Artificial Sequence
  Synthetic Polynucloetide
atggccttaccagtgaccgccttgctcctgccgctggccttgctgctccacgccgccaggccggaagtgcagctggttgaatctggcggaggactggttcagcctggcggatctctgagactgtcttgtgccgccagcggcttcagcttcagcgacttttggatgagctgggtccgacaggcccctggcaaaggacttgaatgggtcgccacaatcagccaggccggcagcgagaaggactacgtggactctgtgaagggcagattcaccatcagccgggacaacgccaagaagtccctgtacctccagatgaacagcctgagagccgaggacaccgccgtgtactattgtgcctctggcgtgtacagcttcgactacagaggccagggcaccctggtcacagtctcttctggtaccggcggaggcggatctggcggcggaggtagcggtggcggaggatctgaattcgacatccagatgacacagactacatcctccctgtctgcctctctgggagacagagtcaccatcagttgcagggcaagtcaggacattagtaagtacctgaactggtatcagcagaaaccagatggaactgttaaactcctgatctaccatacatcaagattacactcaggagtcccatcaaggttcagtggcagtgggtctggaacagattattctctcaccattagcaacctggagcaagaagatattgccacttacttttgccaacagggtaatacgcttccgtacacgttcggaggggggaccaagctggagatcacactcgagggacagcctaaggccaatcctaccgtgacactgttccctccaagcagcgaagaactccaggccaacaaggccacacttgtgtgcctgatctccgacttctaccctggggctgtgacagtggcttggaaggccgatggatctcctgtgaaagccggcgtggaaaccaccaagccatccaagcagagcaacaacaaatacgccgccagctcctacctgagcctgacacctgagcagtggaagtcccacagatcctacagctgccaagtgacccacgaaggcagcaccgtggaaaagacagtggcccctacagagtgcagcggcagagccgattgcggctttaccagcgagagctaccagcagggcgtgctgagcgccaccatcctgtacgagatcctgctgggcaaggccaccctgtacgccgtgctggtgtctgccctggtgctgatggctatggtcaagcggaaggacagccggggacgcgccaagagaagcggatctggcgtgaagcagaccctgaatttcgacctgctgaagctggctggcgacgtggaatccaacccaggccctactagtatggactggatttggcgcatccttttccttgtcggcgctgctaccggcgcgcattccttcgaagtgaaactgcaggagtcaggacctggcctggtggcgccctcacagagcctgtccgtcacatgcactgtctcaggggtctcattacccgactatggtgtaagctggattcgccagcctccacgaaagggtctggagtggctgggagtaatatggggtagtgaaaccacatactataattcagctctcaaatccagactgaccatcatcaaggacaactccaagagccaagttttcttaaaaatgaacagtctgcaaactgatgacacagccatttactactgtgccaaacattattactacggtggtagctatgctatggactactggggccaaggaacctcagtcaccgtctcctcaacgcgtgcctctacaaagggaccctccgtgtttcctctggctcccagcagcaagtctacaagcggaggaacagccgctctgggctgcctggtcaaggattactttcccgagcctgtgaccgtgtcctggaatagcggagcactgacaagcggcgtgcacacctttccagccgtgctgcaaagcagcggcctgtactctctgagcagcgtggtcacagtgcctagctctagcctgggcacccagacctacatctgcaatgtgaaccacaagcctagcaacaccaaggtggacaagagagtggaacccaagagctgtatccccgaggacacattcttcccaagccccgagagcagctgcgacgtgaagctggtggaaaagagcttcgagacagacaccaacctgaacttccagaacctgagcgtgatcggcttcagaatcctgctgctgaaagtggccggctttaacctgctgatgaccctgcggctgtggtccagc

SEQ ID NO: 3170 - DNA, 2286 bp, Artificial Sequence
  Synthetic Polynucloetide
atggccttaccagtgaccgccttgctcctgccgctggccttgctgctccacgccgccaggccggaagtgcagctggttgaatctggcggaggactggttcagcctggcggatctctgagactgtcttgtgccgccagcggcttcagcttcagcgacttttggatgagctgggtccgacaggcccctggcaaaggacttgaatgggtcgccacaatcagccaggccggcagcgagaaggactacgtggactctgtgaagggcagattcaccatcagccgggacaacgccaagaagtccctgtacctccagatgaacagcctgagagccgaggacaccgccgtgtactattgtgcctctggcgtgtacagcttcgactacagaggccagggcaccctggtcacagtctcttctggtaccggcggaggcggatctggcggcggaggtagcggtggcggaggatctgaattcgagatcgtgatgacccagagccctgccaccctgtctctgagccctggcgaaagagccaccctgagctgtagagccagccaggacatcagcaagtacctgaactggtatcagcagaagcccggccaggcccccagactgctgatctaccacaccagcagactgcacagcggcatccccgccagattttctggctctggcagcggcaccgactacaccctgacaatcagcagcctccagcccgaggacttcgccgtgtacttctgtcagcaaggcaacaccctgccctacaccttcggccagggcaccaagctggaaatcaagctcgagggacagcctaaggccaatcctaccgtgacactgttccctccaagcagcgaagaactccaggccaacaaggccacacttgtgtgcctgatctccgacttctaccctggggctgtgacagtggcttggaaggccgatggatctcctgtgaaagccggcgtggaaaccaccaagccatccaagcagagcaacaacaaatacgccgccagctcctacctgagcctgacacctgagcagtggaagtcccacagatcctacagctgccaagtgacccacgaaggcagcaccgtggaaaagacagtggcccctacagagtgcagcggcagagccgattgcggctttaccagcgagagctaccagcagggcgtgctgagcgccaccatcctgtacgagatcctgctgggcaaggccaccctgtacgccgtgctggtgtctgccctggtgctgatggctatggtcaagcggaaggacagccggggacgcgccaagagaagcggatctggcgtgaagcagaccctgaatttcgacctgctgaagctggctggcgacgtggaatccaacccaggccctactagtatggactggatttggcgcatccttttccttgtcggcgctgctaccggcgcgcattccttcgaacaggtgcaactccaggaatctggccctggcctcgtgaagcccagcgagacactgagcctgacctgtaccgtgtccggcgtgtccctgcctgactatggcgtgtcctggatcagacagccccctggcaagggcctggaatggatcggagtgatttggggcagcgaaaccacctactacaacagctccctgaagtccagagtgaccatctccaaggacaactccaagaaccaggtgtccctgaagctgagcagcgtgacagccgccgacaccgccgtgtattactgcgccaagcactactactacggcggcagctacgctatggactactggggccagggaaccctcgtgaccgtgtctagtacgcgtgcctctacaaagggaccctccgtgtttcctctggctcccagcagcaagtctacaagcggaggaacagccgctctgggctgcctggtcaaggattactttcccgagcctgtgaccgtgtcctggaatagcggagcactgacaagcggcgtgcacacctttccagccgtgctgcaaagcagcggcctgtactctctgagcagcgtggtcacagtgcctagctctagcctgggcacccagacctacatctgcaatgtgaaccacaagcctagcaacaccaaggtggacaagagagtggaacccaagagctgtatccccgaggacacattcttcccaagccccgagagcagctgcgacgtgaagctggtggaaaagagcttcgagacagacaccaacctgaacttccagaacctgagcgtgatcggcttcagaatcctgctgctgaaagtggccggctttaacctgctgatgaccctgcggctgtggtccagc

SEQ ID NO: 3171 - DNA, 2289 bp, Artificial Sequence
  Synthetic Polynucloetide
atggccttaccagtgaccgccttgctcctgccgctggccttgctgctccacgccgccaggccggaagtgcagctggttgaatctggcggaggactggttcagcctggcggatctctgagactgtcttgtgccgccagcggcttcagcttcagcgacttttggatgagctgggtccgacaggcccctggcaaaggacttgaatgggtcgccacaatcagccaggccggcagcgagaaggactacgtggactctgtgaagggcagattcaccatcagccgggacaacgccaagaagtccctgtacctccagatgaacagcctgagagccgaggacaccgccgtgtactattgtgcctctggcgtgtacagcttcgactacagaggccagggcaccctggtcacagtctcttctggtaccggcggaggcggatctggcggcggaggtagcggtggcggaggatctgaattcgacgagatcgtgctgacacagagccccgccaccctgtcactgtctccaggcgaaagagccaccctgagctgtagcgccagcagcagcgtgtcctacatgcactggtatcagcagaagcccggccaggcccccagactgctgatctacgataccagcaagctggcctccggcatccccgccagattttctggcagcggctccggcaccgacttcaccctgacaatcagcagcctggaacccgaggacgtggccgtgtactactgttttcaaggcagcgtgtaccccttcaccttcggccagggcaccaagctggaaatcaagagactcgagggacagcctaaggccaatcctaccgtgacactgttccctccaagcagcgaagaactccaggccaacaaggccacacttgtgtgcctgatctccgacttctaccctggggctgtgacagtggcttggaaggccgatggatctcctgtgaaagccggcgtggaaaccaccaagccatccaagcagagcaacaacaaatacgccgccagctcctacctgagcctgacacctgagcagtggaagtcccacagatcctacagctgccaagtgacccacgaaggcagcaccgtggaaaagacagtggcccctacagagtgcagcggcagagccgattgcggctttaccagcgagagctaccagcagggcgtgctgagcgccaccatcctgtacgagatcctgctgggcaaggccaccctgtacgccgtgctggtgtctgccctggtgctgatggctatggtcaagcggaaggacagccggggacgcgccaagagaagcggatctggcgtgaagcagaccctgaatttcgacctgctgaagctggctggcgacgtggaatccaacccaggccctactagtatggactggatttggcgcatccttttccttgtcggcgctgctaccggcgcgcattccttcgaacaggtgcagctccaggaatctggccctggcctcgtgaagcctagccagaccctgagcctgacctgtaccgtgtctggcggcagcatcagcacaagcggcatgggcgtgggctggatcagacagcaccctggcaagggcctggaatggatcggccacatttggtgggacgacgacaagcggtacaaccccgccctgaagtccagagtgaccatcagcgtggacaccagcaagaaccagttcagcctgaagctgagcagcgtgacagccgccgataccgccgtgtattattgcgcccggatggaactgtggtcctactacttcgactactggggccagggaaccctcgtgaccgtgtctagtacgcgtgcctctacaaagggaccctccgtgtttcctctggctcccagcagcaagtctacaagcggaggaacagccgctctgggctgcctggtcaaggattactttcccgagcctgtgaccgtgtcctggaatagcggagcactgacaagcggcgtgcacacctttccagccgtgctgcaaagcagcggcctgtactctctgagcagcgtggtcacagtgcctagctctagcctgggcacccagacctacatctgcaatgtgaaccacaagcctagcaacaccaaggtggacaagagagtggaacccaagagctgtatccccgaggacacattcttcccaagccccgagagcagctgcgacgtgaagctggtggaaaagagcttcgagacagacaccaacctgaacttccagaacctgagcgtgatcggcttcagaatcctgctgctgaaagtggccggctttaacctgctgatgaccctgcggctgtggtccagc

SEQ ID NO: 3172 - DNA, 2283 bp, Artificial Sequence
  Synthetic Polynucloetide
atggccttaccagtgaccgccttgctcctgccgctggccttgctgctccacgccgccaggccggaagtgcagctggttgaatctggcggaggactggttcagcctggcggatctctgagactgtcttgtgccgccagcggcttcagcttcagcgacttttggatgagctgggtccgacaggcccctggcaaaggacttgaatgggtcgccacaatcagccaggccggcagcgagaaggactacgtggactctgtgaagggcagattcaccatcagccgggacaacgccaagaagtccctgtacctccagatgaacagcctgagagccgaggacaccgccgtgtactattgtgcctctggcgtgtacagcttcgactacagaggccagggcaccctggtcacagtctcttctggtaccggcggaggcggatctggcggcggaggtagcggtggcggaggatctgaattcgactacatccacgtgacacagagccctagcagcctgtccgtgtccatcggcgatagagtgaccatcaactgccagacctctcaaggcgtgggcagcgacctgcactggtatcagcacaaacctggcagagcccctaagctgctgatccaccatgccagctctgtggaagatggcgtgcccagcagattttccggcaccggatttcacaccagcttcaacctgacaatcaacgacctccaggccgacgacatcggcacctactactgtcaagtgctccagagcttcggcagaggcagcagactggatacaaaactcgagggacagcctaaggccaatcctaccgtgacactgttccctccaagcagcgaagaactccaggccaacaaggccacacttgtgtgcctgatctccgacttctaccctggggctgtgacagtggcttggaaggccgatggatctcctgtgaaagccggcgtggaaaccaccaagccatccaagcagagcaacaacaaatacgccgccagctcctacctgagcctgacacctgagcagtggaagtcccacagatcctacagctgccaagtgacccacgaaggcagcaccgtggaaaagacagtggcccctacagagtgcagcggcagagccgattgcggctttaccagcgagagctaccagcagggcgtgctgagcgccaccatcctgtacgagatcctgctgggcaaggccaccctgtacgccgtgctggtgtctgccctggtgctgatggctatggtcaagcggaaggacagccggggacgcgccaagagaagcggatctggcgtgaagcagaccctgaatttcgacctgctgaagctggctggcgacgtggaatccaacccaggccctactagtatggactggatttggcgcatccttttccttgtcggcgctgctaccggcgcgcattccttcgaaagggcacacctggtgcagtctggcaccgccatgaagaaacctggcgcttccgtcagagtgtcctgtcagacaagcggctacaccttcacagcccacatcctgttctggttcagacaggccccaggcagaggactggaatgggtcggatggatcaagccccagtacggggccgtgaatttcggcggaggcttcagagacagagtgaccctgaccagggacgtgtaccgggaaatcgcctacatggacatccggggcctgaagcctgatgacaccgccgtgtactactgcgccagggatagaagctacggcgacagctcttgggctctcgatgcttggggacagggcacaacagtggtggtgtctgctacgcgtgcctctacaaagggaccctccgtgtttcctctggctcccagcagcaagtctacaagcggaggaacagccgctctgggctgcctggtcaaggattactttcccgagcctgtgaccgtgtcctggaatagcggagcactgacaagcggcgtgcacacctttccagccgtgctgcaaagcagcggcctgtactctctgagcagcgtggtcacagtgcctagctctagcctgggcacccagacctacatctgcaatgtgaaccacaagcctagcaacaccaaggtggacaagagagtggaacccaagagctgtatccccgaggacacattcttcccaagccccgagagcagctgcgacgtgaagctggtggaaaagagcttcgagacagacaccaacctgaacttccagaacctgagcgtgatcggcttcagaatcctgctgctgaaagtggccggctttaacctgctgatgaccctgcggctgtggtccagc

SEQ ID NO: 3173 - DNA, 2313 bp, Artificial Sequence
  Synthetic Polynucloetide
atggccttaccagtgaccgccttgctcctgccgctggccttgctgctccacgccgccaggccggaagtgcagctggttgaatctggcggaggactggttcagcctggcggatctctgagactgtcttgtgccgccagcggcttcagcttcagcgacttttggatgagctgggtccgacaggcccctggcaaaggacttgaatgggtcgccacaatcagccaggccggcagcgagaaggactacgtggactctgtgaagggcagattcaccatcagccgggacaacgccaagaagtccctgtacctccagatgaacagcctgagagccgaggacaccgccgtgtactattgtgcctctggcgtgtacagcttcgactacagaggccagggcaccctggtcacagtctcttctggtaccggcggaggcggatctggcggcggaggtagcggtggcggaggatctgaattcgacgtgcagatgatccagacccccgatagcctggccgtgtccctgggacagagagccaccatctcttgcagagccagcgagagcgtggacaactacggcatcagcttcatgcactggtatcagcagaagcccggccagagccccaagctgctgatctacagagcctccaacctggaaagcggcatccccgccagattttccggcagcggcagcagaaccgacttcaccctgaccatcaaccccgtggaaaccgacgacgtggcaacctactactgccagcagaacaacaaggacccccccacctttggcggaggcaccaagctggaaatcaagctcgagggacagcctaaggccaatcctaccgtgacactgttccctccaagcagcgaagaactccaggccaacaaggccacacttgtgtgcctgatctccgacttctaccctggggctgtgacagtggcttggaaggccgatggatctcctgtgaaagccggcgtggaaaccaccaagccatccaagcagagcaacaacaaatacgccgccagctcctacctgagcctgacacctgagcagtggaagtcccacagatcctacagctgccaagtgacccacgaaggcagcaccgtggaaaagacagtggcccctacagagtgcagcggcagagccgattgcggctttaccagcgagagctaccagcagggcgtgctgagcgccaccatcctgtacgagatcctgctgggcaaggccaccctgtacgccgtgctggtgtctgccctggtgctgatggctatggtcaagcggaaggacagccggggacgcgccaagagaagcggatctggcgtgaagcagaccctgaatttcgacctgctgaagctggctggcgacgtggaatccaacccaggccctactagtatggactggatttggcgcatccttttccttgtcggcgctgctaccggcgcgcattccttcgaagggggaggcggctctcaggtgcaactccagcagtctggcgctgagcttgtgaagcctggggccagcgtgaagattagctgcaaggccagcggctacgccttcagcagctactggatgaactgggtcaagcagcggcctggcaagggcctggaatggatcggccaaatctaccccggcgacggcgacaccacctacaacggcaagttcaagggcaaggccaccctgacagccgacaagagcagcagcaccgtgtacatgcaactgaacagcctgaccagcgaggacagcgccgtgtacttctgcgtgcggtactactacggcagctccggctacttcgactattggggccagggcaccacactgaccgtgtcctctacgcgtgcctctacaaagggaccctccgtgtttcctctggctcccagcagcaagtctacaagcggaggaacagccgctctgggctgcctggtcaaggattactttcccgagcctgtgaccgtgtcctggaatagcggagcactgacaagcggcgtgcacacctttccagccgtgctgcaaagcagcggcctgtactctctgagcagcgtggtcacagtgcctagctctagcctgggcacccagacctacatctgcaatgtgaaccacaagcctagcaacaccaaggtggacaagagagtggaacccaagagctgtatccccgaggacacattcttcccaagccccgagagcagctgcgacgtgaagctggtggaaaagagcttcgagacagacaccaacctgaacttccagaacctgagcgtgatcggcttcagaatcctgctgctgaaagtggccggctttaacctgctgatgaccctgcggctgtggtccagc

SEQ ID NO: 3174 - DNA, 2286 bp, Artificial Sequence
  Synthetic Polynucloetide
atggccttaccagtgaccgccttgctcctgccgctggccttgctgctccacgccgccaggccggaagtgcagctggttgaatctggcggaggactggttcagcctggcggatctctgagactgtcttgtgccgccagcggcttcagcttcagcgacttttggatgagctgggtccgacaggcccctggcaaaggacttgaatgggtcgccacaatcagccaggccggcagcgagaaggactacgtggactctgtgaagggcagattcaccatcagccgggacaacgccaagaagtccctgtacctccagatgaacagcctgagagccgaggacaccgccgtgtactattgtgcctctggcgtgtacagcttcgactacagaggccagggcaccctggtcacagtctcttctggtaccggcggaggcggatctggcggcggaggtagcggtggcggaggatctgaattcgacgtgcagatgatccagacccccagcagcctgtctgccagcctgggcgatagagtgaccatcagctgtcgggccagccaggacatcggcaactacctgaactggtatcagcagaaacccgacggcaccgtgaagctgctgatctactacaccagcagactgcacagcggcgtgcccagcagattttctggcagcggctctggcaccgagtacagcctgaccatctccaacctggaacaggaagatattgctacctacttctgtcagcaaggcagcgccctgccccctacatttggcggcggaacaaagctggaaatcaacctcgagggacagcctaaggccaatcctaccgtgacactgttccctccaagcagcgaagaactccaggccaacaaggccacacttgtgtgcctgatctccgacttctaccctggggctgtgacagtggcttggaaggccgatggatctcctgtgaaagccggcgtggaaaccaccaagccatccaagcagagcaacaacaaatacgccgccagctcctacctgagcctgacacctgagcagtggaagtcccacagatcctacagctgccaagtgacccacgaaggcagcaccgtggaaaagacagtggcccctacagagtgcagcggcagagccgattgcggctttaccagcgagagctaccagcagggcgtgctgagcgccaccatcctgtacgagatcctgctgggcaaggccaccctgtacgccgtgctggtgtctgccctggtgctgatggctatggtcaagcggaaggacagccggggacgcgccaagagaagcggatctggcgtgaagcagaccctgaatttcgacctgctgaagctggctggcgacgtggaatccaacccaggccctactagtatggactggatttggcgcatccttttccttgtcggcgctgctaccggcgcgcattccttcgaagctctccagctccagcagtctggcgcagaactcgtgcggcctggcgcttctgtgaccctgagctgtaaagccagcggctacaccttcaccgactacgagatgcactgggtcaagcagacccctgtgcacggcctggaatggatcggagccatcgaccctgagacaggcggcaccgcctacaaccagaagttcgagggcaaggccatcctgaccgccgacaagagcagcagcacagcctacatggaactgcggagcctgacctccgaggacagccccgtgtactactgtgccagacggcggtactacggcagcagctccttcgactattggggccagggcaccaccctgaccgtgtctagtacgcgtgcctctacaaagggaccctccgtgtttcctctggctcccagcagcaagtctacaagcggaggaacagccgctctgggctgcctggtcaaggattactttcccgagcctgtgaccgtgtcctggaatagcggagcactgacaagcggcgtgcacacctttccagccgtgctgcaaagcagcggcctgtactctctgagcagcgtggtcacagtgcctagctctagcctgggcacccagacctacatctgcaatgtgaaccacaagcctagcaacaccaaggtggacaagagagtggaacccaagagctgtatccccgaggacacattcttcccaagccccgagagcagctgcgacgtgaagctggtggaaaagagcttcgagacagacaccaacctgaacttccagaacctgagcgtgatcggcttcagaatcctgctgctgaaagtggccggctttaacctgctgatgaccctgcggctgtggtccagc

SEQ ID NO: 3175 - DNA, 2298 bp, Artificial Sequence
  Synthetic Polynucloetide
atggccttaccagtgaccgccttgctcctgccgctggccttgctgctccacgccgccaggccggaagtgcagctggttgaatctggcggaggactggttcagcctggcggatctctgagactgtcttgtgccgccagcggcttcagcttcagcgacttttggatgagctgggtccgacaggcccctggcaaaggacttgaatgggtcgccacaatcagccaggccggcagcgagaaggactacgtggactctgtgaagggcagattcaccatcagccgggacaacgccaagaagtccctgtacctccagatgaacagcctgagagccgaggacaccgccgtgtactattgtgcctctggcgtgtacagcttcgactacagaggccagggcaccctggtcacagtctcttctggtaccggcggaggcggatctggcggcggaggtagcggtggcggaggatctgaattcgacatcgtcctgacccagtccccagccagcctggcggtgtccctgggtcaacgagctaccatttcctgcagagcctctaagtccgtatccacttccggctatagttacctgcattggtaccaacagaaaccagggcagccacccaagctgctcatctatctggcctcaaacctggagtccggcgtgcccgccagattctccggaagtgggagcggcaccgactttacattgaacatccacccagtcgaagaggaagatgctgccacttattactgtcagcactccagggagctgccatttacatttggctctggcacaaaactggagatcaaactcgagggacagcctaaggccaatcctaccgtgacactgttccctccaagcagcgaagaactccaggccaacaaggccacacttgtgtgcctgatctccgacttctaccctggggctgtgacagtggcttggaaggccgatggatctcctgtgaaagccggcgtggaaaccaccaagccatccaagcagagcaacaacaaatacgccgccagctcctacctgagcctgacacctgagcagtggaagtcccacagatcctacagctgccaagtgacccacgaaggcagcaccgtggaaaagacagtggcccctacagagtgcagcggcagagccgattgcggctttaccagcgagagctaccagcagggcgtgctgagcgccaccatcctgtacgagatcctgctgggcaaggccaccctgtacgccgtgctggtgtctgccctggtgctgatggctatggtcaagcggaaggacagccggggacgcgccaagagaagcggatctggcgtgaagcagaccctgaatttcgacctgctgaagctggctggcgacgtggaatccaacccaggccctactagtatggactggatttggcgcatccttttccttgtcggcgctgctaccggcgcgcattccttcgaacaggttcagctggtcgagtccgggggaggtctggtacagccgggtggcagcctcaagctgtcatgtgccgcatctggttttgactttagcaggtattggatgagctgggtccgccaggccccgggcaagggacttgagtggattggagaaataaaccctacttccagcacaatcaacttcacaccttctttgaaagataaggtttttatctctcgggataacgctaaaaacacactgtacttgcagatgtctaaggtgcgaagcgaagacaccgccctctattattgcgcccggggtaattactaccgctatggggatgcgatggactattgggggcaaggtacctccgtcacggtctcaacgcgtgcctctacaaagggaccctccgtgtttcctctggctcccagcagcaagtctacaagcggaggaacagccgctctgggctgcctggtcaaggattactttcccgagcctgtgaccgtgtcctggaatagcggagcactgacaagcggcgtgcacacctttccagccgtgctgcaaagcagcggcctgtactctctgagcagcgtggtcacagtgcctagctctagcctgggcacccagacctacatctgcaatgtgaaccacaagcctagcaacaccaaggtggacaagagagtggaacccaagagctgtatccccgaggacacattcttcccaagccccgagagcagctgcgacgtgaagctggtggaaaagagcttcgagacagacaccaacctgaacttccagaacctgagcgtgatcggcttcagaatcctgctgctgaaagtggccggctttaacctgctgatgaccctgcggctgtggtccagc

SEQ ID NO: 3176 - DNA, 2292 bp, Artificial Sequence
  Synthetic Polynucloetide
atggccttaccagtgaccgccttgctcctgccgctggccttgctgctccacgccgccaggccggaagtgcagctggttgaatctggcggaggactggttcagcctggcggatctctgagactgtcttgtgccgccagcggcttcagcttcagcgacttttggatgagctgggtccgacaggcccctggcaaaggacttgaatgggtcgccacaatcagccaggccggcagcgagaaggactacgtggactctgtgaagggcagattcaccatcagccgggacaacgccaagaagtccctgtacctccagatgaacagcctgagagccgaggacaccgccgtgtactattgtgcctctggcgtgtacagcttcgactacagaggccagggcaccctggtcacagtctcttctggtaccggcggaggcggatctggcggcggaggtagcggtggcggaggatctgaattcgacatccagatgacccagagccctagctcactgagcgccagcgtgggcgacagggtgaccattacctgctccgccagccaggacatcagcaactacctgaactggtaccagcagaagcccggcaaggcccccaagctgctgatctactacacctccaacctgcactccggcgtgcccagcaggttcagcggaagcggcagcggcaccgatttcaccctgaccatctccagcctgcagcccgaggacttcgccacctactactgccagcagtacaggaagctcccctggactttcggccagggcaccaaactggagatcaagcgtctcgagggacagcctaaggccaatcctaccgtgacactgttccctccaagcagcgaagaactccaggccaacaaggccacacttgtgtgcctgatctccgacttctaccctggggctgtgacagtggcttggaaggccgatggatctcctgtgaaagccggcgtggaaaccaccaagccatccaagcagagcaacaacaaatacgccgccagctcctacctgagcctgacacctgagcagtggaagtcccacagatcctacagctgccaagtgacccacgaaggcagcaccgtggaaaagacagtggcccctacagagtgcagcggcagagccgattgcggctttaccagcgagagctaccagcagggcgtgctgagcgccaccatcctgtacgagatcctgctgggcaaggccaccctgtacgccgtgctggtgtctgccctggtgctgatggctatggtcaagcggaaggacagccggggacgcgccaagagaagcggatctggcgtgaagcagaccctgaatttcgacctgctgaagctggctggcgacgtggaatccaacccaggccctactagtatggactggatttggcgcatccttttccttgtcggcgctgctaccggcgcgcattccttcgaacaggtgcagctggtccagagcggcgccgaagtgaagaagcccggcagctccgtgaaagtgagctgcaaggccagcggcggcaccttcagcaactactggatgcactgggtgaggcaggcccccggacagggcctggagtggatgggcgccacctacaggggccacagcgacacctactacaaccagaagttcaagggccgggtgaccatcaccgccgacaagagcaccagcaccgcctacatggaactgagcagcctcaggagcgaggacaccgctgtgtattactgcgccaggggcgccatctacgacggctacgacgtgctggacaactggggccagggcacactggtgaccgtgtccagcacgcgtgcctctacaaagggaccctccgtgtttcctctggctcccagcagcaagtctacaagcggaggaacagccgctctgggctgcctggtcaaggattactttcccgagcctgtgaccgtgtcctggaatagcggagcactgacaagcggcgtgcacacctttccagccgtgctgcaaagcagcggcctgtactctctgagcagcgtggtcacagtgcctagctctagcctgggcacccagacctacatctgcaatgtgaaccacaagcctagcaacaccaaggtggacaagagagtggaacccaagagctgtatccccgaggacacattcttcccaagccccgagagcagctgcgacgtgaagctggtggaaaagagcttcgagacagacaccaacctgaacttccagaacctgagcgtgatcggcttcagaatcctgctgctgaaagtggccggctttaacctgctgatgaccctgcggctgtggtccagc

SEQ ID NO: 3177 - DNA, 2292 bp, Artificial Sequence
  Synthetic Polynucloetide
atggccttaccagtgaccgccttgctcctgccgctggccttgctgctccacgccgccaggccggaagtgcagctggttgaatctggcggaggactggttcagcctggcggatctctgagactgtcttgtgccgccagcggcttcagcttcagcgacttttggatgagctgggtccgacaggcccctggcaaaggacttgaatgggtcgccacaatcagccaggccggcagcgagaaggactacgtggactctgtgaagggcagattcaccatcagccgggacaacgccaagaagtccctgtacctccagatgaacagcctgagagccgaggacaccgccgtgtactattgtgcctctggcgtgtacagcttcgactacagaggccagggcaccctggtcacagtctcttctggtaccggcggaggcggatctggcggcggaggtagcggtggcggaggatctgaattcgacatcgtgctgacacagagccctgccaccctgtctctgagccctggcgatagagccaccatcagctgtagagccagcgagagcgtgaccatcctgggcagccacctgatctactggtatcagcagaagcccggccagccccccagactgctgattcagctggcctccaatgtgcagaccggcgtgccagccagattttccggcagcggcagcagaaccgacttcaccctgaccatcagcagcgtggaacccgaggacttcgccgtgtactactgcctccagagccggaccatccccagaacattcggccagggcaccaagctggaaatcaagagactcgagggacagcctaaggccaatcctaccgtgacactgttccctccaagcagcgaagaactccaggccaacaaggccacacttgtgtgcctgatctccgacttctaccctggggctgtgacagtggcttggaaggccgatggatctcctgtgaaagccggcgtggaaaccaccaagccatccaagcagagcaacaacaaatacgccgccagctcctacctgagcctgacacctgagcagtggaagtcccacagatcctacagctgccaagtgacccacgaaggcagcaccgtggaaaagacagtggcccctacagagtgcagcggcagagccgattgcggctttaccagcgagagctaccagcagggcgtgctgagcgccaccatcctgtacgagatcctgctgggcaaggccaccctgtacgccgtgctggtgtctgccctggtgctgatggctatggtcaagcggaaggacagccggggacgcgccaagagaagcggatctggcgtgaagcagaccctgaatttcgacctgctgaagctggctggcgacgtggaatccaacccaggccctactagtatggactggatttggcgcatccttttccttgtcggcgctgctaccggcgcgcattccttcgaacaggtgcagctggtgcagtctggccccgaagtgaagaaacccggcgagtccgtgaagatcagctgcaaggccagcggctacaccttccggcactacagcatgaactgggtcaagcaggccccaggccagggcctgaagtggatgggcagaatcaacaccgagagcggcgtgcccatctacgccgacgacttcaagggccggttcagcttcaccgtggacaccagcgccagcaccgcctacctggaaatctccagcctgaccagcgaggataccgccgtgtatttctgctccaacgactacctgtacagcctggatttctggggccagggaaccaccctgacagtgtcctctacgcgtgcctctacaaagggaccctccgtgtttcctctggctcccagcagcaagtctacaagcggaggaacagccgctctgggctgcctggtcaaggattactttcccgagcctgtgaccgtgtcctggaatagcggagcactgacaagcggcgtgcacacctttccagccgtgctgcaaagcagcggcctgtactctctgagcagcgtggtcacagtgcctagctctagcctgggcacccagacctacatctgcaatgtgaaccacaagcctagcaacaccaaggtggacaagagagtggaacccaagagctgtatccccgaggacacattcttcccaagccccgagagcagctgcgacgtgaagctggtggaaaagagcttcgagacagacaccaacctgaacttccagaacctgagcgtgatcggcttcagaatcctgctgctgaaagtggccggctttaacctgctgatgaccctgcggctgtggtccagc

SEQ ID NO: 3178 - DNA, 2295 bp, Artificial Sequence
  Synthetic Polynucloetide
atggccttaccagtgaccgccttgctcctgccgctggccttgctgctccacgccgccaggccggaagtgcagctggttgaatctggcggaggactggttcagcctggcggatctctgagactgtcttgtgccgccagcggcttcagcttcagcgacttttggatgagctgggtccgacaggcccctggcaaaggacttgaatgggtcgccacaatcagccaggccggcagcgagaaggactacgtggactctgtgaagggcagattcaccatcagccgggacaacgccaagaagtccctgtacctccagatgaacagcctgagagccgaggacaccgccgtgtactattgtgcctctggcgtgtacagcttcgactacagaggccagggcaccctggtcacagtctcttctggtaccggcggaggcggatctggcggcggaggtagcggtggcggaggatctgaattccagtctgtgctgacacagcctcctagtgtgtctggcgctcctggacagagagtgaccatcagctgtacaggcagcagcagcaatatcggagccggctttgacgtgcactggtatcagcagctgcctggcacagcccctaaactgctgatctacggcaacagcaacagacccagcggcgtgcccgatagattttccggctctaagagcggcacaagcgccagcctggctattactggactccaggccgaggacgaggccgactactactgtcagagctacgacagcagcctgagcggctacgttttcggcaccggcaccaaagtgacagtgcttggtctcgagggacagcctaaggccaatcctaccgtgacactgttccctccaagcagcgaagaactccaggccaacaaggccacacttgtgtgcctgatctccgacttctaccctggggctgtgacagtggcttggaaggccgatggatctcctgtgaaagccggcgtggaaaccaccaagccatccaagcagagcaacaacaaatacgccgccagctcctacctgagcctgacacctgagcagtggaagtcccacagatcctacagctgccaagtgacccacgaaggcagcaccgtggaaaagacagtggcccctacagagtgcagcggcagagccgattgcggctttaccagcgagagctaccagcagggcgtgctgagcgccaccatcctgtacgagatcctgctgggcaaggccaccctgtacgccgtgctggtgtctgccctggtgctgatggctatggtcaagcggaaggacagccggggacgcgccaagagaagcggatctggcgtgaagcagaccctgaatttcgacctgctgaagctggctggcgacgtggaatccaacccaggccctactagtatggactggatttggcgcatccttttccttgtcggcgctgctaccggcgcgcattccttcgaacaagttcagctggttcagagcggagccgaagtgaagaaacctggggcctctgtgaaggtgtcctgcaaggcttccggctacacctttaccgattactacatgcactgggtccgacaggctcccggccaaagacttgaatggatgggctggatcaaccccaacagcggcggcacaaattacgcccagaagttccaggaccggatcaccgtgaccagagacaccagctccaacaccggctacatggaactgacccggctgagatccgatgacaccgccgtgtactactgcgctagaagcccttactccggcgtgctggataagtggggacagggcacactggtcaccgtgtcatctacgcgtgcctctacaaagggaccctccgtgtttcctctggctcccagcagcaagtctacaagcggaggaacagccgctctgggctgcctggtcaaggattactttcccgagcctgtgaccgtgtcctggaatagcggagcactgacaagcggcgtgcacacctttccagccgtgctgcaaagcagcggcctgtactctctgagcagcgtggtcacagtgcctagctctagcctgggcacccagacctacatctgcaatgtgaaccacaagcctagcaacaccaaggtggacaagagagtggaacccaagagctgtatccccgaggacacattcttcccaagccccgagagcagctgcgacgtgaagctggtggaaaagagcttcgagacagacaccaacctgaacttccagaacctgagcgtgatcggcttcagaatcctgctgctgaaagtggccggctttaacctgctgatgaccctgcggctgtggtccagc

SEQ ID NO: 3179 - DNA, 2286 bp, Artificial Sequence
  Synthetic Polynucloetide
atggccttaccagtgaccgccttgctcctgccgctggccttgctgctccacgccgccaggccggaagtgcagctggttgaatctggcggaggactggttcagcctggcggatctctgagactgtcttgtgccgccagcggcttcagcttcagcgacttttggatgagctgggtccgacaggcccctggcaaaggacttgaatgggtcgccacaatcagccaggccggcagcgagaaggactacgtggactctgtgaagggcagattcaccatcagccgggacaacgccaagaagtccctgtacctccagatgaacagcctgagagccgaggacaccgccgtgtactattgtgcctctggcgtgtacagcttcgactacagaggccagggcaccctggtcacagtctcttctggtaccggcggaggcggatctggcggcggaggtagcggtggcggaggatctgaattccaggctgttctgacacagcctccatctgcctctggcacacctggacagagagtgaccatctcctgtagcggcagcagcagcaacatcggcagctacaccgtgtcctggtatcagcagctccctggaacagcccctaagttcctgatctacagcaacaaccagcggcctagcggcgtgcccgatagattttctggcagcaagagcggcacaagcgccagcctggctatttctggactccagtctgaggacgaggccgactactattgtgccgcctgggacgatagcctgaacggctatgtgtttggcaccggcaccaaagtgacagtgcttggtctcgagggacagcctaaggccaatcctaccgtgacactgttccctccaagcagcgaagaactccaggccaacaaggccacacttgtgtgcctgatctccgacttctaccctggggctgtgacagtggcttggaaggccgatggatctcctgtgaaagccggcgtggaaaccaccaagccatccaagcagagcaacaacaaatacgccgccagctcctacctgagcctgacacctgagcagtggaagtcccacagatcctacagctgccaagtgacccacgaaggcagcaccgtggaaaagacagtggcccctacagagtgcagcggcagagccgattgcggctttaccagcgagagctaccagcagggcgtgctgagcgccaccatcctgtacgagatcctgctgggcaaggccaccctgtacgccgtgctggtgtctgccctggtgctgatggctatggtcaagcggaaggacagccggggacgcgccaagagaagcggatctggcgtgaagcagaccctgaatttcgacctgctgaagctggctggcgacgtggaatccaacccaggccctactagtatggactggatttggcgcatccttttccttgtcggcgctgctaccggcgcgcattccttcgaagttcaactggttcagagcggagccgaagtgaagaagcctggcgagagcctgaagattagctgcaaaggcagcggctacgacttcaccacctactggatcggctgggtccgacagatgcctggcaaaggactggaatggatgggcatcatctaccccggcgacagcgacaccagatacagccctagcgttagaggccgcgtgaccatcagcgccgacaagtctatcaacaccgcctacctccagtggtccagcctggaagcctctgacaccgccatgtactactgcgccagaatgtggaccttcagccaggatggatggggccagggaacactggtcacagtgtcatctacgcgtgcctctacaaagggaccctccgtgtttcctctggctcccagcagcaagtctacaagcggaggaacagccgctctgggctgcctggtcaaggattactttcccgagcctgtgaccgtgtcctggaatagcggagcactgacaagcggcgtgcacacctttccagccgtgctgcaaagcagcggcctgtactctctgagcagcgtggtcacagtgcctagctctagcctgggcacccagacctacatctgcaatgtgaaccacaagcctagcaacaccaaggtggacaagagagtggaacccaagagctgtatccccgaggacacattcttcccaagccccgagagcagctgcgacgtgaagctggtggaaaagagcttcgagacagacaccaacctgaacttccagaacctgagcgtgatcggcttcagaatcctgctgctgaaagtggccggctttaacctgctgatgaccctgcggctgtggtccagc

SEQ ID NO: 3180 - DNA, 2295 bp, Artificial Sequence
  Synthetic Polynucloetide
atggccttaccagtgaccgccttgctcctgccgctggccttgctgctccacgccgccaggccggaagtgcagctggttgaatctggcggaggactggttcagcctggcggatctctgagactgtcttgtgccgccagcggcttcagcttcagcgacttttggatgagctgggtccgacaggcccctggcaaaggacttgaatgggtcgccacaatcagccaggccggcagcgagaaggactacgtggactctgtgaagggcagattcaccatcagccgggacaacgccaagaagtccctgtacctccagatgaacagcctgagagccgaggacaccgccgtgtactattgtgcctctggcgtgtacagcttcgactacagaggccagggcaccctggtcacagtctcttctggtaccggcggaggcggatctggcggcggaggtagcggtggcggaggatctgaattcgacatcgtgatgacccagagccccgatagcctggccgtgtctctgggagagagagccaccatcaactgcaagagcagccagagcatcctgtacagcagcaaccagaagaactacctggcctggtatcagcagaagcccggccagagccctaagctgctgatctactgggccagcaccagagaaagcggcgtgcccgatagattcagcggcagcggctctggcaccgacttcaccctgaccatcagttctcttcaggccgaggacgtggccgtgtactactgccaccagtacatcagctcctacaccttcggccagggcaccaagctggaaatcaagctcgagggacagcctaaggccaatcctaccgtgacactgttccctccaagcagcgaagaactccaggccaacaaggccacacttgtgtgcctgatctccgacttctaccctggggctgtgacagtggcttggaaggccgatggatctcctgtgaaagccggcgtggaaaccaccaagccatccaagcagagcaacaacaaatacgccgccagctcctacctgagcctgacacctgagcagtggaagtcccacagatcctacagctgccaagtgacccacgaaggcagcaccgtggaaaagacagtggcccctacagagtgcagcggcagagccgattgcggctttaccagcgagagctaccagcagggcgtgctgagcgccaccatcctgtacgagatcctgctgggcaaggccaccctgtacgccgtgctggtgtctgccctggtgctgatggctatggtcaagcggaaggacagccggggacgcgccaagagaagcggatctggcgtgaagcagaccctgaatttcgacctgctgaagctggctggcgacgtggaatccaacccaggccctactagtatggactggatttggcgcatccttttccttgtcggcgctgctaccggcgcgcattccttcgaacaggtgcagctggtgcagtctggcgctgaagtgaagaaacctggggccagcgtgaaggtgtcctgcaaggccagcggctacacctttgccagccagtggatgcactggatgagacaggcccctggacagggcctggaatggatcggctggatcaaccccggcaacgtgaacaccaagtacaacgagaagttcaagggcagagccaccctgacagtggacaccagcaccaacaccgcctacatggaactgagcagcctgcggagcgaggacaccgccgtgtattattgcgccagaagcacctggtacagacccctggattattggggccagggaacccttgtgaccgtgtcctctacgcgtgcctctacaaagggaccctccgtgtttcctctggctcccagcagcaagtctacaagcggaggaacagccgctctgggctgcctggtcaaggattactttcccgagcctgtgaccgtgtcctggaatagcggagcactgacaagcggcgtgcacacctttccagccgtgctgcaaagcagcggcctgtactctctgagcagcgtggtcacagtgcctagctctagcctgggcacccagacctacatctgcaatgtgaaccacaagcctagcaacaccaaggtggacaagagagtggaacccaagagctgtatccccgaggacacattcttcccaagccccgagagcagctgcgacgtgaagctggtggaaaagagcttcgagacagacaccaacctgaacttccagaacctgagcgtgatcggcttcagaatcctgctgctgaaagtggccggctttaacctgctgatgaccctgcggctgtggtccagc

SEQ ID NO: 3181 - DNA, 2295 bp, Artificial Sequence
  Synthetic Polynucloetide
atggccttaccagtgaccgccttgctcctgccgctggccttgctgctccacgccgccaggccggaagtgcagctggttgaatctggcggaggactggttcagcctggcggatctctgagactgtcttgtgccgccagcggcttcagcttcagcgacttttggatgagctgggtccgacaggcccctggcaaaggacttgaatgggtcgccacaatcagccaggccggcagcgagaaggactacgtggactctgtgaagggcagattcaccatcagccgggacaacgccaagaagtccctgtacctccagatgaacagcctgagagccgaggacaccgccgtgtactattgtgcctctggcgtgtacagcttcgactacagaggccagggcaccctggtcacagtctcttctggtaccggcggaggcggatctggcggcggaggtagcggtggcggaggatctgaattcgaccacatcgtgctgacccagagccctagcagcctgtctgccagcctgggcgacagagtgaccatcagctgtagagccagccaggacatcagcacctacctgaactggtatcagcagaaacccgacggcaccgtgaagctgctgatcttctacaccagcagactgcacgccggggtgcccagcagattttctggcagcggctctggcacccaccacagcctgaccatctccaacctggaacaggaagatattgctacctacttctgtcagcaaggcaacagcctgcccttcaccttcggcagcggcaccaagctggaaatcaagagactcgagggacagcctaaggccaatcctaccgtgacactgttccctccaagcagcgaagaactccaggccaacaaggccacacttgtgtgcctgatctccgacttctaccctggggctgtgacagtggcttggaaggccgatggatctcctgtgaaagccggcgtggaaaccaccaagccatccaagcagagcaacaacaaatacgccgccagctcctacctgagcctgacacctgagcagtggaagtcccacagatcctacagctgccaagtgacccacgaaggcagcaccgtggaaaagacagtggcccctacagagtgcagcggcagagccgattgcggctttaccagcgagagctaccagcagggcgtgctgagcgccaccatcctgtacgagatcctgctgggcaaggccaccctgtacgccgtgctggtgtctgccctggtgctgatggctatggtcaagcggaaggacagccggggacgcgccaagagaagcggatctggcgtgaagcagaccctgaatttcgacctgctgaagctggctggcgacgtggaatccaacccaggccctactagtatggactggatttggcgcatccttttccttgtcggcgctgctaccggcgcgcattccttcgaacaggtgcagctgaaagagagcggccctgagctggaaaagcctggggccagcgtgaagattagctgcaaggccagcggctacagcttcaccgcctacagcatgaactgggtcaagcagaacaacggcatgagcctggaatggatcggcagcatcgacccctactacggcgacaccaaatacgcccagaagttcaagggcaaggccaccctgaccgtggataaggccagcagcaccgcctacctccagctgaagtctctgaccagcgaggacagcgccgtgtactactgcgccagacggatgattaccaccggcgactggtacttcgacgtgtggggagccggaaccaccgtgacagtgtctagcacgcgtgcctctacaaagggaccctccgtgtttcctctggctcccagcagcaagtctacaagcggaggaacagccgctctgggctgcctggtcaaggattactttcccgagcctgtgaccgtgtcctggaatagcggagcactgacaagcggcgtgcacacctttccagccgtgctgcaaagcagcggcctgtactctctgagcagcgtggtcacagtgcctagctctagcctgggcacccagacctacatctgcaatgtgaaccacaagcctagcaacaccaaggtggacaagagagtggaacccaagagctgtatccccgaggacacattcttcccaagccccgagagcagctgcgacgtgaagctggtggaaaagagcttcgagacagacaccaacctgaacttccagaacctgagcgtgatcggcttcagaatcctgctgctgaaagtggccggctttaacctgctgatgaccctgcggctgtggtccagc

SEQ ID NO: 3182 - DNA, 2295 bp, Artificial Sequence; identical to SEQ ID NO: 3181
  Synthetic Polynucloetide

SEQ ID NO: 3183 - DNA, 2295 bp, Artificial Sequence
  Synthetic Polynucloetide
atggccttaccagtgaccgccttgctcctgccgctggccttgctgctccacgccgccaggccggaagtgcagctggttgaatctggcggaggactggttcagcctggcggatctctgagactgtcttgtgccgccagcggcttcagcttcagcgacttttggatgagctgggtccgacaggcccctggcaaaggacttgaatgggtcgccacaatcagccaggccggcagcgagaaggactacgtggactctgtgaagggcagattcaccatcagccgggacaacgccaagaagtccctgtacctccagatgaacagcctgagagccgaggacaccgccgtgtactattgtgcctctggcgtgtacagcttcgactacagaggccagggcaccctggtcacagtctcttctggtaccggcggaggcggatctggcggcggaggtagcggtggcggaggatctgaattcgacgagatcgtgctgacacagagccctgccaccctgtctctgagccctggcgaaagagccaccctgagctgtagagccagccagagcgtgtccagctacctggcctggtatcagcagaagcccggccaggctccccggctgctgatctacgatgccagcaatagagccaccggcatccccgccagattttccggctctggcagcggcaccgacttcaccctgaccatcagctccctggaacccgaggacttcgccgtgtactactgccagcagcggagcaactggcccatcacattcggccagggcacccggctggaaatcaaactcgagggacagcctaaggccaatcctaccgtgacactgttccctccaagcagcgaagaactccaggccaacaaggccacacttgtgtgcctgatctccgacttctaccctggggctgtgacagtggcttggaaggccgatggatctcctgtgaaagccggcgtggaaaccaccaagccatccaagcagagcaacaacaaatacgccgccagctcctacctgagcctgacacctgagcagtggaagtcccacagatcctacagctgccaagtgacccacgaaggcagcaccgtggaaaagacagtggcccctacagagtgcagcggcagagccgattgcggctttaccagcgagagctaccagcagggcgtgctgagcgccaccatcctgtacgagatcctgctgggcaaggccaccctgtacgccgtgctggtgtctgccctggtgctgatggctatggtcaagcggaaggacagccggggacgcgccaagagaagcggatctggcgtgaagcagaccctgaatttcgacctgctgaagctggctggcgacgtggaatccaacccaggccctactagtatggactggatttggcgcatccttttccttgtcggcgctgctaccggcgcgcattccttcgaagaagtgcagctggtggaatcaggcggcggactggtgcagcctggcagaagcctgagactgagctgtgccgccagcggcttcaccttcaacgactacgccatgcactgggtgcgccaggcccctggaaaaggactggaatgggtgtccacaatcagctggaacagcggcagcatcggctacgccgatagcgtgaagggccggttcaccatcagccgggacaacgccaagaagtccctgtacctccagatgaacagcctgcgggccgaggacacagccctgtactattgcgccaaggacatccagtacggcaactactactacggcatggacgtgtggggccagggaaccaccgtgaccgtgtcatctacgcgtgcctctacaaagggaccctccgtgtttcctctggctcccagcagcaagtctacaagcggaggaacagccgctctgggctgcctggtcaaggattactttcccgagcctgtgaccgtgtcctggaatagcggagcactgacaagcggcgtgcacacctttccagccgtgctgcaaagcagcggcctgtactctctgagcagcgtggtcacagtgcctagctctagcctgggcacccagacctacatctgcaatgtgaaccacaagcctagcaacaccaaggtggacaagagagtggaacccaagagctgtatccccgaggacacattcttcccaagccccgagagcagctgcgacgtgaagctggtggaaaagagcttcgagacagacaccaacctgaacttccagaacctgagcgtgatcggcttcagaatcctgctgctgaaagtggccggctttaacctgctgatgaccctgcggctgtggtccagc

SEQ ID NO: 3184 - DNA, 2301 bp, Artificial Sequence
  Synthetic Polynucloetide
atggccttaccagtgaccgccttgctcctgccgctggccttgctgctccacgccgccaggccggaagtgcagctggttgaatctggcggaggactggttcagcctggcggatctctgagactgtcttgtgccgccagcggcttcagcttcagcgacttttggatgagctgggtccgacaggcccctggcaaaggacttgaatgggtcgccacaatcagccaggccggcagcgagaaggactacgtggactctgtgaagggcagattcaccatcagccgggacaacgccaagaagtccctgtacctccagatgaacagcctgagagccgaggacaccgccgtgtactattgtgcctctggcgtgtacagcttcgactacagaggccagggcaccctggtcacagtctcttctggtaccggcggaggcggatctggcggcggaggtagcggtggcggaggatctgaattcgacatcgtgatgacccagacccccctgagcctgcctgtgacacctggcgagcctgccagcatctcctgcagaagcagcaagagcctgctgcacagcaacggcatcacctacctgtactggtatctgcagaaacccggccagagcccccaactgctgatctaccagatgagcaacctggtgtccggcgtgcccgacagattttctggcagcggctccggcaccgacttcaccctgaagatcagccgggtggaagccgaggacgtgggcgtgtactactgcgcccagaacctggaactgccctacacctttggcggcggaacaaaggtggaaatcaagcggctcgagggacagcctaaggccaatcctaccgtgacactgttccctccaagcagcgaagaactccaggccaacaaggccacacttgtgtgcctgatctccgacttctaccctggggctgtgacagtggcttggaaggccgatggatctcctgtgaaagccggcgtggaaaccaccaagccatccaagcagagcaacaacaaatacgccgccagctcctacctgagcctgacacctgagcagtggaagtcccacagatcctacagctgccaagtgacccacgaaggcagcaccgtggaaaagacagtggcccctacagagtgcagcggcagagccgattgcggctttaccagcgagagctaccagcagggcgtgctgagcgccaccatcctgtacgagatcctgctgggcaaggccaccctgtacgccgtgctggtgtctgccctggtgctgatggctatggtcaagcggaaggacagccggggacgcgccaagagaagcggatctggcgtgaagcagaccctgaatttcgacctgctgaagctggctggcgacgtggaatccaacccaggccctactagtatggactggatttggcgcatccttttccttgtcggcgctgctaccggcgcgcattccttcgaacaggtgcaactggtgcagagcggagccgaagtgaaaaagcccggcagcagcgtgaaggtgtcctgcaaggccagcggctacgccttcagctactcctggatcaactgggtgcgccaggcccctggacagggcctggaatggatgggcagaatcttccccggcgacggcgacaccgactacaacggcaagttcaagggcagagtgaccatcaccgccgacaagagcaccagcaccgcctacatggaactgagcagcctgcggagcgaggataccgccgtgtactattgtgccagaaacgtgttcgacggctactggctggtgtactggggccagggaacacttgtgaccgtgtccagcacgcgtgcctctacaaagggaccctccgtgtttcctctggctcccagcagcaagtctacaagcggaggaacagccgctctgggctgcctggtcaaggattactttcccgagcctgtgaccgtgtcctggaatagcggagcactgacaagcggcgtgcacacctttccagccgtgctgcaaagcagcggcctgtactctctgagcagcgtggtcacagtgcctagctctagcctgggcacccagacctacatctgcaatgtgaaccacaagcctagcaacaccaaggtggacaagagagtggaacccaagagctgtatccccgaggacacattcttcccaagccccgagagcagctgcgacgtgaagctggtggaaaagagcttcgagacagacaccaacctgaacttccagaacctgagcgtgatcggcttcagaatcctgctgctgaaagtggccggctttaacctgctgatgaccctgcggctgtggtccagc

SEQ ID NO: 3185 - DNA, 2304 bp, Artificial Sequence
  Synthetic Polynucloetide
atggccttaccagtgaccgccttgctcctgccgctggccttgctgctccacgccgccaggccggaagtgcagctggttgaatctggcggaggactggttcagcctggcggatctctgagactgtcttgtgccgccagcggcttcagcttcagcgacttttggatgagctgggtccgacaggcccctggcaaaggacttgaatgggtcgccacaatcagccaggccggcagcgagaaggactacgtggactctgtgaagggcagattcaccatcagccgggacaacgccaagaagtccctgtacctccagatgaacagcctgagagccgaggacaccgccgtgtactattgtgcctctggcgtgtacagcttcgactacagaggccagggcaccctggtcacagtctcttctggtaccggcggaggcggatctggcggcggaggtagcggtggcggaggatctgaattcgacatccagatgacccagagccccagcagcctgtctgccagcgtgggcgacagagtgaccatcacctgtcggagcagccagagcatcgtgcactccgtgggcaacaccttcctggaatggtatcagcagaagcccggcaaggcccccaagctgctgatctacaaggtgtccaacagattcagcggcgtgcccagcaggtttagcggctctggcagcggcaccgacttcaccctgaccatctctagcctccagcccgaggacttcgccacctactactgttttcaaggcagccagttcccctacaccttcggccagggaacaaaggtggaaatcaagcggctcgagggacagcctaaggccaatcctaccgtgacactgttccctccaagcagcgaagaactccaggccaacaaggccacacttgtgtgcctgatctccgacttctaccctggggctgtgacagtggcttggaaggccgatggatctcctgtgaaagccggcgtggaaaccaccaagccatccaagcagagcaacaacaaatacgccgccagctcctacctgagcctgacacctgagcagtggaagtcccacagatcctacagctgccaagtgacccacgaaggcagcaccgtggaaaagacagtggcccctacagagtgcagcggcagagccgattgcggctttaccagcgagagctaccagcagggcgtgctgagcgccaccatcctgtacgagatcctgctgggcaaggccaccctgtacgccgtgctggtgtctgccctggtgctgatggctatggtcaagcggaaggacagccggggacgcgccaagagaagcggatctggcgtgaagcagaccctgaatttcgacctgctgaagctggctggcgacgtggaatccaacccaggccctactagtatggactggatttggcgcatccttttccttgtcggcgctgctaccggcgcgcattccttcgaagaagtgcaactggtggaaagcggaggcggcctggtgcagcctggcggatctctgagactgagctgtgccgccagcggctacgagttcagccggtcctggatgaactgggtgcgccaggcccctggcaagggactggaatgggtgggaagaatctaccccggcgacggcgacaccaactacagcggcaagttcaagggccggttcaccatcagcgccgacaccagcaagaacaccgcctacctccagatgaacagcctgcgggccgaggataccgccgtgtactactgtgccagagatggcagctcctgggactggtacttcgacgtgtggggacagggaacccttgtgaccgtgtccagcacgcgtgcctctacaaagggaccctccgtgtttcctctggctcccagcagcaagtctacaagcggaggaacagccgctctgggctgcctggtcaaggattactttcccgagcctgtgaccgtgtcctggaatagcggagcactgacaagcggcgtgcacacctttccagccgtgctgcaaagcagcggcctgtactctctgagcagcgtggtcacagtgcctagctctagcctgggcacccagacctacatctgcaatgtgaaccacaagcctagcaacaccaaggtggacaagagagtggaacccaagagctgtatccccgaggacacattcttcccaagccccgagagcagctgcgacgtgaagctggtggaaaagagcttcgagacagacaccaacctgaacttccagaacctgagcgtgatcggcttcagaatcctgctgctgaaagtggccggctttaacctgctgatgaccctgcggctgtggtccagc

SEQ ID NO: 3186 - DNA, 2298 bp, Artificial Sequence
  Synthetic Polynucloetide
atggccttaccagtgaccgccttgctcctgccgctggccttgctgctccacgccgccaggccggaagtgcagctggttgaatctggcggaggactggttcagcctggcggatctctgagactgtcttgtgccgccagcggcttcagcttcagcgacttttggatgagctgggtccgacaggcccctggcaaaggacttgaatgggtcgccacaatcagccaggccggcagcgagaaggactacgtggactctgtgaagggcagattcaccatcagccgggacaacgccaagaagtccctgtacctccagatgaacagcctgagagccgaggacaccgccgtgtactattgtgcctctggcgtgtacagcttcgactacagaggccagggcaccctggtcacagtctcttctggtaccggcggaggcggatctggcggcggaggtagcggtggcggaggatctgaattcgacatccagatgacccagagccccagcagcctgtctgccagcgtgggcgacagagtgaccatcacctgtagagccagccagaccatctggtcctacctgaactggtatcagcagaggcccggcaaggcccccaacctgctgatctatgccgccagctctctccagagcggcgtgcccagcagattttccggcagaggcagcggcaccgacttcaccctgaccatcagttccttgcaggccgaggacttcgccacctactactgccagcagagctacagcatcccccagattttcggccagggcaccaagctggaaatcaagctcgagggacagcctaaggccaatcctaccgtgacactgttccctccaagcagcgaagaactccaggccaacaaggccacacttgtgtgcctgatctccgacttctaccctggggctgtgacagtggcttggaaggccgatggatctcctgtgaaagccggcgtggaaaccaccaagccatccaagcagagcaacaacaaatacgccgccagctcctacctgagcctgacacctgagcagtggaagtcccacagatcctacagctgccaagtgacccacgaaggcagcaccgtggaaaagacagtggcccctacagagtgcagcggcagagccgattgcggctttaccagcgagagctaccagcagggcgtgctgagcgccaccatcctgtacgagatcctgctgggcaaggccaccctgtacgccgtgctggtgtctgccctggtgctgatggctatggtcaagcggaaggacagccggggacgcgccaagagaagcggatctggcgtgaagcagaccctgaatttcgacctgctgaagctggctggcgacgtggaatccaacccaggccctactagtatggactggatttggcgcatccttttccttgtcggcgctgctaccggcgcgcattccttcgaacaggtgcagctccagcagtctggacccggcctcgtgaagcctagccagacactgagcctgacctgcgccatcagcggcgatagcgtgtccagcaatagcgccgcctggaactggatcagacagtccccctctcggggcctggaatggctgggccggacctactaccgcagcaagtggtacaacgactacgccgtgtccgtgaagtcccggatcaccatcaaccccgacaccagcaagaaccagttctccttgcaactgaacagcgtgacccccgaggacaccgccgtgtactactgcgccagagaagtgaccggcgacctggaagatgccttcgacatctggggccagggaacaatggtcacagtgtccagcacgcgtgcctctacaaagggaccctccgtgtttcctctggctcccagcagcaagtctacaagcggaggaacagccgctctgggctgcctggtcaaggattactttcccgagcctgtgaccgtgtcctggaatagcggagcactgacaagcggcgtgcacacctttccagccgtgctgcaaagcagcggcctgtactctctgagcagcgtggtcacagtgcctagctctagcctgggcacccagacctacatctgcaatgtgaaccacaagcctagcaacaccaaggtggacaagagagtggaacccaagagctgtatccccgaggacacattcttcccaagccccgagagcagctgcgacgtgaagctggtggaaaagagcttcgagacagacaccaacctgaacttccagaacctgagcgtgatcggcttcagaatcctgctgctgaaagtggccggctttaacctgctgatgaccctgcggctgtggtccagc

SEQ ID NO: 3187 - DNA, 2277 bp, Artificial Sequence
  Synthetic Polynucloetide
atggccttaccagtgaccgccttgctcctgccgctggccttgctgctccacgccgccaggccggaagtgcagctggttgaatctggcggaggactggttcagcctggcggatctctgagactgtcttgtgccgccagcggcttcagcttcagcgacttttggatgagctgggtccgacaggcccctggcaaaggacttgaatgggtcgccacaatcagccaggccggcagcgagaaggactacgtggactctgtgaagggcagattcaccatcagccgggacaacgccaagaagtccctgtacctccagatgaacagcctgagagccgaggacaccgccgtgtactattgtgcctctggcgtgtacagcttcgactacagaggccagggcaccctggtcacagtctcttctggtaccggcggaggcggatctggcggcggaggtagcggtggcggaggatctgaattcgacatccagatgacccagagccccgccaccatcgagaacacaagcctgtctgccagcgtgggcgacagagtgaccatcacctgtagagccagccagggcatcagctcttggctgacctggtatcagcagaagcccgagaaggcccccaagagcctgatctacgccgccagctctctgcagtctggcgtgcccagcagattttccggcagcggctctggcaccgacttcaccctgacaatcagcagcctgcagcccgaggacttcgccacctactactgccagcagtacgacagctaccccatcaccttcggccagggcacccggctggaaatcaagctcgagggacagcctaaggccaatcctaccgtgacactgttccctccaagcagcgaagaactccaggccaacaaggccacacttgtgtgcctgatctccgacttctaccctggggctgtgacagtggcttggaaggccgatggatctcctgtgaaagccggcgtggaaaccaccaagccatccaagcagagcaacaacaaatacgccgccagctcctacctgagcctgacacctgagcagtggaagtcccacagatcctacagctgccaagtgacccacgaaggcagcaccgtggaaaagacagtggcccctacagagtgcagcggcagagccgattgcggctttaccagcgagagctaccagcagggcgtgctgagcgccaccatcctgtacgagatcctgctgggcaaggccaccctgtacgccgtgctggtgtctgccctggtgctgatggctatggtcaagcggaaggacagccggggacgcgccaagagaagcggatctggcgtgaagcagaccctgaatttcgacctgctgaagctggctggcgacgtggaatccaacccaggccctactagtatggactggatttggcgcatccttttccttgtcggcgctgctaccggcgcgcattccttcgaacaggtgcaactgcagcagtggggagccggactgctgaagcctagcgagacactgagcctgacctgcgccgtgtacggcggcagcttcagcgcctactattggagctggatcagacagccccctggcaagggcctggaatggatcggcgacatcaatcacggcggaggcaccaactacaaccccagcctgaagtcccgcgtgaccatctccgtggacaccagcaagaaccagttctccctgaagctgaacagcgtgacagccgccgacacagccgtgtactactgtgccagcctgaccgcctattggggccagggatctcttgtgaccgtgtccagcacgcgtgcctctacaaagggaccctccgtgtttcctctggctcccagcagcaagtctacaagcggaggaacagccgctctgggctgcctggtcaaggattactttcccgagcctgtgaccgtgtcctggaatagcggagcactgacaagcggcgtgcacacctttccagccgtgctgcaaagcagcggcctgtactctctgagcagcgtggtcacagtgcctagctctagcctgggcacccagacctacatctgcaatgtgaaccacaagcctagcaacaccaaggtggacaagagagtggaacccaagagctgtatccccgaggacacattcttcccaagccccgagagcagctgcgacgtgaagctggtggaaaagagcttcgagacagacaccaacctgaacttccagaacctgagcgtgatcggcttcagaatcctgctgctgaaagtggccggctttaacctgctgatgaccctgcggctgtggtccagc

SEQ ID NO: 3188 - DNA, 2292 bp, Artificial Sequence
  Synthetic Polynucloetide
atggccttaccagtgaccgccttgctcctgccgctggccttgctgctccacgccgccaggccggaagtgcagctggttgaatctggcggaggactggttcagcctggcggatctctgagactgtcttgtgccgccagcggcttcagcttcagcgacttttggatgagctgggtccgacaggcccctggcaaaggacttgaatgggtcgccacaatcagccaggccggcagcgagaaggactacgtggactctgtgaagggcagattcaccatcagccgggacaacgccaagaagtccctgtacctccagatgaacagcctgagagccgaggacaccgccgtgtactattgtgcctctggcgtgtacagcttcgactacagaggccagggcaccctggtcacagtctcttctggtaccggcggaggcggatctggcggcggaggtagcggtggcggaggatctgaattcgacgagatcgtgctgacccagagccctgatagcctggccgtgtctctgggcgagagagccaccatcaactgcaaggccagccagagcgtggacttcgacggcgacagctacctgaactggtatcagcagaagcccggccagccccccaaggtgctgatctatgccgccagcacactgcagagcggcgtgcccagcagattttctggcagcggctccggcaccgacttcaccctgaccatcaacagcctggaagccgaggacgccgccacctactactgccagcagagcaacgaggacccctggacctttggcggcggaacaaaggtggaaatcaagctcgagggacagcctaaggccaatcctaccgtgacactgttccctccaagcagcgaagaactccaggccaacaaggccacacttgtgtgcctgatctccgacttctaccctggggctgtgacagtggcttggaaggccgatggatctcctgtgaaagccggcgtggaaaccaccaagccatccaagcagagcaacaacaaatacgccgccagctcctacctgagcctgacacctgagcagtggaagtcccacagatcctacagctgccaagtgacccacgaaggcagcaccgtggaaaagacagtggcccctacagagtgcagcggcagagccgattgcggctttaccagcgagagctaccagcagggcgtgctgagcgccaccatcctgtacgagatcctgctgggcaaggccaccctgtacgccgtgctggtgtctgccctggtgctgatggctatggtcaagcggaaggacagccggggacgcgccaagagaagcggatctggcgtgaagcagaccctgaatttcgacctgctgaagctggctggcgacgtggaatccaacccaggccctactagtatggactggatttggcgcatccttttccttgtcggcgctgctaccggcgcgcattccttcgaacaggtgcaactggtgcagtccggcgctgaagtgaagaaacctggggccagcgtgaaggtgtcctgcaaggtgtccggctacacctttaccgactactacattacctgggtgcgccaggcccctggacaggccctggaatggatgggctggatctaccccggcagcggcaacaccaagtacagccagaagttccagggcagattcgtgttcagcgtggacaccagcgccagcaccgcctacctgcaactgtctagcctgaaggccgaagataccgccgtgtactactgcgccaactacggcaactattggttcgcctattggggccagggaacccttgtgaccgtgtcctctacgcgtgcctctacaaagggaccctccgtgtttcctctggctcccagcagcaagtctacaagcggaggaacagccgctctgggctgcctggtcaaggattactttcccgagcctgtgaccgtgtcctggaatagcggagcactgacaagcggcgtgcacacctttccagccgtgctgcaaagcagcggcctgtactctctgagcagcgtggtcacagtgcctagctctagcctgggcacccagacctacatctgcaatgtgaaccacaagcctagcaacaccaaggtggacaagagagtggaacccaagagctgtatccccgaggacacattcttcccaagccccgagagcagctgcgacgtgaagctggtggaaaagagcttcgagacagacaccaacctgaacttccagaacctgagcgtgatcggcttcagaatcctgctgctgaaagtggccggctttaacctgctgatgaccctgcggctgtggtccagc

SEQ ID NO: 3189 - DNA, 2283 bp, Artificial Sequence
  Synthetic Polynucloetide
atggccttaccagtgaccgccttgctcctgccgctggccttgctgctccacgccgccaggccggaagtgcagctggttgaatctggcggaggactggttcagcctggcggatctctgagactgtcttgtgccgccagcggcttcagcttcagcgacttttggatgagctgggtccgacaggcccctggcaaaggacttgaatgggtcgccacaatcagccaggccggcagcgagaaggactacgtggactctgtgaagggcagattcaccatcagccgggacaacgccaagaagtccctgtacctccagatgaacagcctgagagccgaggacaccgccgtgtactattgtgcctctggcgtgtacagcttcgactacagaggccagggcaccctggtcacagtctcttctggtaccggcggaggcggatctggcggcggaggtagcggtggcggaggatctgaattcgacatccagatgacccagagccccagcagcctgtctgccagcgtgggcgacagagtgaccatcacctgtagagccagccagggcatcagctcttggctggcctggtatcagcagaagcccgagaaggcccccaagagcctgatctacgccgcctctagtctccagagcggcgtgcccagcagattttctggcagcggctccggcaccgacttcaccctgacaatcagctccctccagcccgaggacttcgccacctactactgccagcagtacaacagctaccctcccacctttggcggaggcaccaaggtggaaatcaagctcgagggacagcctaaggccaatcctaccgtgacactgttccctccaagcagcgaagaactccaggccaacaaggccacacttgtgtgcctgatctccgacttctaccctggggctgtgacagtggcttggaaggccgatggatctcctgtgaaagccggcgtggaaaccaccaagccatccaagcagagcaacaacaaatacgccgccagctcctacctgagcctgacacctgagcagtggaagtcccacagatcctacagctgccaagtgacccacgaaggcagcaccgtggaaaagacagtggcccctacagagtgcagcggcagagccgattgcggctttaccagcgagagctaccagcagggcgtgctgagcgccaccatcctgtacgagatcctgctgggcaaggccaccctgtacgccgtgctggtgtctgccctggtgctgatggctatggtcaagcggaaggacagccggggacgcgccaagagaagcggatctggcgtgaagcagaccctgaatttcgacctgctgaagctggctggcgacgtggaatccaacccaggccctactagtatggactggatttggcgcatccttttccttgtcggcgctgctaccggcgcgcattccttcgaagaagtgcaactggtgcagtctggcggagggctggtgcatcctgggggaagcctgagactgagctgtgccggctctggcttcgccttcagcagcagcaccatgcactggatcagacaggcccctggcaagggcctggaatggatcagcctgatcggaagcggagggggcatctactacggcgacagcgtgaagggccggttcaccatcagccgggacaacgccaagaacagcctgtacctccagatgaactccctgcgggccgaggacatggccgtgtactattgtgtgcggggctacttcgactgggtggactacttcgattactggggccagggcaccctcgtgaccgtgtcatctacgcgtgcctctacaaagggaccctccgtgtttcctctggctcccagcagcaagtctacaagcggaggaacagccgctctgggctgcctggtcaaggattactttcccgagcctgtgaccgtgtcctggaatagcggagcactgacaagcggcgtgcacacctttccagccgtgctgcaaagcagcggcctgtactctctgagcagcgtggtcacagtgcctagctctagcctgggcacccagacctacatctgcaatgtgaaccacaagcctagcaacaccaaggtggacaagagagtggaacccaagagctgtatccccgaggacacattcttcccaagccccgagagcagctgcgacgtgaagctggtggaaaagagcttcgagacagacaccaacctgaacttccagaacctgagcgtgatcggcttcagaatcctgctgctgaaagtggccggctttaacctgctgatgaccctgcggctgtggtccagc

SEQ ID NO: 3190 - DNA, 2313 bp, Artificial Sequence
  Synthetic Polynucloetide
atggccttaccagtgaccgccttgctcctgccgctggccttgctgctccacgccgccaggccggaagtgcagctggttgaatctggcggaggactggttcagcctggcggatctctgagactgtcttgtgccgccagcggcttcagcttcagcgacttttggatgagctgggtccgacaggcccctggcaaaggacttgaatgggtcgccacaatcagccaggccggcagcgagaaggactacgtggactctgtgaagggcagattcaccatcagccgggacaacgccaagaagtccctgtacctccagatgaacagcctgagagccgaggacaccgccgtgtactattgtgcctctggcgtgtacagcttcgactacagaggccagggcaccctggtcacagtctcttctggtaccggcggaggcggatctggcggcggaggtagcggtggcggaggatctgaattcgacgacatcgtgatgacacagtcaccagatagcctcaccgtctccctgggggagcggaccaccattaattgtaaatccagccaaagcgtgctggactcaagcaagaacaagaatagcctcgcctggtatcagcagaagcccggtcagcctccaaagctgctgctttcttgggcctccaccagagagtccgggattcctgataggtttagtggttcaggctccggcacagattttactctgaccattgattctctccagccagaggattctgcaacttattactgccagcaaagcgcccactttcctataacttttggccagggaacccgacttgaaatcaagctcgagggacagcctaaggccaatcctaccgtgacactgttccctccaagcagcgaagaactccaggccaacaaggccacacttgtgtgcctgatctccgacttctaccctggggctgtgacagtggcttggaaggccgatggatctcctgtgaaagccggcgtggaaaccaccaagccatccaagcagagcaacaacaaatacgccgccagctcctacctgagcctgacacctgagcagtggaagtcccacagatcctacagctgccaagtgacccacgaaggcagcaccgtggaaaagacagtggcccctacagagtgcagcggcagagccgattgcggctttaccagcgagagctaccagcagggcgtgctgagcgccaccatcctgtacgagatcctgctgggcaaggccaccctgtacgccgtgctggtgtctgccctggtgctgatggctatggtcaagcggaaggacagccggggacgcgccaagagaagcggatctggcgtgaagcagaccctgaatttcgacctgctgaagctggctggcgacgtggaatccaacccaggccctactagtatggactggatttggcgcatccttttccttgtcggcgctgctaccggcgcgcattccttcgaacaggtgcagctggtgcagagcggtgccgaagtgaagaaaccaggtgcatccgttaaagtttcatgtaaggctagtggatataccttcaccaattacggaatgaactgggtgaaacaggcccctggccagggactgaagtggatggggtggattaacacctacaccggggagccgacttatgcagacgactttaaggggcgggtcacgatgacctccgacacctccaccagtaccgcctacctggagctgcacaaccttaggtcagacgataccgccgtgtattactgtgcccgatggtcttggtccgacggatactatgtctacttcgactattggggccaggggaccacagttaccgtgtcctctacgcgtgcctctacaaagggaccctccgtgtttcctctggctcccagcagcaagtctacaagcggaggaacagccgctctgggctgcctggtcaaggattactttcccgagcctgtgaccgtgtcctggaatagcggagcactgacaagcggcgtgcacacctttccagccgtgctgcaaagcagcggcctgtactctctgagcagcgtggtcacagtgcctagctctagcctgggcacccagacctacatctgcaatgtgaaccacaagcctagcaacaccaaggtggacaagagagtggaacccaagagctgtatccccgaggacacattcttcccaagccccgagagcagctgcgacgtgaagctggtggaaaagagcttcgagacagacaccaacctgaacttccagaacctgagcgtgatcggcttcagaatcctgctgctgaaagtggccggctttaacctgctgatgaccctgcggctgtggtccagc

SEQ ID NO: 3191 - DNA, 2301 bp, Artificial Sequence
  Synthetic Polynucloetide
atggccttaccagtgaccgccttgctcctgccgctggccttgctgctccacgccgccaggccggaagtgcagctggttgaatctggcggaggactggttcagcctggcggatctctgagactgtcttgtgccgccagcggcttcagcttcagcgacttttggatgagctgggtccgacaggcccctggcaaaggacttgaatgggtcgccacaatcagccaggccggcagcgagaaggactacgtggactctgtgaagggcagattcaccatcagccgggacaacgccaagaagtccctgtacctccagatgaacagcctgagagccgaggacaccgccgtgtactattgtgcctctggcgtgtacagcttcgactacagaggccagggcaccctggtcacagtctcttctggtaccggcggaggcggatctggcggcggaggtagcggtggcggaggatctgaattcgacgagatcgtgctgacacagagccctggaagcctggccgtgtctcctggcgagcgcgtgacaatgagctgcaagagcagccagagcgtgttcttcagcagctcccagaagaactacctggcctggtatcagcagatccccggccagagccccagactgctgatctactgggccagcaccagagaaagcggcgtgcccgatagattcaccggcagcggctctggcaccgacttcaccctgacaatcagcagcgtgcagcccgaggacctggctatctactactgccaccagtacctgagcagccggaccttcggccagggcaccaagctggaaatcaagagactcgagggacagcctaaggccaatcctaccgtgacactgttccctccaagcagcgaagaactccaggccaacaaggccacacttgtgtgcctgatctccgacttctaccctggggctgtgacagtggcttggaaggccgatggatctcctgtgaaagccggcgtggaaaccaccaagccatccaagcagagcaacaacaaatacgccgccagctcctacctgagcctgacacctgagcagtggaagtcccacagatcctacagctgccaagtgacccacgaaggcagcaccgtggaaaagacagtggcccctacagagtgcagcggcagagccgattgcggctttaccagcgagagctaccagcagggcgtgctgagcgccaccatcctgtacgagatcctgctgggcaaggccaccctgtacgccgtgctggtgtctgccctggtgctgatggctatggtcaagcggaaggacagccggggacgcgccaagagaagcggatctggcgtgaagcagaccctgaatttcgacctgctgaagctggctggcgacgtggaatccaacccaggccctactagtatggactggatttggcgcatccttttccttgtcggcgctgctaccggcgcgcattccttcgaacaggtgcaactgcagcagcctggcgctgaggtcgtgaagccaggcgcttccgtgaagatgtcctgcaaggccagcggctacaccttcaccagctactacatccactggatcaagcagacccctggacagggcctggaatgggtgggagtgatctaccccggcaacgacgacatcagctacaaccagaagttccagggcaaggccaccctgaccgccgacaagtctagcaccaccgcctacatgcaactgtccagcctgaccagcgaggacagcgccgtgtactactgcgccagagaagtgcggctgcggtacttcgatgtgtggggccagggaaccaccgtgaccgtgtcatctacgcgtgcctctacaaagggaccctccgtgtttcctctggctcccagcagcaagtctacaagcggaggaacagccgctctgggctgcctggtcaaggattactttcccgagcctgtgaccgtgtcctggaatagcggagcactgacaagcggcgtgcacacctttccagccgtgctgcaaagcagcggcctgtactctctgagcagcgtggtcacagtgcctagctctagcctgggcacccagacctacatctgcaatgtgaaccacaagcctagcaacaccaaggtggacaagagagtggaacccaagagctgtatccccgaggacacattcttcccaagccccgagagcagctgcgacgtgaagctggtggaaaagagcttcgagacagacaccaacctgaacttccagaacctgagcgtgatcggcttcagaatcctgctgctgaaagtggccggctttaacctgctgatgaccctgcggctgtggtccagc

SEQ ID NO: 3192 - DNA, 2313 bp, Artificial Sequence
  Synthetic Polynucloetide
atggccttaccagtgaccgccttgctcctgccgctggccttgctgctccacgccgccaggccggaagtgcagctggttgaatctggcggaggactggttcagcctggcggatctctgagactgtcttgtgccgccagcggcttcagcttcagcgacttttggatgagctgggtccgacaggcccctggcaaaggacttgaatgggtcgccacaatcagccaggccggcagcgagaaggactacgtggactctgtgaagggcagattcaccatcagccgggacaacgccaagaagtccctgtacctccagatgaacagcctgagagccgaggacaccgccgtgtactattgtgcctctggcgtgtacagcttcgactacagaggccagggcaccctggtcacagtctcttctggtaccggcggaggcggatctggcggcggaggtagcggtggcggaggatctgaattcgatgtgctgctgacccagagccctctgagcctgcctgtgacactgggacagcctgccagcatctcctgtcggagcagccagaccatcgtgcacagcaacggcaacacctacctggaatggttccagcagcggccaggccagagccccagactgctgatctaccaggtgtccaacagattcagcggcgtgcccgacagattctccggcagcggctctggcaccgacttcaccctgaagatcagccgggtggaagccgaggacgtgggcgtgtactactgttttcaaggcagccacgtgccccggacctttggcggaggaacaaaggtggaaatcaagagagccctcgagggacagcctaaggccaatcctaccgtgacactgttccctccaagcagcgaagaactccaggccaacaaggccacacttgtgtgcctgatctccgacttctaccctggggctgtgacagtggcttggaaggccgatggatctcctgtgaaagccggcgtggaaaccaccaagccatccaagcagagcaacaacaaatacgccgccagctcctacctgagcctgacacctgagcagtggaagtcccacagatcctacagctgccaagtgacccacgaaggcagcaccgtggaaaagacagtggcccctacagagtgcagcggcagagccgattgcggctttaccagcgagagctaccagcagggcgtgctgagcgccaccatcctgtacgagatcctgctgggcaaggccaccctgtacgccgtgctggtgtctgccctggtgctgatggctatggtcaagcggaaggacagccggggacgcgccaagagaagcggatctggcgtgaagcagaccctgaatttcgacctgctgaagctggctggcgacgtggaatccaacccaggccctactagtatggactggatttggcgcatccttttccttgtcggcgctgctaccggcgcgcattccttcgaacagatccaactggtgcagagcggcagcgagctgaagaaacctggggccagcgtgaaggtgtcctgcaaggccagcggctacacctttaccaactacggcatgaactgggtgcgccaggcccctggacagggcctgaaatggatgggctggatcaacaccaacaccggcgagcctaagtacgccgaagagttcaagggcagattcgccctgagcctggacaccagcgtgtccacagcctacctccagatcaacagcctgaaggccgaggataccgccgtgtacttctgcgccagaggctacggcaactacgccagaggggcttggctggcctattggggccagggaacactcgtgaccgtgtcctctacgcgtgcctctacaaagggaccctccgtgtttcctctggctcccagcagcaagtctacaagcggaggaacagccgctctgggctgcctggtcaaggattactttcccgagcctgtgaccgtgtcctggaatagcggagcactgacaagcggcgtgcacacctttccagccgtgctgcaaagcagcggcctgtactctctgagcagcgtggtcacagtgcctagctctagcctgggcacccagacctacatctgcaatgtgaaccacaagcctagcaacaccaaggtggacaagagagtggaacccaagagctgtatccccgaggacacattcttcccaagccccgagagcagctgcgacgtgaagctggtggaaaagagcttcgagacagacaccaacctgaacttccagaacctgagcgtgatcggcttcagaatcctgctgctgaaagtggccggctttaacctgctgatgaccctgcggctgtggtccagc

SEQ ID NO: 3193 - DNA, 2268 bp, Artificial Sequence
  Synthetic Polynucloetide
atggccttaccagtgaccgccttgctcctgccgctggccttgctgctccacgccgccaggccggaagtgcagctggttgaatctggcggaggactggttcagcctggcggatctctgagactgtcttgtgccgccagcggcttcagcttcagcgacttttggatgagctgggtccgacaggcccctggcaaaggacttgaatgggtcgccacaatcagccaggccggcagcgagaaggactacgtggactctgtgaagggcagattcaccatcagccgggacaacgccaagaagtccctgtacctccagatgaacagcctgagagccgaggacaccgccgtgtactattgtgcctctggcgtgtacagcttcgactacagaggccagggcaccctggtcacagtctcttctggtaccggcggaggcggatctggcggcggaggtagcggtggcggaggatctgaattcgacgagatcgtgctgacacagagccctgccacactctctctgagccctggcgaaagagccaccctgagctgtagcgccagcagcagcatcaactacatctactggctccagcagaagcccggccaggcccccagaatcctgatctacctgaccagcaacctggcctccggcgtgccagccagattttctggcagcggctccggcaccgacttcaccctgacaatcagcagcctggaacccgaggacttcgccgtgtactactgcctccagtggtccagcaaccccctgacctttggcggaggcaccaaggtggaaatcaagctcgagggacagcctaaggccaatcctaccgtgacactgttccctccaagcagcgaagaactccaggccaacaaggccacacttgtgtgcctgatctccgacttctaccctggggctgtgacagtggcttggaaggccgatggatctcctgtgaaagccggcgtggaaaccaccaagccatccaagcagagcaacaacaaatacgccgccagctcctacctgagcctgacacctgagcagtggaagtcccacagatcctacagctgccaagtgacccacgaaggcagcaccgtggaaaagacagtggcccctacagagtgcagcggcagagccgattgcggctttaccagcgagagctaccagcagggcgtgctgagcgccaccatcctgtacgagatcctgctgggcaaggccaccctgtacgccgtgctggtgtctgccctggtgctgatggctatggtcaagcggaaggacagccggggacgcgccaagagaagcggatctggcgtgaagcagaccctgaatttcgacctgctgaagctggctggcgacgtggaatccaacccaggccctactagtatggactggatttggcgcatccttttccttgtcggcgctgctaccggcgcgcattccttcgaagaagtgcaactggtggaaagcgggggaggacttgtgaagcctggcggctctctgagactgagctgtgccgcctctggcttcaccttcagcagctacgacatgagctgggtgcgccaggctcctggcaagggactggaatgggtgtccaccatcagcagcggcggcagctacacctactacctggacagcatcaagggccggttcaccatctccagagacaacgccaagaacagcctgtacctccagatgaactccctgcgggccgaggacacagccgtgtattattgcgccagacagggcctggattactggggcagaggcacccttgtgaccgtgtcctctacgcgtgcctctacaaagggaccctccgtgtttcctctggctcccagcagcaagtctacaagcggaggaacagccgctctgggctgcctggtcaaggattactttcccgagcctgtgaccgtgtcctggaatagcggagcactgacaagcggcgtgcacacctttccagccgtgctgcaaagcagcggcctgtactctctgagcagcgtggtcacagtgcctagctctagcctgggcacccagacctacatctgcaatgtgaaccacaagcctagcaacaccaaggtggacaagagagtggaacccaagagctgtatccccgaggacacattcttcccaagccccgagagcagctgcgacgtgaagctggtggaaaagagcttcgagacagacaccaacctgaacttccagaacctgagcgtgatcggcttcagaatcctgctgctgaaagtggccggctttaacctgctgatgaccctgcggctgtggtccagc

SEQ ID NO: 3194 - DNA, 2295 bp, Artificial Sequence
  Synthetic Polynucloetide
atggccttaccagtgaccgccttgctcctgccgctggccttgctgctccacgccgccaggccggaagtgcagctggttgaatctggcggaggactggttcagcctggcggatctctgagactgtcttgtgccgccagcggcttcagcttcagcgacttttggatgagctgggtccgacaggcccctggcaaaggacttgaatgggtcgccacaatcagccaggccggcagcgagaaggactacgtggactctgtgaagggcagattcaccatcagccgggacaacgccaagaagtccctgtacctccagatgaacagcctgagagccgaggacaccgccgtgtactattgtgcctctggcgtgtacagcttcgactacagaggccagggcaccctggtcacagtctcttctggtaccggcggaggcggatctggcggcggaggtagcggtggcggaggatctgaattcgacatcgtgatgacccagagccccgatagcctggccgtgtctctgggagagagagccaccatcaactgccgggccagcaagagcgtgtccaccagcggctacagcttcatgcactggtatcagcagaagcccggccagccccccaagctgctgatctacctggcctccaacctggaaagcggcgtgcccgatagattcagcggcagcggctctggcaccgacttcaccctgaccatcagttctcttcaggccgaggacgtggccgtgtactactgccagcacagcagagaggtgccctggacattcggccagggcacaaaggtggaaatcaagcggctcgagggacagcctaaggccaatcctaccgtgacactgttccctccaagcagcgaagaactccaggccaacaaggccacacttgtgtgcctgatctccgacttctaccctggggctgtgacagtggcttggaaggccgatggatctcctgtgaaagccggcgtggaaaccaccaagccatccaagcagagcaacaacaaatacgccgccagctcctacctgagcctgacacctgagcagtggaagtcccacagatcctacagctgccaagtgacccacgaaggcagcaccgtggaaaagacagtggcccctacagagtgcagcggcagagccgattgcggctttaccagcgagagctaccagcagggcgtgctgagcgccaccatcctgtacgagatcctgctgggcaaggccaccctgtacgccgtgctggtgtctgccctggtgctgatggctatggtcaagcggaaggacagccggggacgcgccaagagaagcggatctggcgtgaagcagaccctgaatttcgacctgctgaagctggctggcgacgtggaatccaacccaggccctactagtatggactggatttggcgcatccttttccttgtcggcgctgctaccggcgcgcattccttcgaacaggtgcagctggtgcagtctggggccgaagtgaagaaacctggggccagcgtgaaggtgtcctgcaaggccagcggatacacctttaccaactacggcatgaactgggtgcgccaggcccctggacagggcctggaatggatgggctggatcaacacctacaccggcgagcccacatacgccgacgccttcaagggcagattcgccttcagcctggacaccagcacctccaccgcctacctccagatcaacagcctgcggagcgacgacaccgccgtgtattattgcgccagagattacggcgactacgggatggactattggggccagggaaccaccgtgaccgtgtcctctacgcgtgcctctacaaagggaccctccgtgtttcctctggctcccagcagcaagtctacaagcggaggaacagccgctctgggctgcctggtcaaggattactttcccgagcctgtgaccgtgtcctggaatagcggagcactgacaagcggcgtgcacacctttccagccgtgctgcaaagcagcggcctgtactctctgagcagcgtggtcacagtgcctagctctagcctgggcacccagacctacatctgcaatgtgaaccacaagcctagcaacaccaaggtggacaagagagtggaacccaagagctgtatccccgaggacacattcttcccaagccccgagagcagctgcgacgtgaagctggtggaaaagagcttcgagacagacaccaacctgaacttccagaacctgagcgtgatcggcttcagaatcctgctgctgaaagtggccggctttaacctgctgatgaccctgcggctgtggtccagc

SEQ ID NO: 3195 - DNA, 2283 bp, Artificial Sequence
  Synthetic Polynucloetide
atggccttaccagtgaccgccttgctcctgccgctggccttgctgctccacgccgccaggccggaagtgcagctggttgaatctggcggaggactggttcagcctggcggatctctgagactgtcttgtgccgccagcggcttcagcttcagcgacttttggatgagctgggtccgacaggcccctggcaaaggacttgaatgggtcgccacaatcagccaggccggcagcgagaaggactacgtggactctgtgaagggcagattcaccatcagccgggacaacgccaagaagtccctgtacctccagatgaacagcctgagagccgaggacaccgccgtgtactattgtgcctctggcgtgtacagcttcgactacagaggccagggcaccctggtcacagtctcttctggtaccggcggaggcggatctggcggcggaggtagcggtggcggaggatctgaattcgacatcgtgatgacccagacccccctgaccctgagcgtgacaatcggacagcctgccagcatctcctgcaagagcagccagagcctgctggacagcgacggcaagacctacctgaactggctgctgcagaggccaggccagagccccgagagactgatctacctggtgtccaagctggactccggcgtgcccgatagattcacaggcagcggctccggcaccgacttcaccctgaagatcagccgggtggaagccgaggacctgggcgtgtactgttgttggcagggcacccacttcccttacaccttcggcggagggaccaaggtggaaatcaagggcctcgagggacagcctaaggccaatcctaccgtgacactgttccctccaagcagcgaagaactccaggccaacaaggccacacttgtgtgcctgatctccgacttctaccctggggctgtgacagtggcttggaaggccgatggatctcctgtgaaagccggcgtggaaaccaccaagccatccaagcagagcaacaacaaatacgccgccagctcctacctgagcctgacacctgagcagtggaagtcccacagatcctacagctgccaagtgacccacgaaggcagcaccgtggaaaagacagtggcccctacagagtgcagcggcagagccgattgcggctttaccagcgagagctaccagcagggcgtgctgagcgccaccatcctgtacgagatcctgctgggcaaggccaccctgtacgccgtgctggtgtctgccctggtgctgatggctatggtcaagcggaaggacagccggggacgcgccaagagaagcggatctggcgtgaagcagaccctgaatttcgacctgctgaagctggctggcgacgtggaatccaacccaggccctactagtatggactggatttggcgcatccttttccttgtcggcgctgctaccggcgcgcattccttcgaacaggtgcaactgcagcagcctggcgctgaacttgtgcggccaggcgcctctgtgaagctgagctgtaaagccagcggctacaccttcaccagctactggatgaactgggtcaagcagcgcccaggccagggcctggaatggatcggaatgatcgaccccagcgacagcgagacacactacaaccacatcttcaaggacaaggccaccctgaccgtggacaagtccagcagcacagcctacctgcaactgtccagcctgaccagcgaggacagcgccgtgtactactgcgcccggaacctgtatctgtggggccagggaacaagcgtgaccgtgtctagcacgcgtgcctctacaaagggaccctccgtgtttcctctggctcccagcagcaagtctacaagcggaggaacagccgctctgggctgcctggtcaaggattactttcccgagcctgtgaccgtgtcctggaatagcggagcactgacaagcggcgtgcacacctttccagccgtgctgcaaagcagcggcctgtactctctgagcagcgtggtcacagtgcctagctctagcctgggcacccagacctacatctgcaatgtgaaccacaagcctagcaacaccaaggtggacaagagagtggaacccaagagctgtatccccgaggacacattcttcccaagccccgagagcagctgcgacgtgaagctggtggaaaagagcttcgagacagacaccaacctgaacttccagaacctgagcgtgatcggcttcagaatcctgctgctgaaagtggccggctttaacctgctgatgaccctgcggctgtggtccagc

SEQ ID NO: 3196 - DNA, 2307 bp, Artificial Sequence
  Synthetic Polynucloetide
atggccttaccagtgaccgccttgctcctgccgctggccttgctgctccacgccgccaggccggaagtgcagctggttgaatctggcggaggactggttcagcctggcggatctctgagactgtcttgtgccgccagcggcttcagcttcagcgacttttggatgagctgggtccgacaggcccctggcaaaggacttgaatgggtcgccacaatcagccaggccggcagcgagaaggactacgtggactctgtgaagggcagattcaccatcagccgggacaacgccaagaagtccctgtacctccagatgaacagcctgagagccgaggacaccgccgtgtactattgtgcctctggcgtgtacagcttcgactacagaggccagggcaccctggtcacagtctcttctggtaccggcggaggcggatctggcggcggaggtagcggtggcggaggatctgaattcgacatcgtgatgacccagagccccgatagcctggccgtgtctctgggagagagagccaccatcaactgcgagagcagccagagcctgctgaacagcggcaaccagaagaactacctgacctggtatcagcagaagcccggccagccccccaagcccctgatctattgggccagcaccagagaaagcggcgtgcccgatagattcagcggcagcggaagcggcaccgacttcaccctgaccatcagttctcttcaggccgaggacgtggccgtgtactactgccagaacgactacagctacccctacaccttcggccagggcaccaagctggaaatcaagagactcgagggacagcctaaggccaatcctaccgtgacactgttccctccaagcagcgaagaactccaggccaacaaggccacacttgtgtgcctgatctccgacttctaccctggggctgtgacagtggcttggaaggccgatggatctcctgtgaaagccggcgtggaaaccaccaagccatccaagcagagcaacaacaaatacgccgccagctcctacctgagcctgacacctgagcagtggaagtcccacagatcctacagctgccaagtgacccacgaaggcagcaccgtggaaaagacagtggcccctacagagtgcagcggcagagccgattgcggctttaccagcgagagctaccagcagggcgtgctgagcgccaccatcctgtacgagatcctgctgggcaaggccaccctgtacgccgtgctggtgtctgccctggtgctgatggctatggtcaagcggaaggacagccggggacgcgccaagagaagcggatctggcgtgaagcagaccctgaatttcgacctgctgaagctggctggcgacgtggaatccaacccaggccctactagtatggactggatttggcgcatccttttccttgtcggcgctgctaccggcgcgcattccttcgaagaagtgcagctggtgcagtctggggccgaagtgaagaagcctggcgagagcctgaagatcagctgcaagggcagcggctacagcttcaccgactactacatgaagtgggccagacagatgcccggcaagggcctggaatggatgggcgacatcatccccagcaacggggccaccttctacaaccagaaattcaagggccaagtgaccatctccgccgacaagagcatcagcaccacctacctccagtggtccagcctgaaggccagcgacaccgccatgtactattgcgccagaagccatctgctgcgggccagttggttcgcctattggggccagggaacaatggtcacagtgtccagcacgcgtgcctctacaaagggaccctccgtgtttcctctggctcccagcagcaagtctacaagcggaggaacagccgctctgggctgcctggtcaaggattactttcccgagcctgtgaccgtgtcctggaatagcggagcactgacaagcggcgtgcacacctttccagccgtgctgcaaagcagcggcctgtactctctgagcagcgtggtcacagtgcctagctctagcctgggcacccagacctacatctgcaatgtgaaccacaagcctagcaacaccaaggtggacaagagagtggaacccaagagctgtatccccgaggacacattcttcccaagccccgagagcagctgcgacgtgaagctggtggaaaagagcttcgagacagacaccaacctgaacttccagaacctgagcgtgatcggcttcagaatcctgctgctgaaagtggccggctttaacctgctgatgaccctgcggctgtggtccagc

SEQ ID NO: 3197 - DNA, 2292 bp, Artificial Sequence
  Synthetic Polynucloetide
atggccttaccagtgaccgccttgctcctgccgctggccttgctgctccacgccgccaggccggaagtgcagctggttgaatctggcggaggactggttcagcctggcggatctctgagactgtcttgtgccgccagcggcttcagcttcagcgacttttggatgagctgggtccgacaggcccctggcaaaggacttgaatgggtcgccacaatcagccaggccggcagcgagaaggactacgtggactctgtgaagggcagattcaccatcagccgggacaacgccaagaagtccctgtacctccagatgaacagcctgagagccgaggacaccgccgtgtactattgtgcctctggcgtgtacagcttcgactacagaggccagggcaccctggtcacagtctcttctggtaccggcggaggcggatctggcggcggaggtagcggtggcggaggatctgaattcgacatccagatgacccagtctaccagttccctgagtgcatccctcggagacagggtgacgatcagttgcagcgcaagccaagggatcaataactatctgaactggtatcagcagaaaccggacggaacagtcgaactcctgatttattacaccagcacccttcagagtggcgtcccttcccggttcagtggctccggaagcgggaccgattactccctgaccatttctaatctggagccagaggacataggaacgtattattgccagcagtatagtaaactgccacgaacttttggaggggggacgaaactggagatcaaactcgagggacagcctaaggccaatcctaccgtgacactgttccctccaagcagcgaagaactccaggccaacaaggccacacttgtgtgcctgatctccgacttctaccctggggctgtgacagtggcttggaaggccgatggatctcctgtgaaagccggcgtggaaaccaccaagccatccaagcagagcaacaacaaatacgccgccagctcctacctgagcctgacacctgagcagtggaagtcccacagatcctacagctgccaagtgacccacgaaggcagcaccgtggaaaagacagtggcccctacagagtgcagcggcagagccgattgcggctttaccagcgagagctaccagcagggcgtgctgagcgccaccatcctgtacgagatcctgctgggcaaggccaccctgtacgccgtgctggtgtctgccctggtgctgatggctatggtcaagcggaaggacagccggggacgcgccaagagaagcggatctggcgtgaagcagaccctgaatttcgacctgctgaagctggctggcgacgtggaatccaacccaggccctactagtatggactggatttggcgcatccttttccttgtcggcgctgctaccggcgcgcattccttcgaacaggtgcaactccagcagtccggaagcgagcttatgatgccaggggcatcagtgaagatcagctgcaaggctactggctacaccttctctaattactggatagagtgggttaaacaaaggccagggcacggcctggaatggatcggcgagatcctgcctgggacaggccgaaccatttataacgagaagttcaaaggcaaggctactttcaccgcagatataagctctaatacagtgcaaatgcagctctcttccctgacaagtgaggatagtgccgtgtattattgcgcacgaagagattactatggaaatttttattacgctatggattattggggtcaaggaacaagtgtgaccgttagcagcacgcgtgcctctacaaagggaccctccgtgtttcctctggctcccagcagcaagtctacaagcggaggaacagccgctctgggctgcctggtcaaggattactttcccgagcctgtgaccgtgtcctggaatagcggagcactgacaagcggcgtgcacacctttccagccgtgctgcaaagcagcggcctgtactctctgagcagcgtggtcacagtgcctagctctagcctgggcacccagacctacatctgcaatgtgaaccacaagcctagcaacaccaaggtggacaagagagtggaacccaagagctgtatccccgaggacacattcttcccaagccccgagagcagctgcgacgtgaagctggtggaaaagagcttcgagacagacaccaacctgaacttccagaacctgagcgtgatcggcttcagaatcctgctgctgaaagtggccggctttaacctgctgatgaccctgcggctgtggtccagc

SEQ ID NO: 3198 - DNA, 2277 bp, Artificial Sequence
  Synthetic Polynucloetide
atggccttaccagtgaccgccttgctcctgccgctggccttgctgctccacgccgccaggccggaagtgcagctggttgaatctggcggaggactggttcagcctggcggatctctgagactgtcttgtgccgccagcggcttcagcttcagcgacttttggatgagctgggtccgacaggcccctggcaaaggacttgaatgggtcgccacaatcagccaggccggcagcgagaaggactacgtggactctgtgaagggcagattcaccatcagccgggacaacgccaagaagtccctgtacctccagatgaacagcctgagagccgaggacaccgccgtgtactattgtgcctctggcgtgtacagcttcgactacagaggccagggcaccctggtcacagtctcttctggtaccggcggaggcggatctggcggcggaggtagcggtggcggaggatctgaattcgacatccagatgacccagagccctgccagcctgtccgtgtctgtgggcgagacagtgaccatcacctgtcgggccagcgagaacatctacagcaacctggcctggtatcagcagaagcagggcaagagcccccaactgctggtgtacgccgccaccaatctggccgatggcgtgcccagcagattttccggctctggcagcggcacccagtacagcctgaagatcaacagcctccagagcgaggacttcggcagctactactgccagcacttctggggcacctggacctttggaggaggcaccaccctggaaatcaagctcgagggacagcctaaggccaatcctaccgtgacactgttccctccaagcagcgaagaactccaggccaacaaggccacacttgtgtgcctgatctccgacttctaccctggggctgtgacagtggcttggaaggccgatggatctcctgtgaaagccggcgtggaaaccaccaagccatccaagcagagcaacaacaaatacgccgccagctcctacctgagcctgacacctgagcagtggaagtcccacagatcctacagctgccaagtgacccacgaaggcagcaccgtggaaaagacagtggcccctacagagtgcagcggcagagccgattgcggctttaccagcgagagctaccagcagggcgtgctgagcgccaccatcctgtacgagatcctgctgggcaaggccaccctgtacgccgtgctggtgtctgccctggtgctgatggctatggtcaagcggaaggacagccggggacgcgccaagagaagcggatctggcgtgaagcagaccctgaatttcgacctgctgaagctggctggcgacgtggaatccaacccaggccctactagtatggactggatttggcgcatccttttccttgtcggcgctgctaccggcgcgcattccttcgaagaagtgcaactccagcagagcggccctgagcttgtgaagcctggcgcttccgtgaagatgagctgcaaggccagcggctacaccttcaccgactactacatgaagtggatgaagcagagccacggcaagtccctggaatggatcggcgacatcaaccccaacaacggcggcaccacctacaaccagaagttcaagggcaaggccaccctgaccgtggacaagagcagcagcaccgcctacatgcaactgaacagcctgaccagcgaggacagcgccgtgtactactgcgccagagactacggctacggctatttcgactactggggccagggcacaaccctgacagtgtcctctacgcgtgcctctacaaagggaccctccgtgtttcctctggctcccagcagcaagtctacaagcggaggaacagccgctctgggctgcctggtcaaggattactttcccgagcctgtgaccgtgtcctggaatagcggagcactgacaagcggcgtgcacacctttccagccgtgctgcaaagcagcggcctgtactctctgagcagcgtggtcacagtgcctagctctagcctgggcacccagacctacatctgcaatgtgaaccacaagcctagcaacaccaaggtggacaagagagtggaacccaagagctgtatccccgaggacacattcttcccaagccccgagagcagctgcgacgtgaagctggtggaaaagagcttcgagacagacaccaacctgaacttccagaacctgagcgtgatcggcttcagaatcctgctgctgaaagtggccggctttaacctgctgatgaccctgcggctgtggtccagc

SEQ ID NO: 3199 - DNA, 2286 bp, Artificial Sequence
  Synthetic Polynucloetide
atggccttaccagtgaccgccttgctcctgccgctggccttgctgctccacgccgccaggccggaagtgcagctggttgaatctggcggaggactggttcagcctggcggatctctgagactgtcttgtgccgccagcggcttcagcttcagcgacttttggatgagctgggtccgacaggcccctggcaaaggacttgaatgggtcgccacaatcagccaggccggcagcgagaaggactacgtggactctgtgaagggcagattcaccatcagccgggacaacgccaagaagtccctgtacctccagatgaacagcctgagagccgaggacaccgccgtgtactattgtgcctctggcgtgtacagcttcgactacagaggccagggcaccctggtcacagtctcttctggtaccggcggaggcggatctggcggcggaggtagcggtggcggaggatctgaattcgagatcgtgctgacacagagccctggcaccctgagcctgtctccaggcgaaagagccacactgagctgtcgggcctctcagagcgtgggaggctacctggcttggtatcagcagaagccaggccaggcccccagactgctgatctacgacgccagcaatcgggccacaggcatccccgccagattttctggcagcggctccggcaccgacttcaccctgacaatcagcagcctggaacccgaggacttcgccgtgtactactgccagcagcggaacaactggccccccatgtacacattcggccagggcaccaagctggaaatcaagagactcgagggacagcctaaggccaatcctaccgtgacactgttccctccaagcagcgaagaactccaggccaacaaggccacacttgtgtgcctgatctccgacttctaccctggggctgtgacagtggcttggaaggccgatggatctcctgtgaaagccggcgtggaaaccaccaagccatccaagcagagcaacaacaaatacgccgccagctcctacctgagcctgacacctgagcagtggaagtcccacagatcctacagctgccaagtgacccacgaaggcagcaccgtggaaaagacagtggcccctacagagtgcagcggcagagccgattgcggctttaccagcgagagctaccagcagggcgtgctgagcgccaccatcctgtacgagatcctgctgggcaaggccaccctgtacgccgtgctggtgtctgccctggtgctgatggctatggtcaagcggaaggacagccggggacgcgccaagagaagcggatctggcgtgaagcagaccctgaatttcgacctgctgaagctggctggcgacgtggaatccaacccaggccctactagtatggactggatttggcgcatccttttccttgtcggcgctgctaccggcgcgcattccttcgaacaggtgcaactggtgcagagcggagccgaagtgaagaaacccggcagcagcgtgaaggtgtcctgcaaggcttccggcggcaccttcagcagctacgccatttcttgggtgcgccaggctcctggacagggcctggaatggatgggcggcatcatccctatcctgggcaccgccaactacgcccagaaattccagggcagagtgaccatcaccgccgacgagagcaccagcaccgcctacatggaactgagcagcctgcggagcgaggacacagccgtgtattattgcgccagatggggcggaggggccttcgacatttggggccagggaacaatggtcaccgtgtccagcacgcgtgcctctacaaagggaccctccgtgtttcctctggctcccagcagcaagtctacaagcggaggaacagccgctctgggctgcctggtcaaggattactttcccgagcctgtgaccgtgtcctggaatagcggagcactgacaagcggcgtgcacacctttccagccgtgctgcaaagcagcggcctgtactctctgagcagcgtggtcacagtgcctagctctagcctgggcacccagacctacatctgcaatgtgaaccacaagcctagcaacaccaaggtggacaagagagtggaacccaagagctgtatccccgaggacacattcttcccaagccccgagagcagctgcgacgtgaagctggtggaaaagagcttcgagacagacaccaacctgaacttccagaacctgagcgtgatcggcttcagaatcctgctgctgaaagtggccggctttaacctgctgatgaccctgcggctgtggtccagc

SEQ ID NO: 3200 - DNA, 2271 bp, Artificial Sequence
  Synthetic Polynucloetide
atggccttaccagtgaccgccttgctcctgccgctggccttgctgctccacgccgccaggccggaagtgcagctggttgaatctggcggaggactggttcagcctggcggatctctgagactgtcttgtgccgccagcggcttcagcttcagcgacttttggatgagctgggtccgacaggcccctggcaaaggacttgaatgggtcgccacaatcagccaggccggcagcgagaaggactacgtggactctgtgaagggcagattcaccatcagccgggacaacgccaagaagtccctgtacctccagatgaacagcctgagagccgaggacaccgccgtgtactattgtgcctctggcgtgtacagcttcgactacagaggccagggcaccctggtcacagtctcttctggtaccggcggaggcggatctggcggcggaggtagcggtggcggaggatctgaattccagatcgtgctgacacagagccctgccctgatgagcgccagccctggcgagaaagtgaccatgacctgtagcgccagcagcagcgtgcgctacatgtactggtatcagcagaagcccagaagcagccccaagccctggattcacctgaccagcaatctggcctctggcgtgcccgctagattttccggctctggcagcggcaccagctacagcctgaccatcagcagcatggaagccgaggacgccgccacctactactgccagcagtggtccagccaccccttcacatttggctccggcaccaagctggaaatcaagctcgagggacagcctaaggccaatcctaccgtgacactgttccctccaagcagcgaagaactccaggccaacaaggccacacttgtgtgcctgatctccgacttctaccctggggctgtgacagtggcttggaaggccgatggatctcctgtgaaagccggcgtggaaaccaccaagccatccaagcagagcaacaacaaatacgccgccagctcctacctgagcctgacacctgagcagtggaagtcccacagatcctacagctgccaagtgacccacgaaggcagcaccgtggaaaagacagtggcccctacagagtgcagcggcagagccgattgcggctttaccagcgagagctaccagcagggcgtgctgagcgccaccatcctgtacgagatcctgctgggcaaggccaccctgtacgccgtgctggtgtctgccctggtgctgatggctatggtcaagcggaaggacagccggggacgcgccaagagaagcggatctggcgtgaagcagaccctgaatttcgacctgctgaagctggctggcgacgtggaatccaacccaggccctactagtatggactggatttggcgcatccttttccttgtcggcgctgctaccggcgcgcattccttcgaagatgtgcaactccaggaaagcggccctggccttgtgaagcctagccagagcctgtccctgacctgtaccgtgaccggcttcagcatcaccagcgactactcttggaactggatcagacagttccctggcaacaaactggaatggatgggctacatcagctactccggccacacctcctacaaccccagcctggaaagccggatctccatcaccagagacaccagcaagaaccagttcttcttgcaactgaacagcgtgaccaccgaggataccgccacatattactgtaccagaggcaactgggacgtggtgtactggggccagggcacacttgtgaccgtgtctgctacgcgtgcctctacaaagggaccctccgtgtttcctctggctcccagcagcaagtctacaagcggaggaacagccgctctgggctgcctggtcaaggattactttcccgagcctgtgaccgtgtcctggaatagcggagcactgacaagcggcgtgcacacctttccagccgtgctgcaaagcagcggcctgtactctctgagcagcgtggtcacagtgcctagctctagcctgggcacccagacctacatctgcaatgtgaaccacaagcctagcaacaccaaggtggacaagagagtggaacccaagagctgtatccccgaggacacattcttcccaagccccgagagcagctgcgacgtgaagctggtggaaaagagcttcgagacagacaccaacctgaacttccagaacctgagcgtgatcggcttcagaatcctgctgctgaaagtggccggctttaacctgctgatgaccctgcggctgtggtccagc

SEQ ID NO: 3201 - DNA, 2301 bp, Artificial Sequence
  Synthetic Polynucloetide
atggccttaccagtgaccgccttgctcctgccgctggccttgctgctccacgccgccaggccggaagtgcagctggttgaatctggcggaggactggttcagcctggcggatctctgagactgtcttgtgccgccagcggcttcagcttcagcgacttttggatgagctgggtccgacaggcccctggcaaaggacttgaatgggtcgccacaatcagccaggccggcagcgagaaggactacgtggactctgtgaagggcagattcaccatcagccgggacaacgccaagaagtccctgtacctccagatgaacagcctgagagccgaggacaccgccgtgtactattgtgcctctggcgtgtacagcttcgactacagaggccagggcaccctggtcacagtctcttctggtaccggcggaggcggatctggcggcggaggtagcggtggcggaggatctgaattcgacgtcgtgatgacccagagccctctgagcctgcctgtgacactgggacagcctgccagcatctcctgtcggagcagccagagcatcgtgcacagcgacggcaacacctacctggaatggtatcagcagcggccaggccagagccccagacggctgatctacaaggtgtccaacagattcagcggcgtgcccgacagattctccggcagcggctctggcaccgacttcaccctgaagatcagcagagtggaagccgaggacgtgggcgtgtactactgttttcaaggcagccacgccccctggacctttggcggaggaacaaaggtggaaatcaagctcgagggacagcctaaggccaatcctaccgtgacactgttccctccaagcagcgaagaactccaggccaacaaggccacacttgtgtgcctgatctccgacttctaccctggggctgtgacagtggcttggaaggccgatggatctcctgtgaaagccggcgtggaaaccaccaagccatccaagcagagcaacaacaaatacgccgccagctcctacctgagcctgacacctgagcagtggaagtcccacagatcctacagctgccaagtgacccacgaaggcagcaccgtggaaaagacagtggcccctacagagtgcagcggcagagccgattgcggctttaccagcgagagctaccagcagggcgtgctgagcgccaccatcctgtacgagatcctgctgggcaaggccaccctgtacgccgtgctggtgtctgccctggtgctgatggctatggtcaagcggaaggacagccggggacgcgccaagagaagcggatctggcgtgaagcagaccctgaatttcgacctgctgaagctggctggcgacgtggaatccaacccaggccctactagtatggactggatttggcgcatccttttccttgtcggcgctgctaccggcgcgcattccttcgaagaagtgcaactggtggaatcaggcggcggactggtgcagcctggcggatctctgagactgagctgtgccgccagcggcttcaccttcagcagctacggaatgcactgggtgcgccaggcccctggcaaaggactggaatgggtggcctacatcaccaccagaagcagcaccatctactacgccgacagcgtgaagggccggttcaccatctccagagacaacgccaagaacagcctgtacctccagatgaactccctgcgggccgaggacaccgccgtgtactattgcaccagagagcccctgaccggctactacgctatggactattggggccagggcaccagcgtgaccgtgtctagtacgcgtgcctctacaaagggaccctccgtgtttcctctggctcccagcagcaagtctacaagcggaggaacagccgctctgggctgcctggtcaaggattactttcccgagcctgtgaccgtgtcctggaatagcggagcactgacaagcggcgtgcacacctttccagccgtgctgcaaagcagcggcctgtactctctgagcagcgtggtcacagtgcctagctctagcctgggcacccagacctacatctgcaatgtgaaccacaagcctagcaacaccaaggtggacaagagagtggaacccaagagctgtatccccgaggacacattcttcccaagccccgagagcagctgcgacgtgaagctggtggaaaagagcttcgagacagacaccaacctgaacttccagaacctgagcgtgatcggcttcagaatcctgctgctgaaagtggccggctttaacctgctgatgaccctgcggctgtggtccagc

SEQ ID NO: 3202 - DNA, 2277 bp, Artificial Sequence
  Synthetic Polynucloetide
atggccttaccagtgaccgccttgctcctgccgctggccttgctgctccacgccgccaggccggaagtgcagctggttgaatctggcggaggactggttcagcctggcggatctctgagactgtcttgtgccgccagcggcttcagcttcagcgacttttggatgagctgggtccgacaggcccctggcaaaggacttgaatgggtcgccacaatcagccaggccggcagcgagaaggactacgtggactctgtgaagggcagattcaccatcagccgggacaacgccaagaagtccctgtacctccagatgaacagcctgagagccgaggacaccgccgtgtactattgtgcctctggcgtgtacagcttcgactacagaggccagggcaccctggtcacagtctcttctggtaccggcggaggcggatctggcggcggaggtagcggtggcggaggatctgaattcgacatccagatgacccagagccccagcagcctgtctgccagcgtgggcgacagagtgaccatcacctgtagagccagccagagcatcagcctgtggctgaactggtatcagcagaagcccggcaaggcccccaagctgctgatctacgccgccagcacactccagagcggcgtgccaagcagattttccggcagcggctccggcaccgacttcaccctgacaatcagctccctccagcccgaggacttcgccacctactactgccagcagtactacaccagcccctacaccttcggccagggcaccaaggtggaaatcaagagactcgagggacagcctaaggccaatcctaccgtgacactgttccctccaagcagcgaagaactccaggccaacaaggccacacttgtgtgcctgatctccgacttctaccctggggctgtgacagtggcttggaaggccgatggatctcctgtgaaagccggcgtggaaaccaccaagccatccaagcagagcaacaacaaatacgccgccagctcctacctgagcctgacacctgagcagtggaagtcccacagatcctacagctgccaagtgacccacgaaggcagcaccgtggaaaagacagtggcccctacagagtgcagcggcagagccgattgcggctttaccagcgagagctaccagcagggcgtgctgagcgccaccatcctgtacgagatcctgctgggcaaggccaccctgtacgccgtgctggtgtctgccctggtgctgatggctatggtcaagcggaaggacagccggggacgcgccaagagaagcggatctggcgtgaagcagaccctgaatttcgacctgctgaagctggctggcgacgtggaatccaacccaggccctactagtatggactggatttggcgcatccttttccttgtcggcgctgctaccggcgcgcattccttcgaacaggtgcaactgctggaatctggcggcggactggtgcagcctggcggatctctgagactgagctgtgccgccagcggcttcaccttcagcagctacgccatgagctgggtgcgccaggcccctggaaaaggactggaatgggtgtccgtgatccggtccagcggcagcagcacctattacgccgatagcgtgaagggccggttcaccatcagccgggacaacagcaagaacaccctgtacctccagatgaacagcctgcgggccgaggacaccgccgtgtactattgtgctaggggaggcggctacttcgactactggggccagggaacactcgtgaccgtgtcctctacgcgtgcctctacaaagggaccctccgtgtttcctctggctcccagcagcaagtctacaagcggaggaacagccgctctgggctgcctggtcaaggattactttcccgagcctgtgaccgtgtcctggaatagcggagcactgacaagcggcgtgcacacctttccagccgtgctgcaaagcagcggcctgtactctctgagcagcgtggtcacagtgcctagctctagcctgggcacccagacctacatctgcaatgtgaaccacaagcctagcaacaccaaggtggacaagagagtggaacccaagagctgtatccccgaggacacattcttcccaagccccgagagcagctgcgacgtgaagctggtggaaaagagcttcgagacagacaccaacctgaacttccagaacctgagcgtgatcggcttcagaatcctgctgctgaaagtggccggctttaacctgctgatgaccctgcggctgtggtccagc

SEQ ID NO: 3203 - DNA, 2286 bp, Artificial Sequence
  Synthetic Polynucloetide
atggccttaccagtgaccgccttgctcctgccgctggccttgctgctccacgccgccaggccggaagtgcagctggttgaatctggcggaggactggttcagcctggcggatctctgagactgtcttgtgccgccagcggcttcagcttcagcgacttttggatgagctgggtccgacaggcccctggcaaaggacttgaatgggtcgccacaatcagccaggccggcagcgagaaggactacgtggactctgtgaagggcagattcaccatcagccgggacaacgccaagaagtccctgtacctccagatgaacagcctgagagccgaggacaccgccgtgtactattgtgcctctggcgtgtacagcttcgactacagaggccagggcaccctggtcacagtctcttctggtaccggcggaggcggatctggcggcggaggtagcggtggcggaggatctgaattcgacatccagatgacccagagccccagcagcctgtctgccagcgtgggcgacagagtgaccatcacctgtagagccagccagagcatcagcagctacctgaactggtatcagcagaagcccggcaaggcccccaaactgctgatctacgccgtgtccacactccagagcggcgtgcccagcagattttctggcagcggctccggcaccgacttcaccctgacaatcagctccctccagcccgaggacttcgccacctactactgtcagcagagcggcaccttccctcccaccacatttggacagggcaccaaggtggaaatcaagagactcgagggacagcctaaggccaatcctaccgtgacactgttccctccaagcagcgaagaactccaggccaacaaggccacacttgtgtgcctgatctccgacttctaccctggggctgtgacagtggcttggaaggccgatggatctcctgtgaaagccggcgtggaaaccaccaagccatccaagcagagcaacaacaaatacgccgccagctcctacctgagcctgacacctgagcagtggaagtcccacagatcctacagctgccaagtgacccacgaaggcagcaccgtggaaaagacagtggcccctacagagtgcagcggcagagccgattgcggctttaccagcgagagctaccagcagggcgtgctgagcgccaccatcctgtacgagatcctgctgggcaaggccaccctgtacgccgtgctggtgtctgccctggtgctgatggctatggtcaagcggaaggacagccggggacgcgccaagagaagcggatctggcgtgaagcagaccctgaatttcgacctgctgaagctggctggcgacgtggaatccaacccaggccctactagtatggactggatttggcgcatccttttccttgtcggcgctgctaccggcgcgcattccttcgaacaggtgcaactgctggaatctggcggcggactggtgcagcctggcggatctctgagactgagctgtgccgccagcggcttcaccttcagcagccacggaatgcactgggtgcgccaggcccctggaaagggactggaatgggtgtccgtgatctccggcagcggcagcaataccggctacgccgatagcgtgaagggccggttcaccatcagccgggacaacagcaagaacaccctgtacctccagatgaacagcctgcgggccgaggacaccgccgtgtactattgtgccagacagtggggcagctacgccttcgattcttggggccagggcaccctcgtgaccgtgtcatctacgcgtgcctctacaaagggaccctccgtgtttcctctggctcccagcagcaagtctacaagcggaggaacagccgctctgggctgcctggtcaaggattactttcccgagcctgtgaccgtgtcctggaatagcggagcactgacaagcggcgtgcacacctttccagccgtgctgcaaagcagcggcctgtactctctgagcagcgtggtcacagtgcctagctctagcctgggcacccagacctacatctgcaatgtgaaccacaagcctagcaacaccaaggtggacaagagagtggaacccaagagctgtatccccgaggacacattcttcccaagccccgagagcagctgcgacgtgaagctggtggaaaagagcttcgagacagacaccaacctgaacttccagaacctgagcgtgatcggcttcagaatcctgctgctgaaagtggccggctttaacctgctgatgaccctgcggctgtggtccagc

SEQ ID NO: 3204 - DNA, 2316 bp, Artificial Sequence
  Synthetic Polynucloetide
atggccttaccagtgaccgccttgctcctgccgctggccttgctgctccacgccgccaggccggaagtgcagctggttgaatctggcggaggactggttcagcctggcggatctctgagactgtcttgtgccgccagcggcttcagcttcagcgacttttggatgagctgggtccgacaggcccctggcaaaggacttgaatgggtcgccacaatcagccaggccggcagcgagaaggactacgtggactctgtgaagggcagattcaccatcagccgggacaacgccaagaagtccctgtacctccagatgaacagcctgagagccgaggacaccgccgtgtactattgtgcctctggcgtgtacagcttcgactacagaggccagggcaccctggtcacagtctcttctggtaccggcggaggcggatctggcggcggaggtagcggtggcggaggatctgaattcgacatcgtgatgagccagagccctagcagcctggccgtgtccgtgggcgagaaagtgaccatgagctgcaagagcagccagtccctgctgcacagcagcaaccagaagaactacctggcctggtatcagcagaagcccggccagtcccccaaggtgctgatctactgggccagcaccagagaaagcggcgtgcccgatagattcaccggcagcggctctggcaccgacttcaccctgaccatcaccagcgtgaagtccgaggacctggctgtgtactactgccagcagtattacagctacccctggaccttcggcggaggcacccggctggaaatcaaaagactcgagggacagcctaaggccaatcctaccgtgacactgttccctccaagcagcgaagaactccaggccaacaaggccacacttgtgtgcctgatctccgacttctaccctggggctgtgacagtggcttggaaggccgatggatctcctgtgaaagccggcgtggaaaccaccaagccatccaagcagagcaacaacaaatacgccgccagctcctacctgagcctgacacctgagcagtggaagtcccacagatcctacagctgccaagtgacccacgaaggcagcaccgtggaaaagacagtggcccctacagagtgcagcggcagagccgattgcggctttaccagcgagagctaccagcagggcgtgctgagcgccaccatcctgtacgagatcctgctgggcaaggccaccctgtacgccgtgctggtgtctgccctggtgctgatggctatggtcaagcggaaggacagccggggacgcgccaagagaagcggatctggcgtgaagcagaccctgaatttcgacctgctgaagctggctggcgacgtggaatccaacccaggccctactagtatggactggatttggcgcatccttttccttgtcggcgctgctaccggcgcgcattccttcgaagaagtgcaactccagcagagcgtggccgagcttgtgaagcctggcgcttccgtgaagatgtcctgcaaggtgtccggctacaccctgacagaccacaccatccactggatgaagcagcggcctgagcagggcctggaatggatcggctacatctaccccagggacggcatcaccggctacaacgagaagttcaagggcaaggccacactgaccgccgacaccagcagcagcacagcctacatgcaactgaacagcctgaccagcgaggacagcgccgtgtacttctgtgccagatggggctacagctacagaaactacgcctactactacgactactggggccagggcacaaccctgaccgtgtctagtacgcgtgcctctacaaagggaccctccgtgtttcctctggctcccagcagcaagtctacaagcggaggaacagccgctctgggctgcctggtcaaggattactttcccgagcctgtgaccgtgtcctggaatagcggagcactgacaagcggcgtgcacacctttccagccgtgctgcaaagcagcggcctgtactctctgagcagcgtggtcacagtgcctagctctagcctgggcacccagacctacatctgcaatgtgaaccacaagcctagcaacaccaaggtggacaagagagtggaacccaagagctgtatccccgaggacacattcttcccaagccccgagagcagctgcgacgtgaagctggtggaaaagagcttcgagacagacaccaacctgaacttccagaacctgagcgtgatcggcttcagaatcctgctgctgaaagtggccggctttaacctgctgatgaccctgcggctgtggtccagc

SEQ ID NO: 3205 - DNA, 2307 bp, Artificial Sequence
  Synthetic Polynucloetide
atggccttaccagtgaccgccttgctcctgccgctggccttgctgctccacgccgccaggccggaagtgcagctggttgaatctggcggaggactggttcagcctggcggatctctgagactgtcttgtgccgccagcggcttcagcttcagcgacttttggatgagctgggtccgacaggcccctggcaaaggacttgaatgggtcgccacaatcagccaggccggcagcgagaaggactacgtggactctgtgaagggcagattcaccatcagccgggacaacgccaagaagtccctgtacctccagatgaacagcctgagagccgaggacaccgccgtgtactattgtgcctctggcgtgtacagcttcgactacagaggccagggcaccctggtcacagtctcttctggtaccggcggaggcggatctggcggcggaggtagcggtggcggaggatctgaattcgagatcgtgctgacacagagccctggcaccctgagcctgtctccaggcgaaagagccacactgagctgtcgggccagccagagcgtgtccagctcttacctggcctggtatcagcagaagcccggccaggctccccggctgctgatctacggaacaagcagcagagccaccggcatccccgacagattttctggcagcggctccggcaccgacttcaccctgacaatcagcagactggaacccgaggacttcgccgtgtactactgccagcagtacggcagcagccccttcacctttggcggaggcaccaaggtggaaatcaagagactcgagggacagcctaaggccaatcctaccgtgacactgttccctccaagcagcgaagaactccaggccaacaaggccacacttgtgtgcctgatctccgacttctaccctggggctgtgacagtggcttggaaggccgatggatctcctgtgaaagccggcgtggaaaccaccaagccatccaagcagagcaacaacaaatacgccgccagctcctacctgagcctgacacctgagcagtggaagtcccacagatcctacagctgccaagtgacccacgaaggcagcaccgtggaaaagacagtggcccctacagagtgcagcggcagagccgattgcggctttaccagcgagagctaccagcagggcgtgctgagcgccaccatcctgtacgagatcctgctgggcaaggccaccctgtacgccgtgctggtgtctgccctggtgctgatggctatggtcaagcggaaggacagccggggacgcgccaagagaagcggatctggcgtgaagcagaccctgaatttcgacctgctgaagctggctggcgacgtggaatccaacccaggccctactagtatggactggatttggcgcatccttttccttgtcggcgctgctaccggcgcgcattccttcgaacaggtgcaactccaggaatctggccccggactggctaagcccagcgagacactgagcctgacctgtaccgtgtccggcgacagcatcaccagctactactggtcctggatcagacagccccctggcaagggcctggaatggatcggctacatctactacagcggcagcaccaactacaaccccagcctgaagtccagagtgaccatcagcgtggacaccagcaagaaccagttctccctgaagctgagcagcgtgacagccgccgacaccgccgtgtattattgcgccagagatcagcggagaatcgccgctgccggcacccacttttacggcatggatgtgtggggccagggcaccaccgtgaccgtgtcatctacgcgtgcctctacaaagggaccctccgtgtttcctctggctcccagcagcaagtctacaagcggaggaacagccgctctgggctgcctggtcaaggattactttcccgagcctgtgaccgtgtcctggaatagcggagcactgacaagcggcgtgcacacctttccagccgtgctgcaaagcagcggcctgtactctctgagcagcgtggtcacagtgcctagctctagcctgggcacccagacctacatctgcaatgtgaaccacaagcctagcaacaccaaggtggacaagagagtggaacccaagagctgtatccccgaggacacattcttcccaagccccgagagcagctgcgacgtgaagctggtggaaaagagcttcgagacagacaccaacctgaacttccagaacctgagcgtgatcggcttcagaatcctgctgctgaaagtggccggctttaacctgctgatgaccctgcggctgtggtccagc

SEQ ID NO: 3206 - DNA, 2283 bp, Artificial Sequence
  Synthetic Polynucloetide
atggccttaccagtgaccgccttgctcctgccgctggccttgctgctccacgccgccaggccggaagtgcagctggttgaatctggcggaggactggttcagcctggcggatctctgagactgtcttgtgccgccagcggcttcagcttcagcgacttttggatgagctgggtccgacaggcccctggcaaaggacttgaatgggtcgccacaatcagccaggccggcagcgagaaggactacgtggactctgtgaagggcagattcaccatcagccgggacaacgccaagaagtccctgtacctccagatgaacagcctgagagccgaggacaccgccgtgtactattgtgcctctggcgtgtacagcttcgactacagaggccagggcaccctggtcacagtctcttctggtaccggcggaggcggatctggcggcggaggtagcggtggcggaggatctgaattcgacatcctgctgacccagagccccgtgatcctgtccgtgtctcctggcgagagagtgtccttcagctgtcgggccagccagagcatcggcaccaacatccactggtatcagcagcggaccaacggcagccccagactgctgattaagtacgccagcgagtccatcagcggcatccccagcagattttccggcagcggctccggcaccgacttcaccctgagcatcaacagcgtggaaagcgaggacattgccgactactactgccagcagaacaacaactggcccaccaccttcggagccggcaccaagctggaactgaagctcgagggacagcctaaggccaatcctaccgtgacactgttccctccaagcagcgaagaactccaggccaacaaggccacacttgtgtgcctgatctccgacttctaccctggggctgtgacagtggcttggaaggccgatggatctcctgtgaaagccggcgtggaaaccaccaagccatccaagcagagcaacaacaaatacgccgccagctcctacctgagcctgacacctgagcagtggaagtcccacagatcctacagctgccaagtgacccacgaaggcagcaccgtggaaaagacagtggcccctacagagtgcagcggcagagccgattgcggctttaccagcgagagctaccagcagggcgtgctgagcgccaccatcctgtacgagatcctgctgggcaaggccaccctgtacgccgtgctggtgtctgccctggtgctgatggctatggtcaagcggaaggacagccggggacgcgccaagagaagcggatctggcgtgaagcagaccctgaatttcgacctgctgaagctggctggcgacgtggaatccaacccaggccctactagtatggactggatttggcgcatccttttccttgtcggcgctgctaccggcgcgcattccttcgaacaggtgcagctgaagcagagcggacctggcctggtgcagcctagccagagcctgtccatcacctgtaccgtgtccggcttcagcctgaccaactacggcgtgcactgggtgcgccagagccctggaaaaggactggaatggctgggagtgatttggagcggcggcaacaccgactacaacacccccttcaccagcagactgtctatcaacaaggacaacagcaagagccaggtgttcttcaagatgaacagcctccagagcaacgacaccgccatctactactgtgctagagccctgacctactatgactacgagttcgcctactggggccagggcacactcgtgacagtgtctgctacgcgtgcctctacaaagggaccctccgtgtttcctctggctcccagcagcaagtctacaagcggaggaacagccgctctgggctgcctggtcaaggattactttcccgagcctgtgaccgtgtcctggaatagcggagcactgacaagcggcgtgcacacctttccagccgtgctgcaaagcagcggcctgtactctctgagcagcgtggtcacagtgcctagctctagcctgggcacccagacctacatctgcaatgtgaaccacaagcctagcaacaccaaggtggacaagagagtggaacccaagagctgtatccccgaggacacattcttcccaagccccgagagcagctgcgacgtgaagctggtggaaaagagcttcgagacagacaccaacctgaacttccagaacctgagcgtgatcggcttcagaatcctgctgctgaaagtggccggctttaacctgctgatgaccctgcggctgtggtccagc

SEQ ID NO: 3207 - DNA, 2262 bp, Artificial Sequence
  Synthetic Polynucloetide
atggccttaccagtgaccgccttgctcctgccgctggccttgctgctccacgccgccaggccggaagtgcagctggttgaatctggcggaggactggttcagcctggcggatctctgagactgtcttgtgccgccagcggcttcagcttcagcgacttttggatgagctgggtccgacaggcccctggcaaaggacttgaatgggtcgccacaatcagccaggccggcagcgagaaggactacgtggactctgtgaagggcagattcaccatcagccgggacaacgccaagaagtccctgtacctccagatgaacagcctgagagccgaggacaccgccgtgtactattgtgcctctggcgtgtacagcttcgactacagaggccagggcaccctggtcacagtctcttctggtaccggcggaggcggatctggcggcggaggtagcggtggcggaggatctgaattcatgacccagagccccaagttcctgctggtgtctgccggcgacagagtgaccctgacatgcaaggccagccagagcgtgaacaacgacgtgtactggtatcagcaggaacccggccagtcccccaagctgctgatctactgggccagcaccagagaaagcggcgtgcccgatagattcaccggcagcggctctggcaccgacttcaccctgacaatcagcagcgtgcaggccgaggacctggccgtgtactactgcaagcagagctacaacctgtacaccttcggcggaggcaccaagctggaaatcaagagactcgagggacagcctaaggccaatcctaccgtgacactgttccctccaagcagcgaagaactccaggccaacaaggccacacttgtgtgcctgatctccgacttctaccctggggctgtgacagtggcttggaaggccgatggatctcctgtgaaagccggcgtggaaaccaccaagccatccaagcagagcaacaacaaatacgccgccagctcctacctgagcctgacacctgagcagtggaagtcccacagatcctacagctgccaagtgacccacgaaggcagcaccgtggaaaagacagtggcccctacagagtgcagcggcagagccgattgcggctttaccagcgagagctaccagcagggcgtgctgagcgccaccatcctgtacgagatcctgctgggcaaggccaccctgtacgccgtgctggtgtctgccctggtgctgatggctatggtcaagcggaaggacagccggggacgcgccaagagaagcggatctggcgtgaagcagaccctgaatttcgacctgctgaagctggctggcgacgtggaatccaacccaggccctactagtatggactggatttggcgcatccttttccttgtcggcgctgctaccggcgcgcattccttcgaagaatctggaagaggactggtgcagcctggcggcagcagaaagctgtcttgtgccgccagcggcttcaccttcagcaccagcggaatgcactgggtgcgccaggcccctgagaagggactggaatgggtggcctacatcagctccggcagcaccaccatctaccacgccgataccgtgaagggccggttcaccatcagccgggacaaccccaagaataccctgttcctccagatgaccagcctgcggagcgaggacaccgccatgtactattgctgcgccagaagcggccagttcggcaactacttcgactactggggccagggcaccaccctgaccgtgtcatctacgcgtgcctctacaaagggaccctccgtgtttcctctggctcccagcagcaagtctacaagcggaggaacagccgctctgggctgcctggtcaaggattactttcccgagcctgtgaccgtgtcctggaatagcggagcactgacaagcggcgtgcacacctttccagccgtgctgcaaagcagcggcctgtactctctgagcagcgtggtcacagtgcctagctctagcctgggcacccagacctacatctgcaatgtgaaccacaagcctagcaacaccaaggtggacaagagagtggaacccaagagctgtatccccgaggacacattcttcccaagccccgagagcagctgcgacgtgaagctggtggaaaagagcttcgagacagacaccaacctgaacttccagaacctgagcgtgatcggcttcagaatcctgctgctgaaagtggccggctttaacctgctgatgaccctgcggctgtggtccagc

SEQ ID NO: 3208 - DNA, 2277 bp, Artificial Sequence
  Synthetic Polynucloetide
atggccttaccagtgaccgccttgctcctgccgctggccttgctgctccacgccgccaggccggaagtgcagctggttgaatctggcggaggactggttcagcctggcggatctctgagactgtcttgtgccgccagcggcttcagcttcagcgacttttggatgagctgggtccgacaggcccctggcaaaggacttgaatgggtcgccacaatcagccaggccggcagcgagaaggactacgtggactctgtgaagggcagattcaccatcagccgggacaacgccaagaagtccctgtacctccagatgaacagcctgagagccgaggacaccgccgtgtactattgtgcctctggcgtgtacagcttcgactacagaggccagggcaccctggtcacagtctcttctggtaccggcggaggcggatctggcggcggaggtagcggtggcggaggatctgaattccagagcccatctagcctggctgtgtctgccggcgagaaagtgaccatgagctgcaagagcagccagagcctgctgaacagccggacccggaagaactacctggcctggtatcagcagaagcccggccagagccccaagctgctgatctactgggccagcaccagagaaagcggcgtgcccgatagattcaccggctctggcagcggcaccgacttcaccctgacaatcagcagcgtgcaggccgaggacctggccgtgtactactgcaagcagagcaacctgtacaccttcggcggaggcaccaagctggaaatcaagctcgagggacagcctaaggccaatcctaccgtgacactgttccctccaagcagcgaagaactccaggccaacaaggccacacttgtgtgcctgatctccgacttctaccctggggctgtgacagtggcttggaaggccgatggatctcctgtgaaagccggcgtggaaaccaccaagccatccaagcagagcaacaacaaatacgccgccagctcctacctgagcctgacacctgagcagtggaagtcccacagatcctacagctgccaagtgacccacgaaggcagcaccgtggaaaagacagtggcccctacagagtgcagcggcagagccgattgcggctttaccagcgagagctaccagcagggcgtgctgagcgccaccatcctgtacgagatcctgctgggcaaggccaccctgtacgccgtgctggtgtctgccctggtgctgatggctatggtcaagcggaaggacagccggggacgcgccaagagaagcggatctggcgtgaagcagaccctgaatttcgacctgctgaagctggctggcgacgtggaatccaacccaggccctactagtatggactggatttggcgcatccttttccttgtcggcgctgctaccggcgcgcattccttcgaacaggtgcagctggaagagtctggacccgagcttgtgaagcctggggccagcgtgaagctgtcctgtaaagccagcggctacaccttcaccgagtacatcatccactgggtcaagcagcggagcggccagggcctggaatggatcggctggttttaccctggctccggcagcatcaagtacaacgagaagttcaaggacaaggccaccctgaccgccgacaagtccagcagcaccgtgtacatggaactgagcggcctgaccagcgaggacagcgccgtgtatttctgcgccagacacgacggctacagctacttcgactattggggccagggcaccacactgaccgtgtcctctacgcgtgcctctacaaagggaccctccgtgtttcctctggctcccagcagcaagtctacaagcggaggaacagccgctctgggctgcctggtcaaggattactttcccgagcctgtgaccgtgtcctggaatagcggagcactgacaagcggcgtgcacacctttccagccgtgctgcaaagcagcggcctgtactctctgagcagcgtggtcacagtgcctagctctagcctgggcacccagacctacatctgcaatgtgaaccacaagcctagcaacaccaaggtggacaagagagtggaacccaagagctgtatccccgaggacacattcttcccaagccccgagagcagctgcgacgtgaagctggtggaaaagagcttcgagacagacaccaacctgaacttccagaacctgagcgtgatcggcttcagaatcctgctgctgaaagtggccggctttaacctgctgatgaccctgcggctgtggtccagc

SEQ ID NO: 3209 - DNA, 2286 bp, Artificial Sequence
  Synthetic Polynucloetide
atggccttaccagtgaccgccttgctcctgccgctggccttgctgctccacgccgccaggccggaagtgcagctggttgaatctggcggaggactggttcagcctggcggatctctgagactgtcttgtgccgccagcggcttcagcttcagcgacttttggatgagctgggtccgacaggcccctggcaaaggacttgaatgggtcgccacaatcagccaggccggcagcgagaaggactacgtggactctgtgaagggcagattcaccatcagccgggacaacgccaagaagtccctgtacctccagatgaacagcctgagagccgaggacaccgccgtgtactattgtgcctctggcgtgtacagcttcgactacagaggccagggcaccctggtcacagtctcttctggtaccggcggaggcggatctggcggcggaggtagcggtggcggaggatctgaattcgacatccagatgacccagagccccagcagcctgtctgcctctctgggcgagagagtgtccctgacctgtcgggccacacaggaactgagcggctacctgtcttggctgcagcagaagcccgacggcaccatcaagcggctgatctacgccgccagcaccctggatagcggcgtgcccaagagattcagcggcaacagaagcggcagcgactacagcctgaccatcagctccctggaaagcgaggacttcgccgactactactgcctgcagtacgccatctacccctacaccttcggcggaggcaccaagctggaaatcaagctcgagggacagcctaaggccaatcctaccgtgacactgttccctccaagcagcgaagaactccaggccaacaaggccacacttgtgtgcctgatctccgacttctaccctggggctgtgacagtggcttggaaggccgatggatctcctgtgaaagccggcgtggaaaccaccaagccatccaagcagagcaacaacaaatacgccgccagctcctacctgagcctgacacctgagcagtggaagtcccacagatcctacagctgccaagtgacccacgaaggcagcaccgtggaaaagacagtggcccctacagagtgcagcggcagagccgattgcggctttaccagcgagagctaccagcagggcgtgctgagcgccaccatcctgtacgagatcctgctgggcaaggccaccctgtacgccgtgctggtgtctgccctggtgctgatggctatggtcaagcggaaggacagccggggacgcgccaagagaagcggatctggcgtgaagcagaccctgaatttcgacctgctgaagctggctggcgacgtggaatccaacccaggccctactagtatggactggatttggcgcatccttttccttgtcggcgctgctaccggcgcgcattccttcgaagaggtgcaactgcagcagtctggccccgagcttgtgaagcctggcgcctccgtgaagatgagctgcaaggccagcggctacacctttaccagctacttcatccactgggtcaagcagaaacccggccagggcctggaatggatcggcttcatcaacccttacaacgacggcagcaagtacaacgagaagttcaagggcaaggccaccctgaccagcgacaagagcagcagcaccgcctacatggaactgtccagcctgacatccgaggacagcgccgtgtactactgcaccagggacgacggctactacggctacgccatggactactggggccagggaacaagcgtcaccgtgtcctctacgcgtgcctctacaaagggaccctccgtgtttcctctggctcccagcagcaagtctacaagcggaggaacagccgctctgggctgcctggtcaaggattactttcccgagcctgtgaccgtgtcctggaatagcggagcactgacaagcggcgtgcacacctttccagccgtgctgcaaagcagcggcctgtactctctgagcagcgtggtcacagtgcctagctctagcctgggcacccagacctacatctgcaatgtgaaccacaagcctagcaacaccaaggtggacaagagagtggaacccaagagctgtatccccgaggacacattcttcccaagccccgagagcagctgcgacgtgaagctggtggaaaagagcttcgagacagacaccaacctgaacttccagaacctgagcgtgatcggcttcagaatcctgctgctgaaagtggccggctttaacctgctgatgaccctgcggctgtggtccagc

SEQ ID NO: 3210 - DNA, 2301 bp, Artificial Sequence
  Synthetic Polynucloetide
atggccttaccagtgaccgccttgctcctgccgctggccttgctgctccacgccgccaggccggaagtgcagctggttgaatctggcggaggactggttcagcctggcggatctctgagactgtcttgtgccgccagcggcttcagcttcagcgacttttggatgagctgggtccgacaggcccctggcaaaggacttgaatgggtcgccacaatcagccaggccggcagcgagaaggactacgtggactctgtgaagggcagattcaccatcagccgggacaacgccaagaagtccctgtacctccagatgaacagcctgagagccgaggacaccgccgtgtactattgtgcctctggcgtgtacagcttcgactacagaggccagggcaccctggtcacagtctcttctggtaccggcggaggcggatctggcggcggaggtagcggtggcggaggatctgaattcgacaccatcgtgctgacacagagccctgcttccctggccgtgtccctgggacagagagccaccatctcttgcagagccagcgagagcgtggacagctacggcaacagcttcatgcactggtatcagcagaagcccggccagccccccaagctgctgatctacctggcctccaacctggaaagcggcgtgcccgccagattttctggcagcggcagcagaaccgacttcaccctgaccatcgaccccgtggaagccgatgatgccgccacctactactgccagcagaacaactacgacccctggaccttcggcggaggcaccaagctggaaatcaagctcgagggacagcctaaggccaatcctaccgtgacactgttccctccaagcagcgaagaactccaggccaacaaggccacacttgtgtgcctgatctccgacttctaccctggggctgtgacagtggcttggaaggccgatggatctcctgtgaaagccggcgtggaaaccaccaagccatccaagcagagcaacaacaaatacgccgccagctcctacctgagcctgacacctgagcagtggaagtcccacagatcctacagctgccaagtgacccacgaaggcagcaccgtggaaaagacagtggcccctacagagtgcagcggcagagccgattgcggctttaccagcgagagctaccagcagggcgtgctgagcgccaccatcctgtacgagatcctgctgggcaaggccaccctgtacgccgtgctggtgtctgccctggtgctgatggctatggtcaagcggaaggacagccggggacgcgccaagagaagcggatctggcgtgaagcagaccctgaatttcgacctgctgaagctggctggcgacgtggaatccaacccaggccctactagtatggactggatttggcgcatccttttccttgtcggcgctgctaccggcgcgcattccttcgaagaagtgcaactccagcagagcggccctgagcttgtgaagcctggcgcttccgtgaagatgagctgcaaggccagcggctacaccttcaccagctacgtgatgcactgggtcaagcagaaacctggacagggcctggaatggatcggctacatcaacccctacaacgacggcaccaagtacaacgagaagttcaagggcaaggccaccctgacaagcgacaccagcagcagcaccgcctacatggaactgaacagcctgaccagcgaggacagcgccgtgtacttctgcgccagacccatctacttcgacaacgactacttcgattactggggccagggcaccaccctgaaggtgtcctctacgcgtgcctctacaaagggaccctccgtgtttcctctggctcccagcagcaagtctacaagcggaggaacagccgctctgggctgcctggtcaaggattactttcccgagcctgtgaccgtgtcctggaatagcggagcactgacaagcggcgtgcacacctttccagccgtgctgcaaagcagcggcctgtactctctgagcagcgtggtcacagtgcctagctctagcctgggcacccagacctacatctgcaatgtgaaccacaagcctagcaacaccaaggtggacaagagagtggaacccaagagctgtatccccgaggacacattcttcccaagccccgagagcagctgcgacgtgaagctggtggaaaagagcttcgagacagacaccaacctgaacttccagaacctgagcgtgatcggcttcagaatcctgctgctgaaagtggccggctttaacctgctgatgaccctgcggctgtggtccagc

SEQ ID NO: 3211 - DNA, 2286 bp, Artificial Sequence
  Synthetic Polynucloetide
atggccttaccagtgaccgccttgctcctgccgctggccttgctgctccacgccgccaggccggaagtgcagctggttgaatctggcggaggactggttcagcctggcggatctctgagactgtcttgtgccgccagcggcttcagcttcagcgacttttggatgagctgggtccgacaggcccctggcaaaggacttgaatgggtcgccacaatcagccaggccggcagcgagaaggactacgtggactctgtgaagggcagattcaccatcagccgggacaacgccaagaagtccctgtacctccagatgaacagcctgagagccgaggacaccgccgtgtactattgtgcctctggcgtgtacagcttcgactacagaggccagggcaccctggtcacagtctcttctggtaccggcggaggcggatctggcggcggaggtagcggtggcggaggatctgaattcgacatccagatgacccagagccccagcagcctgtctgccagcgtgggcgacagagtgaccatcacatgcaaggccagccaggacgtgggaatcgccgtggcctggtatcagcagaaacccggcaaggtgcccaagctgctgatctactgggccagcaccagacacaccggcgtgcccgatagattttccggcagcggctccggcaccgacttcaccctgacaatcagctccctccagcccgaggacgtggcaacctactactgccagcagtacagcagctacccctacaccttcggccagggcaccaaggtggaaatcaagagactcgagggacagcctaaggccaatcctaccgtgacactgttccctccaagcagcgaagaactccaggccaacaaggccacacttgtgtgcctgatctccgacttctaccctggggctgtgacagtggcttggaaggccgatggatctcctgtgaaagccggcgtggaaaccaccaagccatccaagcagagcaacaacaaatacgccgccagctcctacctgagcctgacacctgagcagtggaagtcccacagatcctacagctgccaagtgacccacgaaggcagcaccgtggaaaagacagtggcccctacagagtgcagcggcagagccgattgcggctttaccagcgagagctaccagcagggcgtgctgagcgccaccatcctgtacgagatcctgctgggcaaggccaccctgtacgccgtgctggtgtctgccctggtgctgatggctatggtcaagcggaaggacagccggggacgcgccaagagaagcggatctggcgtgaagcagaccctgaatttcgacctgctgaagctggctggcgacgtggaatccaacccaggccctactagtatggactggatttggcgcatccttttccttgtcggcgctgctaccggcgcgcattccttcgaagaagtgcaactggtggaatcaggcggcggactggtgcagcctggcggatctctgagactgagctgtgccgccagcggcttcgacttcagccggtactggatgagctgggtgcgccaggcccctggcaaaggactggaatggatcggcgagatcaaccccgacagcagcaccatcaactacgcccccagcctgaaggacaagttcatcatcagccgggacaacgccaagaacagcctgtacctccagatgaactccctgcgggccgaggacaccgccgtgtactattgcgccagacccgacggcaactactggtacttcgacgtgtggggccagggaaccctcgtgaccgtgtcatctacgcgtgcctctacaaagggaccctccgtgtttcctctggctcccagcagcaagtctacaagcggaggaacagccgctctgggctgcctggtcaaggattactttcccgagcctgtgaccgtgtcctggaatagcggagcactgacaagcggcgtgcacacctttccagccgtgctgcaaagcagcggcctgtactctctgagcagcgtggtcacagtgcctagctctagcctgggcacccagacctacatctgcaatgtgaaccacaagcctagcaacaccaaggtggacaagagagtggaacccaagagctgtatccccgaggacacattcttcccaagccccgagagcagctgcgacgtgaagctggtggaaaagagcttcgagacagacaccaacctgaacttccagaacctgagcgtgatcggcttcagaatcctgctgctgaaagtggccggctttaacctgctgatgaccctgcggctgtggtccagc

SEQ ID NO: 3212 - DNA, 2286 bp, Artificial Sequence
  Synthetic Polynucloetide
atggccttaccagtgaccgccttgctcctgccgctggccttgctgctccacgccgccaggccggaagtgcagctggttgaatctggcggaggactggttcagcctggcggatctctgagactgtcttgtgccgccagcggcttcagcttcagcgacttttggatgagctgggtccgacaggcccctggcaaaggacttgaatgggtcgccacaatcagccaggccggcagcgagaaggactacgtggactctgtgaagggcagattcaccatcagccgggacaacgccaagaagtccctgtacctccagatgaacagcctgagagccgaggacaccgccgtgtactattgtgcctctggcgtgtacagcttcgactacagaggccagggcaccctggtcacagtctcttctggtaccggcggaggcggatctggcggcggaggtagcggtggcggaggatctgaattcgacatcgtgatgacccagagccagaagagcatgagcaccagcgtgggcgacagagtgagcatcacctgcaaggccagccaggacgtgatcaccggcgtggcctggtaccagcagaagcccggccagagccccaagctgctgatctacagcgccagctacagatacaccggcgtgcccgacagattcaccggcagcggcagcggcaccgacttcaccttcaccatcagcaacgtgcaggccgaggacctggccgtgtactactgccagcagcactacagcacccccctgaccttcggcgccggcaccaagctggagctgaagctcgagggacagcctaaggccaatcctaccgtgacactgttccctccaagcagcgaagaactccaggccaacaaggccacacttgtgtgcctgatctccgacttctaccctggggctgtgacagtggcttggaaggccgatggatctcctgtgaaagccggcgtggaaaccaccaagccatccaagcagagcaacaacaaatacgccgccagctcctacctgagcctgacacctgagcagtggaagtcccacagatcctacagctgccaagtgacccacgaaggcagcaccgtggaaaagacagtggcccctacagagtgcagcggcagagccgattgcggctttaccagcgagagctaccagcagggcgtgctgagcgccaccatcctgtacgagatcctgctgggcaaggccaccctgtacgccgtgctggtgtctgccctggtgctgatggctatggtcaagcggaaggacagccggggacgcgccaagagaagcggatctggcgtgaagcagaccctgaatttcgacctgctgaagctggctggcgacgtggaatccaacccaggccctactagtatggactggatttggcgcatccttttccttgtcggcgctgctaccggcgcgcattccttcgaacaggtgcagctgcagcagcccggcgccgagctggtgagacccggcgccagcgtgaagctgagctgcaaggccagcggctacagcttcaccacctactggatgaactgggtgaagcagagacccggccagggcctggagtggatcggcatgatccaccccagcgacagcgagaccagactgaaccagaagttcaaggacaaggccaccctgaccgtggacaagagcagcagcaccgcctacatgcagctgagcagccccaccagcgaggacagcgccgtgtactactgcgccagaagcaccatgatcgccaccagagccatggactactggggccagggcaccagcgtgaccgtgagcagcacgcgtgcctctacaaagggaccctccgtgtttcctctggctcccagcagcaagtctacaagcggaggaacagccgctctgggctgcctggtcaaggattactttcccgagcctgtgaccgtgtcctggaatagcggagcactgacaagcggcgtgcacacctttccagccgtgctgcaaagcagcggcctgtactctctgagcagcgtggtcacagtgcctagctctagcctgggcacccagacctacatctgcaatgtgaaccacaagcctagcaacaccaaggtggacaagagagtggaacccaagagctgtatccccgaggacacattcttcccaagccccgagagcagctgcgacgtgaagctggtggaaaagagcttcgagacagacaccaacctgaacttccagaacctgagcgtgatcggcttcagaatcctgctgctgaaagtggccggctttaacctgctgatgaccctgcggctgtggtccagc

SEQ ID NO: 3213 - DNA, 2304 bp, Artificial Sequence
  Synthetic Polynucloetide
atggccttaccagtgaccgccttgctcctgccgctggccttgctgctccacgccgccaggccggaagtgcagctggttgaatctggcggaggactggttcagcctggcggatctctgagactgtcttgtgccgccagcggcttcagcttcagcgacttttggatgagctgggtccgacaggcccctggcaaaggacttgaatgggtcgccacaatcagccaggccggcagcgagaaggactacgtggactctgtgaagggcagattcaccatcagccgggacaacgccaagaagtccctgtacctccagatgaacagcctgagagccgaggacaccgccgtgtactattgtgcctctggcgtgtacagcttcgactacagaggccagggcaccctggtcacagtctcttctggtaccggcggaggcggatctggcggcggaggtagcggtggcggaggatctgaattccagagcgtgctgacacagcctccatccgtgtctggcgctccaggccagagagtgaccatctcctgtaccggcagcggcagcaacatcggagccccctacgacgtgtcctggtatcagcaactgcctggcaccgcccccaagctgctgatctaccacaacaacaagcggcccagcggcgtgcccgatagattcagcggctctaagagcggcaccagcgccagcctggctatcactggactccaggccgaggacgaggccgactactactgtgccacagtggaagccggcctgagcggctctgtgtttggcggcggaacaaagctgaccgtgctgggagctctcgagggacagcctaaggccaatcctaccgtgacactgttccctccaagcagcgaagaactccaggccaacaaggccacacttgtgtgcctgatctccgacttctaccctggggctgtgacagtggcttggaaggccgatggatctcctgtgaaagccggcgtggaaaccaccaagccatccaagcagagcaacaacaaatacgccgccagctcctacctgagcctgacacctgagcagtggaagtcccacagatcctacagctgccaagtgacccacgaaggcagcaccgtggaaaagacagtggcccctacagagtgcagcggcagagccgattgcggctttaccagcgagagctaccagcagggcgtgctgagcgccaccatcctgtacgagatcctgctgggcaaggccaccctgtacgccgtgctggtgtctgccctggtgctgatggctatggtcaagcggaaggacagccggggacgcgccaagagaagcggatctggcgtgaagcagaccctgaatttcgacctgctgaagctggctggcgacgtggaatccaacccaggccctactagtatggactggatttggcgcatccttttccttgtcggcgctgctaccggcgcgcattccttcgaacaggtgcaactggtgcagagcggagccgaagtgaagaaacctggggccagcgtgaaggtgtcctgcaaggtgtccggctacaccctgaccgagctgagcattcactgggtgcgccaggcccctggcaagggactggaatggatgggcggcttcgaccccgaagagaacgagatcgtgtacgcccagcggttccagggcagagtgacaatgaccgaggacaccagcaccgacaccgcctacatggaactgagcagcctgcggagcgaggataccgccgtgtactactgcgccatcgtgggcagcttcagccctctgacactgggcctgtggggccagggaactatggtcaccgtgtccagcacgcgtgcctctacaaagggaccctccgtgtttcctctggctcccagcagcaagtctacaagcggaggaacagccgctctgggctgcctggtcaaggattactttcccgagcctgtgaccgtgtcctggaatagcggagcactgacaagcggcgtgcacacctttccagccgtgctgcaaagcagcggcctgtactctctgagcagcgtggtcacagtgcctagctctagcctgggcacccagacctacatctgcaatgtgaaccacaagcctagcaacaccaaggtggacaagagagtggaacccaagagctgtatccccgaggacacattcttcccaagccccgagagcagctgcgacgtgaagctggtggaaaagagcttcgagacagacaccaacctgaacttccagaacctgagcgtgatcggcttcagaatcctgctgctgaaagtggccggctttaacctgctgatgaccctgcggctgtggtccagc

SEQ ID NO: 3214 - DNA, 2304 bp, Artificial Sequence
  Synthetic Polynucloetide
atggccttaccagtgaccgccttgctcctgccgctggccttgctgctccacgccgccaggccggaagtgcagctggttgaatctggcggaggactggttcagcctggcggatctctgagactgtcttgtgccgccagcggcttcagcttcagcgacttttggatgagctgggtccgacaggcccctggcaaaggacttgaatgggtcgccacaatcagccaggccggcagcgagaaggactacgtggactctgtgaagggcagattcaccatcagccgggacaacgccaagaagtccctgtacctccagatgaacagcctgagagccgaggacaccgccgtgtactattgtgcctctggcgtgtacagcttcgactacagaggccagggcaccctggtcacagtctcttctggtaccggcggaggcggatctggcggcggaggtagcggtggcggaggatctgaattccagagcgtgctgacacagcctccatccgtgtctggcgctccaggccagagagtgaccatctcctgtaccggcagcggcagcaacatcggagccccctacgacgtgtcctggtatcagcaactgcctggcaccgcccccaagctgctgatctaccacaacaacaagcggcccagcggcgtgcccgatagattcagcggctctaagagcggcaccagcgccagcctggctatcactggactccaggccgaggacgaggccgactactactgccagagctacgacagcagcagcatcagcaccatcttcggcggaggcaccaagctgacagtgctgggagctctcgagggacagcctaaggccaatcctaccgtgacactgttccctccaagcagcgaagaactccaggccaacaaggccacacttgtgtgcctgatctccgacttctaccctggggctgtgacagtggcttggaaggccgatggatctcctgtgaaagccggcgtggaaaccaccaagccatccaagcagagcaacaacaaatacgccgccagctcctacctgagcctgacacctgagcagtggaagtcccacagatcctacagctgccaagtgacccacgaaggcagcaccgtggaaaagacagtggcccctacagagtgcagcggcagagccgattgcggctttaccagcgagagctaccagcagggcgtgctgagcgccaccatcctgtacgagatcctgctgggcaaggccaccctgtacgccgtgctggtgtctgccctggtgctgatggctatggtcaagcggaaggacagccggggacgcgccaagagaagcggatctggcgtgaagcagaccctgaatttcgacctgctgaagctggctggcgacgtggaatccaacccaggccctactagtatggactggatttggcgcatccttttccttgtcggcgctgctaccggcgcgcattccttcgaacaggtgcaactggtgcagagcggagccgaagtgaagaaacctggggccagcgtgaaggtgtcctgcaaggtgtccggctacaccctgaccgagctgagcattcactgggtgcgccaggcccctggcaagggactggaatggatgggcggcttcgaccccgaagagaacgagatcgtgtacgcccagcggttccagggcagagtgacaatgaccgaggacaccagcaccgacaccgcctacatggaactgagcagcctgcggagcgaggataccgccgtgtactactgtgccatcgtgggcagcttcagcggaatcgcctacagaccttggggccagggcacaatggtcaccgtgtctagcacgcgtgcctctacaaagggaccctccgtgtttcctctggctcccagcagcaagtctacaagcggaggaacagccgctctgggctgcctggtcaaggattactttcccgagcctgtgaccgtgtcctggaatagcggagcactgacaagcggcgtgcacacctttccagccgtgctgcaaagcagcggcctgtactctctgagcagcgtggtcacagtgcctagctctagcctgggcacccagacctacatctgcaatgtgaaccacaagcctagcaacaccaaggtggacaagagagtggaacccaagagctgtatccccgaggacacattcttcccaagccccgagagcagctgcgacgtgaagctggtggaaaagagcttcgagacagacaccaacctgaacttccagaacctgagcgtgatcggcttcagaatcctgctgctgaaagtggccggctttaacctgctgatgaccctgcggctgtggtccagc

SEQ ID NO: 3215 - DNA, 2268 bp, Artificial Sequence
  Synthetic Polynucloetide
atggccttaccagtgaccgccttgctcctgccgctggccttgctgctccacgccgccaggccggaagtgcagctggttgaatctggcggaggactggttcagcctggcggatctctgagactgtcttgtgccgccagcggcttcagcttcagcgacttttggatgagctgggtccgacaggcccctggcaaaggacttgaatgggtcgccacaatcagccaggccggcagcgagaaggactacgtggactctgtgaagggcagattcaccatcagccgggacaacgccaagaagtccctgtacctccagatgaacagcctgagagccgaggacaccgccgtgtactattgtgcctctggcgtgtacagcttcgactacagaggccagggcaccctggtcacagtctcttctggtaccggcggaggcggatctggcggcggaggtagcggtggcggaggatctgaattcgacatccagatgacccagagccccagcagcctgtctgccagcgtgggcgacagagtgaccatcacctgtagagccagccagggcatcagaaacaacctggcctggtatcagcagaagcccggcaaggcccccaagcggctgatctacgccgccagcaatctccagagcggcgtgcccagcagattcacaggctctggcagcggcaccgagttcaccctgatcgtgtctagcctccagcccgaggacttcgccacctactactgcctccagcaccacagctaccccctgacatctggcggaggcaccaaggtggaactcgagggacagcctaaggccaatcctaccgtgacactgttccctccaagcagcgaagaactccaggccaacaaggccacacttgtgtgcctgatctccgacttctaccctggggctgtgacagtggcttggaaggccgatggatctcctgtgaaagccggcgtggaaaccaccaagccatccaagcagagcaacaacaaatacgccgccagctcctacctgagcctgacacctgagcagtggaagtcccacagatcctacagctgccaagtgacccacgaaggcagcaccgtggaaaagacagtggcccctacagagtgcagcggcagagccgattgcggctttaccagcgagagctaccagcagggcgtgctgagcgccaccatcctgtacgagatcctgctgggcaaggccaccctgtacgccgtgctggtgtctgccctggtgctgatggctatggtcaagcggaaggacagccggggacgcgccaagagaagcggatctggcgtgaagcagaccctgaatttcgacctgctgaagctggctggcgacgtggaatccaacccaggccctactagtatggactggatttggcgcatccttttccttgtcggcgctgctaccggcgcgcattccttcgaagaggtgcaggtgctggaaagtggcggaggactggtgcagcctggcggctctctgagactgtcttgtgccgccagcggcttcaccttcagcagctacgccatgagctgggtgcgccaggcccctggaaaaggactggaatgggtgtccgccatcagcggctctggcgggtctaccaactacgccgatagcgtgaagggccggttcaccatcagccgggacaacagcaagaacaccctgtacctccagatgaacagcctgcgggccgaggacaccgccgtgtattattgtgccggcagcagcgggtggagcgagtattggggacagggcaccctcgtgaccgtgtcctctacgcgtgcctctacaaagggaccctccgtgtttcctctggctcccagcagcaagtctacaagcggaggaacagccgctctgggctgcctggtcaaggattactttcccgagcctgtgaccgtgtcctggaatagcggagcactgacaagcggcgtgcacacctttccagccgtgctgcaaagcagcggcctgtactctctgagcagcgtggtcacagtgcctagctctagcctgggcacccagacctacatctgcaatgtgaaccacaagcctagcaacaccaaggtggacaagagagtggaacccaagagctgtatccccgaggacacattcttcccaagccccgagagcagctgcgacgtgaagctggtggaaaagagcttcgagacagacaccaacctgaacttccagaacctgagcgtgatcggcttcagaatcctgctgctgaaagtggccggctttaacctgctgatgaccctgcggctgtggtccagc

SEQ ID NO: 3216 - DNA, 2286 bp, Artificial Sequence
  Synthetic Polynucloetide
atggccttaccagtgaccgccttgctcctgccgctggccttgctgctccacgccgccaggccggaagtgcagctggttgaatctggcggaggactggttcagcctggcggatctctgagactgtcttgtgccgccagcggcttcagcttcagcgacttttggatgagctgggtccgacaggcccctggcaaaggacttgaatgggtcgccacaatcagccaggccggcagcgagaaggactacgtggactctgtgaagggcagattcaccatcagccgggacaacgccaagaagtccctgtacctccagatgaacagcctgagagccgaggacaccgccgtgtactattgtgcctctggcgtgtacagcttcgactacagaggccagggcaccctggtcacagtctcttctggtaccggcggaggcggatctggcggcggaggtagcggtggcggaggatctgaattcgacgagatccagctggtgcagagcggagccgaagtgaagaagcctggcgagagcctgcggatcagctgcaagggcagcggcttcaacatcgaggactactacatccactgggtgcgccagatgcccggcaagggcctggaatggatgggcagaatcgaccccgagaacgacgagactaagtacggccccatcttccagggccacgtgaccatcagcgccgacaccagcatcaacaccgtgtacctccagtggtccagcctgaaggccagcgacaccgccatgtactactgcgcctttagaggcggcgtgtactggggccagggcaccacagtgacagtgtctagcctcgagggacagcctaaggccaatcctaccgtgacactgttccctccaagcagcgaagaactccaggccaacaaggccacacttgtgtgcctgatctccgacttctaccctggggctgtgacagtggcttggaaggccgatggatctcctgtgaaagccggcgtggaaaccaccaagccatccaagcagagcaacaacaaatacgccgccagctcctacctgagcctgacacctgagcagtggaagtcccacagatcctacagctgccaagtgacccacgaaggcagcaccgtggaaaagacagtggcccctacagagtgcagcggcagagccgattgcggctttaccagcgagagctaccagcagggcgtgctgagcgccaccatcctgtacgagatcctgctgggcaaggccaccctgtacgccgtgctggtgtctgccctggtgctgatggctatggtcaagcggaaggacagccggggacgcgccaagagaagcggatctggcgtgaagcagaccctgaatttcgacctgctgaagctggctggcgacgtggaatccaacccaggccctactagtatggactggatttggcgcatccttttccttgtcggcgctgctaccggcgcgcattccttcgaagatgtcgtgatgacccagagccccgacagcctggctgtgtctctgggagagagagccaccatcaactgcaagtccagccagtccctgctggacagcgacggcaagacctacctgaactggctccagcagaagcccggccagccccccaagagactgatctccctggtgtccaagctggactccggcgtgcccgatagattttccggctctggcagcggcaccgacttcaccctgacaatcagctcccttcaggccgaggacgtggccgtgtactattgctggcagggcacacacttccccggcacctttggcggaggcaccaaggtggaaatcaagacgcgtgcctctacaaagggaccctccgtgtttcctctggctcccagcagcaagtctacaagcggaggaacagccgctctgggctgcctggtcaaggattactttcccgagcctgtgaccgtgtcctggaatagcggagcactgacaagcggcgtgcacacctttccagccgtgctgcaaagcagcggcctgtactctctgagcagcgtggtcacagtgcctagctctagcctgggcacccagacctacatctgcaatgtgaaccacaagcctagcaacaccaaggtggacaagagagtggaacccaagagctgtatccccgaggacacattcttcccaagccccgagagcagctgcgacgtgaagctggtggaaaagagcttcgagacagacaccaacctgaacttccagaacctgagcgtgatcggcttcagaatcctgctgctgaaagtggccggctttaacctgctgatgaccctgcggctgtggtccagc

SEQ ID NO: 3217 - DNA, 2307 bp, Artificial Sequence
  Synthetic Polynucloetide
atggccttaccagtgaccgccttgctcctgccgctggccttgctgctccacgccgccaggccggaagtgcagctggttgaatctggcggaggactggttcagcctggcggatctctgagactgtcttgtgccgccagcggcttcagcttcagcgacttttggatgagctgggtccgacaggcccctggcaaaggacttgaatgggtcgccacaatcagccaggccggcagcgagaaggactacgtggactctgtgaagggcagattcaccatcagccgggacaacgccaagaagtccctgtacctccagatgaacagcctgagagccgaggacaccgccgtgtactattgtgcctctggcgtgtacagcttcgactacagaggccagggcaccctggtcacagtctcttctggtaccggcggaggcggatctggcggcggaggtagcggtggcggaggatctgaattcgacgagcttgtgatgacccagagccccagcagcctgacagtgacagccggcgagaaagtgaccatgagctgcaagagcagccagagcctgctgaacagcggcaaccagaagaactacctgacctggtatcagcagaagcccggccagccccccaagctgctgatctactgggccagcaccagagaaagcggcgtgcccgatagattcaccggctctggcagcggcaccgacttcaccctgacaatcagcagcgtgcaggccgaggacctggccgtgtactactgccagaacgactacagctaccccctgaccttcggagccggcaccaagctggaaatcaagctcgagggacagcctaaggccaatcctaccgtgacactgttccctccaagcagcgaagaactccaggccaacaaggccacacttgtgtgcctgatctccgacttctaccctggggctgtgacagtggcttggaaggccgatggatctcctgtgaaagccggcgtggaaaccaccaagccatccaagcagagcaacaacaaatacgccgccagctcctacctgagcctgacacctgagcagtggaagtcccacagatcctacagctgccaagtgacccacgaaggcagcaccgtggaaaagacagtggcccctacagagtgcagcggcagagccgattgcggctttaccagcgagagctaccagcagggcgtgctgagcgccaccatcctgtacgagatcctgctgggcaaggccaccctgtacgccgtgctggtgtctgccctggtgctgatggctatggtcaagcggaaggacagccggggacgcgccaagagaagcggatctggcgtgaagcagaccctgaatttcgacctgctgaagctggctggcgacgtggaatccaacccaggccctactagtatggactggatttggcgcatccttttccttgtcggcgctgctaccggcgcgcattccttcgaagaagtgcagctgctggaacagtctggcgccgaacttgtgcggcctggcaccagcgtgaagatcagctgtaaagccagcggctacgccttcaccaactactggctgggctgggtcaagcagaggcctggacacggcctggaatggatcggcgacatctttcccggctccggcaacatccactacaacgagaagttcaagggcaaggccaccctgaccgccgacaagtctagcagcaccgcctacatgcagctgtccagcctgacctttgaggacagcgccgtgtatttctgtgcccggctgcggaactgggacgagcccatggattattggggccagggcaccaccgtgaccgtgtctagtacgcgtgcctctacaaagggaccctccgtgtttcctctggctcccagcagcaagtctacaagcggaggaacagccgctctgggctgcctggtcaaggattactttcccgagcctgtgaccgtgtcctggaatagcggagcactgacaagcggcgtgcacacctttccagccgtgctgcaaagcagcggcctgtactctctgagcagcgtggtcacagtgcctagctctagcctgggcacccagacctacatctgcaatgtgaaccacaagcctagcaacaccaaggtggacaagagagtggaacccaagagctgtatccccgaggacacattcttcccaagccccgagagcagctgcgacgtgaagctggtggaaaagagcttcgagacagacaccaacctgaacttccagaacctgagcgtgatcggcttcagaatcctgctgctgaaagtggccggctttaacctgctgatgaccctgcggctgtggtccagc

SEQ ID NO: 3218 - DNA, 2310 bp, Artificial Sequence
  Synthetic Polynucloetide
atggccttaccagtgaccgccttgctcctgccgctggccttgctgctccacgccgccaggccggaagtgcagctggttgaatctggcggaggactggttcagcctggcggatctctgagactgtcttgtgccgccagcggcttcagcttcagcgacttttggatgagctgggtccgacaggcccctggcaaaggacttgaatgggtcgccacaatcagccaggccggcagcgagaaggactacgtggactctgtgaagggcagattcaccatcagccgggacaacgccaagaagtccctgtacctccagatgaacagcctgagagccgaggacaccgccgtgtactattgtgcctctggcgtgtacagcttcgactacagaggccagggcaccctggtcacagtctcttctggtaccggcggaggcggatctggcggcggaggtagcggtggcggaggatctgaattcgacgagctgcagatgacccagagccctagcagcctgtctgccagcgtgggcgacagagtgaccatcacctgtagagccagccagagcatcagcagctacctgaactggtatcagcagaagcccggccagccccccaaactgctgatctactgggccagcaccagagaaagcggcgtgcccgatagattcagcggcagcgagagcggcaccaactacaccctgaccatcagctccctgcagcccgaggacttcgccacctacttttgccagcagagcgacagcctgcccatcacctttggacagggcacccggctggacattcagctcgagggacagcctaaggccaatcctaccgtgacactgttccctccaagcagcgaagaactccaggccaacaaggccacacttgtgtgcctgatctccgacttctaccctggggctgtgacagtggcttggaaggccgatggatctcctgtgaaagccggcgtggaaaccaccaagccatccaagcagagcaacaacaaatacgccgccagctcctacctgagcctgacacctgagcagtggaagtcccacagatcctacagctgccaagtgacccacgaaggcagcaccgtggaaaagacagtggcccctacagagtgcagcggcagagccgattgcggctttaccagcgagagctaccagcagggcgtgctgagcgccaccatcctgtacgagatcctgctgggcaaggccaccctgtacgccgtgctggtgtctgccctggtgctgatggctatggtcaagcggaaggacagccggggacgcgccaagagaagcggatctggcgtgaagcagaccctgaatttcgacctgctgaagctggctggcgacgtggaatccaacccaggccctactagtatggactggatttggcgcatccttttccttgtcggcgctgctaccggcgcgcattccttcgaagaggtgcaactgctggaatctgggggcggagtggtgcagcctggcagaagcctgagactgagctgtgccgccagcggcttcaccttcagctcctacggaatgcactgggtgcgccaggcccctggcaaaggactggaatgggtggccgtgatctcctacgacggcagcaacaagtactacgccgacagcgtgaagggccggttcaccatcagccgggacaacagcaagaacaccctgtacctgcagatgaacagcctgcgggccgaggacaccgccgtgtactactgcgccaaggatatgggctggggcagcggctggcggccttactactactacggcatggacgtgtggggccagggcaccaccgtgacagtgtcatctacgcgtgcctctacaaagggaccctccgtgtttcctctggctcccagcagcaagtctacaagcggaggaacagccgctctgggctgcctggtcaaggattactttcccgagcctgtgaccgtgtcctggaatagcggagcactgacaagcggcgtgcacacctttccagccgtgctgcaaagcagcggcctgtactctctgagcagcgtggtcacagtgcctagctctagcctgggcacccagacctacatctgcaatgtgaaccacaagcctagcaacaccaaggtggacaagagagtggaacccaagagctgtatccccgaggacacattcttcccaagccccgagagcagctgcgacgtgaagctggtggaaaagagcttcgagacagacaccaacctgaacttccagaacctgagcgtgatcggcttcagaatcctgctgctgaaagtggccggctttaacctgctgatgaccctgcggctgtggtccagc

SEQ ID NO: 3219 - DNA, 2301 bp, Artificial Sequence
  Synthetic Polynucloetide
atggccttaccagtgaccgccttgctcctgccgctggccttgctgctccacgccgccaggccggaagtgcagctggttgaatctggcggaggactggttcagcctggcggatctctgagactgtcttgtgccgccagcggcttcagcttcagcgacttttggatgagctgggtccgacaggcccctggcaaaggacttgaatgggtcgccacaatcagccaggccggcagcgagaaggactacgtggactctgtgaagggcagattcaccatcagccgggacaacgccaagaagtccctgtacctccagatgaacagcctgagagccgaggacaccgccgtgtactattgtgcctctggcgtgtacagcttcgactacagaggccagggcaccctggtcacagtctcttctggtaccggcggaggcggatctggcggcggaggtagcggtggcggaggatctgaattcgacgacatccaaatgacacagagtccttctagtttgagtgcgagcgtgggggacagggtgaccattacctgcagggccagccagagcataagctcataccttaattggtaccagcaaaaaccaggtaaggcccctaagctcctgatctacgcggcctcttcacttcaatctggggtcccttcccgcttcagtggctccggcagcggcaccgacttcacgctcactatatcaagtctgcagcctgaggatctcgccacctattactgtcaacaaagttattccacccctttcacctttggaccgggcacgaaagtggatattaagctcgagggacagcctaaggccaatcctaccgtgacactgttccctccaagcagcgaagaactccaggccaacaaggccacacttgtgtgcctgatctccgacttctaccctggggctgtgacagtggcttggaaggccgatggatctcctgtgaaagccggcgtggaaaccaccaagccatccaagcagagcaacaacaaatacgccgccagctcctacctgagcctgacacctgagcagtggaagtcccacagatcctacagctgccaagtgacccacgaaggcagcaccgtggaaaagacagtggcccctacagagtgcagcggcagagccgattgcggctttaccagcgagagctaccagcagggcgtgctgagcgccaccatcctgtacgagatcctgctgggcaaggccaccctgtacgccgtgctggtgtctgccctggtgctgatggctatggtcaagcggaaggacagccggggacgcgccaagagaagcggatctggcgtgaagcagaccctgaatttcgacctgctgaagctggctggcgacgtggaatccaacccaggccctactagtatggactggatttggcgcatccttttccttgtcggcgctgctaccggcgcgcattccttcgaagtgcacgaggtccagcttgtgcagtccggggcagaggtcaagaagcctggttctagcgtaaaagtgagttgcaaagcctcaggtgggacattttcatcctacgcgatcagttgggttagacaggctcctggtcaagggctggaatggatgggcggaattattccaatcttcggaacagcgaattacgcgcagaagttccagggtagagtaaccatcactgctgacaagtccacctccaccgcatacatggaattgtctagtctccggagcgaggatacggcggtgtattattgtgctacgttcgccctgtttggcttccgcgaacaggctttcgacatctgggggcagggcacgacagtcacggttagtagtacgcgtgcctctacaaagggaccctccgtgtttcctctggctcccagcagcaagtctacaagcggaggaacagccgctctgggctgcctggtcaaggattactttcccgagcctgtgaccgtgtcctggaatagcggagcactgacaagcggcgtgcacacctttccagccgtgctgcaaagcagcggcctgtactctctgagcagcgtggtcacagtgcctagctctagcctgggcacccagacctacatctgcaatgtgaaccacaagcctagcaacaccaaggtggacaagagagtggaacccaagagctgtatccccgaggacacattcttcccaagccccgagagcagctgcgacgtgaagctggtggaaaagagcttcgagacagacaccaacctgaacttccagaacctgagcgtgatcggcttcagaatcctgctgctgaaagtggccggctttaacctgctgatgaccctgcggctgtggtccagc

SEQ ID NO: 3220 - DNA, 2295 bp, Artificial Sequence
  Synthetic Polynucloetide
atggccttaccagtgaccgccttgctcctgccgctggccttgctgctccacgccgccaggccggaagtgcagctggttgaatctggcggaggactggttcagcctggcggatctctgagactgtcttgtgccgccagcggcttcagcttcagcgacttttggatgagctgggtccgacaggcccctggcaaaggacttgaatgggtcgccacaatcagccaggccggcagcgagaaggactacgtggactctgtgaagggcagattcaccatcagccgggacaacgccaagaagtccctgtacctccagatgaacagcctgagagccgaggacaccgccgtgtactattgtgcctctggcgtgtacagcttcgactacagaggccagggcaccctggtcacagtctcttctggtaccggcggaggcggatctggcggcggaggtagcggtggcggaggatctgaattcgacatcgtgctgacccagagccctctgagcctggccgtgtctctgggacagcctgccatcatcagctgcaaggccagccagagcgtgtcctttgccggcacctctctgatgcactggtatcaccagaagcccggccagcagcccagactgctgatctacagagccagcaacctggaagccggcgtgcccgatagattttccggcagcggcagcaagaccgacttcaccctgaccatcagccccgtggaagccgaagatgccgccacctactactgccagcagagcagagagtacccctacaccttcggcggaggcaccaagctggaaatcaagaggctcgagggacagcctaaggccaatcctaccgtgacactgttccctccaagcagcgaagaactccaggccaacaaggccacacttgtgtgcctgatctccgacttctaccctggggctgtgacagtggcttggaaggccgatggatctcctgtgaaagccggcgtggaaaccaccaagccatccaagcagagcaacaacaaatacgccgccagctcctacctgagcctgacacctgagcagtggaagtcccacagatcctacagctgccaagtgacccacgaaggcagcaccgtggaaaagacagtggcccctacagagtgcagcggcagagccgattgcggctttaccagcgagagctaccagcagggcgtgctgagcgccaccatcctgtacgagatcctgctgggcaaggccaccctgtacgccgtgctggtgtctgccctggtgctgatggctatggtcaagcggaaggacagccggggacgcgccaagagaagcggatctggcgtgaagcagaccctgaatttcgacctgctgaagctggctggcgacgtggaatccaacccaggccctactagtatggactggatttggcgcatccttttccttgtcggcgctgctaccggcgcgcattccttcgaacaggtccaactggtgcagagcggagccgaggtcgtgaagcctggcgcttccgtgaagattagctgcaaagccagcggctacacctttaccggctactttatgaactgggtcaagcagagccctggccagagcctggaatggatcggcagaatccacccctacgacggcgacaccttctacaaccagaagttccagggcaaggccaccctgacagtggacaagagcagcaacaccgcccacatggaactgctgagcctgaccagcgaggacttcgccgtgtactactgcaccagatacgacggcagccgggctatggactattggggccagggcaccaccgtgaccgtgtctagtacgcgtgcctctacaaagggaccctccgtgtttcctctggctcccagcagcaagtctacaagcggaggaacagccgctctgggctgcctggtcaaggattactttcccgagcctgtgaccgtgtcctggaatagcggagcactgacaagcggcgtgcacacctttccagccgtgctgcaaagcagcggcctgtactctctgagcagcgtggtcacagtgcctagctctagcctgggcacccagacctacatctgcaatgtgaaccacaagcctagcaacaccaaggtggacaagagagtggaacccaagagctgtatccccgaggacacattcttcccaagccccgagagcagctgcgacgtgaagctggtggaaaagagcttcgagacagacaccaacctgaacttccagaacctgagcgtgatcggcttcagaatcctgctgctgaaagtggccggctttaacctgctgatgaccctgcggctgtggtccagc

SEQ ID NO: 3221 - DNA, 2286 bp, Artificial Sequence
  Synthetic Polynucloetide
atggccttaccagtgaccgccttgctcctgccgctggccttgctgctccacgccgccaggccggaagtgcagctggttgaatctggcggaggactggttcagcctggcggatctctgagactgtcttgtgccgccagcggcttcagcttcagcgacttttggatgagctgggtccgacaggcccctggcaaaggacttgaatgggtcgccacaatcagccaggccggcagcgagaaggactacgtggactctgtgaagggcagattcaccatcagccgggacaacgccaagaagtccctgtacctccagatgaacagcctgagagccgaggacaccgccgtgtactattgtgcctctggcgtgtacagcttcgactacagaggccagggcaccctggtcacagtctcttctggtaccggcggaggcggatctggcggcggaggtagcggtggcggaggatctgaattcgacgacgttgtgatgacccagacccccctgagcctgcctgtgacacctggcgaacctgccagcatcagctgtcggagcagccagagcctggtgcacagaaacggcaacacctacctgcactggtatctccagaagcccggccagagccccaagctgctgatccacaaggtgtccaacagattcagcggcgtgcccgacagattctccggcagcggctctggcaccgacttcaccctgaagatcagccgggtggaagccgaggacctgggcgtgtacttctgtagccagagcacccatgtgccccccctgacatttggagccggcaccaagctggaactgaagctcgagggacagcctaaggccaatcctaccgtgacactgttccctccaagcagcgaagaactccaggccaacaaggccacacttgtgtgcctgatctccgacttctaccctggggctgtgacagtggcttggaaggccgatggatctcctgtgaaagccggcgtggaaaccaccaagccatccaagcagagcaacaacaaatacgccgccagctcctacctgagcctgacacctgagcagtggaagtcccacagatcctacagctgccaagtgacccacgaaggcagcaccgtggaaaagacagtggcccctacagagtgcagcggcagagccgattgcggctttaccagcgagagctaccagcagggcgtgctgagcgccaccatcctgtacgagatcctgctgggcaaggccaccctgtacgccgtgctggtgtctgccctggtgctgatggctatggtcaagcggaaggacagccggggacgcgccaagagaagcggatctggcgtgaagcagaccctgaatttcgacctgctgaagctggctggcgacgtggaatccaacccaggccctactagtatggactggatttggcgcatccttttccttgtcggcgctgctaccggcgcgcattccttcgaagaagtgcagctggtgcagtctggcgctgaggtggaaaagcctggggccagcgtgaagattagctgcaaggccagcggcagcagcttcaccggctacaacatgaactgggtgcgccagaacatcggcaagagcctggaatggatcggagccatcgacccctactacggcggcaccagctacaaccagaagttcaagggcagagccaccctgaccgtggacaagagcaccagcaccgcctacatgcacctgaagtccctgcggagcgaggacaccgccgtgtactactgtgtgtccggcatggaatattggggccagggcaccagcgtgaccgtgtctagtacgcgtgcctctacaaagggaccctccgtgtttcctctggctcccagcagcaagtctacaagcggaggaacagccgctctgggctgcctggtcaaggattactttcccgagcctgtgaccgtgtcctggaatagcggagcactgacaagcggcgtgcacacctttccagccgtgctgcaaagcagcggcctgtactctctgagcagcgtggtcacagtgcctagctctagcctgggcacccagacctacatctgcaatgtgaaccacaagcctagcaacaccaaggtggacaagagagtggaacccaagagctgtatccccgaggacacattcttcccaagccccgagagcagctgcgacgtgaagctggtggaaaagagcttcgagacagacaccaacctgaacttccagaacctgagcgtgatcggcttcagaatcctgctgctgaaagtggccggctttaacctgctgatgaccctgcggctgtggtccagc

SEQ ID NO: 3222 - DNA, 2280 bp, Artificial Sequence
  Synthetic Polynucloetide
atggccttaccagtgaccgccttgctcctgccgctggccttgctgctccacgccgccaggccggaagtgcagctggttgaatctggcggaggactggttcagcctggcggatctctgagactgtcttgtgccgccagcggcttcagcttcagcgacttttggatgagctgggtccgacaggcccctggcaaaggacttgaatgggtcgccacaatcagccaggccggcagcgagaaggactacgtggactctgtgaagggcagattcaccatcagccgggacaacgccaagaagtccctgtacctccagatgaacagcctgagagccgaggacaccgccgtgtactattgtgcctctggcgtgtacagcttcgactacagaggccagggcaccctggtcacagtctcttctggtaccggcggaggcggatctggcggcggaggtagcggtggcggaggatctgaattcgacgagatcgtgatgacccagacccctgccaccctgtctgtgtctgccggcgagagagtgaccattacctgcaaggccagccagagcgtgtccaacgacgtgacctggtatcagcagaagcccggccaggcccccagactgctgatctacagcgccagcaacagatacagcggcgtgcccgccagattttccggcagcggctacggcaccgagttcaccttcaccatcagcagcgtgcagagcgaggacttcgccgtgtacttctgtcagcaagactacagcagcttcggccagggcaccaagctggaaatcaagaggctcgagggacagcctaaggccaatcctaccgtgacactgttccctccaagcagcgaagaactccaggccaacaaggccacacttgtgtgcctgatctccgacttctaccctggggctgtgacagtggcttggaaggccgatggatctcctgtgaaagccggcgtggaaaccaccaagccatccaagcagagcaacaacaaatacgccgccagctcctacctgagcctgacacctgagcagtggaagtcccacagatcctacagctgccaagtgacccacgaaggcagcaccgtggaaaagacagtggcccctacagagtgcagcggcagagccgattgcggctttaccagcgagagctaccagcagggcgtgctgagcgccaccatcctgtacgagatcctgctgggcaaggccaccctgtacgccgtgctggtgtctgccctggtgctgatggctatggtcaagcggaaggacagccggggacgcgccaagagaagcggatctggcgtgaagcagaccctgaatttcgacctgctgaagctggctggcgacgtggaatccaacccaggccctactagtatggactggatttggcgcatccttttccttgtcggcgctgctaccggcgcgcattccttcgaacaggtgcagctggtggaatctggacctggcgtggtgcagcctggcagaagcctgagaatcagctgtgccgtgtccggcttcagcgtgaccaactacggcgtgcactgggtgcgccagccacctggaaaaggactggaatggctgggcgtgatctgggctggcggcatcaccaactacaacagcgccttcatgtcccggctgaccatctccaaggacaacagcaagaacaccgtgtacctccagatgaacagcctgcgggccgaggacaccgccatgtactactgtgcttccagaggcggccactacggctacgccctggattattggggccagggaaccctcgtgaccgtgtcctctacgcgtgcctctacaaagggaccctccgtgtttcctctggctcccagcagcaagtctacaagcggaggaacagccgctctgggctgcctggtcaaggattactttcccgagcctgtgaccgtgtcctggaatagcggagcactgacaagcggcgtgcacacctttccagccgtgctgcaaagcagcggcctgtactctctgagcagcgtggtcacagtgcctagctctagcctgggcacccagacctacatctgcaatgtgaaccacaagcctagcaacaccaaggtggacaagagagtggaacccaagagctgtatccccgaggacacattcttcccaagccccgagagcagctgcgacgtgaagctggtggaaaagagcttcgagacagacaccaacctgaacttccagaacctgagcgtgatcggcttcagaatcctgctgctgaaagtggccggctttaacctgctgatgaccctgcggctgtggtccagc

SEQ ID NO: 3223 - DNA, 2286 bp, Artificial Sequence
  Synthetic Polynucloetide
atggccttaccagtgaccgccttgctcctgccgctggccttgctgctccacgccgccaggccggaagtgcagctggttgaatctggcggaggactggttcagcctggcggatctctgagactgtcttgtgccgccagcggcttcagcttcagcgacttttggatgagctgggtccgacaggcccctggcaaaggacttgaatgggtcgccacaatcagccaggccggcagcgagaaggactacgtggactctgtgaagggcagattcaccatcagccgggacaacgccaagaagtccctgtacctccagatgaacagcctgagagccgaggacaccgccgtgtactattgtgcctctggcgtgtacagcttcgactacagaggccagggcaccctggtcacagtctcttctggtaccggcggaggcggatctggcggcggaggtagcggtggcggaggatctgaattcgacatccagatgacccagaccgccagcagcctgcctgcctctctgggcgacagagtgaccatctcctgtagcgccagccaggacatcagcaactacctgaactggtatcagcagaaacccgacggcaccgtgaagctgctgatcttctacagcagcaacctgcacagcggcgtgcccagcagattttctggcggcggaagcggcaccgactacagcctgaccatcagcaatctggaacccgaggacattgccacctacttttgccaccagtacagcaagctgccctggacctttggcggaggcaccaagctggaaatcaagagactcgagggacagcctaaggccaatcctaccgtgacactgttccctccaagcagcgaagaactccaggccaacaaggccacacttgtgtgcctgatctccgacttctaccctggggctgtgacagtggcttggaaggccgatggatctcctgtgaaagccggcgtggaaaccaccaagccatccaagcagagcaacaacaaatacgccgccagctcctacctgagcctgacacctgagcagtggaagtcccacagatcctacagctgccaagtgacccacgaaggcagcaccgtggaaaagacagtggcccctacagagtgcagcggcagagccgattgcggctttaccagcgagagctaccagcagggcgtgctgagcgccaccatcctgtacgagatcctgctgggcaaggccaccctgtacgccgtgctggtgtctgccctggtgctgatggctatggtcaagcggaaggacagccggggacgcgccaagagaagcggatctggcgtgaagcagaccctgaatttcgacctgctgaagctggctggcgacgtggaatccaacccaggccctactagtatggactggatttggcgcatccttttccttgtcggcgctgctaccggcgcgcattccttcgaagaagtgaccctggtggaaagcggcggagacttcgtgaagcctggcggctctctgaaggtgtcctgtgccgccagcggcttcgcctttagccactacgccatgagctgggtgcgccagacccctgccaagagactggaatgggtggcctacatcagcagcggcggctccggcacctactactccgatagcgtgaagggccggttcaccatcagccgggacaacgccaagaacaccctgtacctccagatgcggagcctgcggagcgaggacagcgccatgtatttctgcaccagagtgaagctgggcacctattacttcgactcttggggccagggcaccaccctgaccgtgtcatctacgcgtgcctctacaaagggaccctccgtgtttcctctggctcccagcagcaagtctacaagcggaggaacagccgctctgggctgcctggtcaaggattactttcccgagcctgtgaccgtgtcctggaatagcggagcactgacaagcggcgtgcacacctttccagccgtgctgcaaagcagcggcctgtactctctgagcagcgtggtcacagtgcctagctctagcctgggcacccagacctacatctgcaatgtgaaccacaagcctagcaacaccaaggtggacaagagagtggaacccaagagctgtatccccgaggacacattcttcccaagccccgagagcagctgcgacgtgaagctggtggaaaagagcttcgagacagacaccaacctgaacttccagaacctgagcgtgatcggcttcagaatcctgctgctgaaagtggccggctttaacctgctgatgaccctgcggctgtggtccagc

SEQ ID NO: 3224 - DNA, 2292 bp, Artificial Sequence
  Synthetic Polynucloetide
atggccttaccagtgaccgccttgctcctgccgctggccttgctgctccacgccgccaggccggaagtgcagctggttgaatctggcggaggactggttcagcctggcggatctctgagactgtcttgtgccgccagcggcttcagcttcagcgacttttggatgagctgggtccgacaggcccctggcaaaggacttgaatgggtcgccacaatcagccaggccggcagcgagaaggactacgtggactctgtgaagggcagattcaccatcagccgggacaacgccaagaagtccctgtacctccagatgaacagcctgagagccgaggacaccgccgtgtactattgtgcctctggcgtgtacagcttcgactacagaggccagggcaccctggtcacagtctcttctggtaccggcggaggcggatctggcggcggaggtagcggtggcggaggatctgaattccagttcgtgctgacccagagcccttctgcctctgctgccctgggagcctctgccaagctgacctgtacactgagcagcgcccacaagacctacaccatcgactggtatcagcagcagaagggaaaggcccccagatacctgatccaagtgaagtccgacggcacctacacaaaggccaccggcgtgcccgatagattcagcggcagtagcagcggagccgatagatacctgattatccccagcgtgcaggccgacgacgaggccgattactactgcggcaccgattacaccggcggctacgtgttcggcggaggcacacaactgaccgtgacactcgagggacagcctaaggccaatcctaccgtgacactgttccctccaagcagcgaagaactccaggccaacaaggccacacttgtgtgcctgatctccgacttctaccctggggctgtgacagtggcttggaaggccgatggatctcctgtgaaagccggcgtggaaaccaccaagccatccaagcagagcaacaacaaatacgccgccagctcctacctgagcctgacacctgagcagtggaagtcccacagatcctacagctgccaagtgacccacgaaggcagcaccgtggaaaagacagtggcccctacagagtgcagcggcagagccgattgcggctttaccagcgagagctaccagcagggcgtgctgagcgccaccatcctgtacgagatcctgctgggcaaggccaccctgtacgccgtgctggtgtctgccctggtgctgatggctatggtcaagcggaaggacagccggggacgcgccaagagaagcggatctggcgtgaagcagaccctgaatttcgacctgctgaagctggctggcgacgtggaatccaacccaggccctactagtatggactggatttggcgcatccttttccttgtcggcgctgctaccggcgcgcattccttcgaagagcaactgaaagagtctggcggcggactgttcaagcccaccgataccctgaccctgacctgcaccgtgtccggcttcagcctgagctactacggcgtgaactgggtgcgccaggcccctggcaatggcctggaatggatcggcacaatcggcggcagcggcgacacctactatgcctcttgggccaagtccagaagcaccatcatcagaaacaccaacgagaacaccgtgaccctgaagatgaccagcctgacagccgccgacaccgccacctacttttgcgtcagatacgccaacatcggctacgagtatttcaacgtgtggggacccggcaccctcgtgaccgtgtcatctacgcgtgcctctacaaagggaccctccgtgtttcctctggctcccagcagcaagtctacaagcggaggaacagccgctctgggctgcctggtcaaggattactttcccgagcctgtgaccgtgtcctggaatagcggagcactgacaagcggcgtgcacacctttccagccgtgctgcaaagcagcggcctgtactctctgagcagcgtggtcacagtgcctagctctagcctgggcacccagacctacatctgcaatgtgaaccacaagcctagcaacaccaaggtggacaagagagtggaacccaagagctgtatccccgaggacacattcttcccaagccccgagagcagctgcgacgtgaagctggtggaaaagagcttcgagacagacaccaacctgaacttccagaacctgagcgtgatcggcttcagaatcctgctgctgaaagtggccggctttaacctgctgatgaccctgcggctgtggtccagc

SEQ ID NO: 3225 - DNA, 2307 bp, Artificial Sequence
  Synthetic Polynucloetide
atggccttaccagtgaccgccttgctcctgccgctggccttgctgctccacgccgccaggccggaagtgcagctggttgaatctggcggaggactggttcagcctggcggatctctgagactgtcttgtgccgccagcggcttcagcttcagcgacttttggatgagctgggtccgacaggcccctggcaaaggacttgaatgggtcgccacaatcagccaggccggcagcgagaaggactacgtggactctgtgaagggcagattcaccatcagccgggacaacgccaagaagtccctgtacctccagatgaacagcctgagagccgaggacaccgccgtgtactattgtgcctctggcgtgtacagcttcgactacagaggccagggcaccctggtcacagtctcttctggtaccggcggaggcggatctggcggcggaggtagcggtggcggaggatctgaattccagttcgtgctgacccagagcccttctgtgtctgccgccctgggagcctctgccaagctgacctgtacactgagcagcgcccacaagacctacaccatcgactggtatcagcagcagcagggcgaggcccccagatacctgatgcaagtgaagtccgacggcagctacaccaagggcaccggcgtgcccgatagattcagcggcagtagcagcggagccgatagatacctgattatccccagcgtgcaggccgacgacgaggccggatatgtgtgcggcgctgacgacaatggcggctacgtgttcggcggaggcacccaactgacagtgacactcgagggacagcctaaggccaatcctaccgtgacactgttccctccaagcagcgaagaactccaggccaacaaggccacacttgtgtgcctgatctccgacttctaccctggggctgtgacagtggcttggaaggccgatggatctcctgtgaaagccggcgtggaaaccaccaagccatccaagcagagcaacaacaaatacgccgccagctcctacctgagcctgacacctgagcagtggaagtcccacagatcctacagctgccaagtgacccacgaaggcagcaccgtggaaaagacagtggcccctacagagtgcagcggcagagccgattgcggctttaccagcgagagctaccagcagggcgtgctgagcgccaccatcctgtacgagatcctgctgggcaaggccaccctgtacgccgtgctggtgtctgccctggtgctgatggctatggtcaagcggaaggacagccggggacgcgccaagagaagcggatctggcgtgaagcagaccctgaatttcgacctgctgaagctggctggcgacgtggaatccaacccaggccctactagtatggactggatttggcgcatccttttccttgtcggcgctgctaccggcgcgcattccttcgaacagagcgtgaaagagtctgagggcggcctgttcaagcccaccgataccctgaccctgacctgcaccgtgtccggcttcagcctgagcagacacgccctgacatgggtgcgccaggcccctggaaatggcctggaatggatcggagccatcgacaacgccggcaccacctactatgcctcttgggccaagtccagaagcaccatcacccggaacaccgacctgcacaccgtgaccctgaagatgaccagcctgaccgccagcgacaccgccacctacttttgcgccagagtgttctacgacatcaacagcggctactacctggacggcatggacctgtggggacctggcacacttgtgaccgtgtccagcacgcgtgcctctacaaagggaccctccgtgtttcctctggctcccagcagcaagtctacaagcggaggaacagccgctctgggctgcctggtcaaggattactttcccgagcctgtgaccgtgtcctggaatagcggagcactgacaagcggcgtgcacacctttccagccgtgctgcaaagcagcggcctgtactctctgagcagcgtggtcacagtgcctagctctagcctgggcacccagacctacatctgcaatgtgaaccacaagcctagcaacaccaaggtggacaagagagtggaacccaagagctgtatccccgaggacacattcttcccaagccccgagagcagctgcgacgtgaagctggtggaaaagagcttcgagacagacaccaacctgaacttccagaacctgagcgtgatcggcttcagaatcctgctgctgaaagtggccggctttaacctgctgatgaccctgcggctgtggtccagc

SEQ ID NO: 3226 - DNA, 2289 bp, Artificial Sequence
  Synthetic Polynucloetide
atggccttaccagtgaccgccttgctcctgccgctggccttgctgctccacgccgccaggccggaagtgcagctggttgaatctggcggaggactggttcagcctggcggatctctgagactgtcttgtgccgccagcggcttcagcttcagcgacttttggatgagctgggtccgacaggcccctggcaaaggacttgaatgggtcgccacaatcagccaggccggcagcgagaaggactacgtggactctgtgaagggcagattcaccatcagccgggacaacgccaagaagtccctgtacctccagatgaacagcctgagagccgaggacaccgccgtgtactattgtgcctctggcgtgtacagcttcgactacagaggccagggcaccctggtcacagtctcttctggtaccggcggaggcggatctggcggcggaggtagcggtggcggaggatctgaattcgacatccagatgacccagagccccagcagcctgtctgccagcgtgggcgacagagtgaccatcacctgtagagccagccagggcatcagctcttggctggcctggtatcagcagaagcccgagaaggcccccaagagcctgatctacgccgcctctagtctccagagcggcgtgcccagcagattttctggcagcggctccggcaccgacttcaccctgacaatcagctccctccagcccgaggacttcgccacctactactgccagcagtacaacagctacccccccacctttggcggaggcaccaaggtggaaatcaagctcgagggacagcctaaggccaatcctaccgtgacactgttccctccaagcagcgaagaactccaggccaacaaggccacacttgtgtgcctgatctccgacttctaccctggggctgtgacagtggcttggaaggccgatggatctcctgtgaaagccggcgtggaaaccaccaagccatccaagcagagcaacaacaaatacgccgccagctcctacctgagcctgacacctgagcagtggaagtcccacagatcctacagctgccaagtgacccacgaaggcagcaccgtggaaaagacagtggcccctacagagtgcagcggcagagccgattgcggctttaccagcgagagctaccagcagggcgtgctgagcgccaccatcctgtacgagatcctgctgggcaaggccaccctgtacgccgtgctggtgtctgccctggtgctgatggctatggtcaagcggaaggacagccggggacgcgccaagagaagcggatctggcgtgaagcagaccctgaatttcgacctgctgaagctggctggcgacgtggaatccaacccaggccctactagtatggactggatttggcgcatccttttccttgtcggcgctgctaccggcgcgcattccttcgaagaagtgcaactggtggaatcaggcggcggactggtgcagcctggcgagtctctgagactgagctgtgtggcctccggcttcaccttcagccggtacaagatgaactgggtgcgccaggcccctggcaagggactggaatgggtgtcctacatcagccgcagcggcagagacatctactacgccgacagcgtgaagggccggttcaccatcagcagagacaacgccaagaacagcctgtacctccagatgaactccctgcgggacgaggacaccgccgtgtactactgtgccggaaccgtgaccacctattactacttcggcatggacgtgtggggccacggcaccaccgtgacagtgtcatctacgcgtgcctctacaaagggaccctccgtgtttcctctggctcccagcagcaagtctacaagcggaggaacagccgctctgggctgcctggtcaaggattactttcccgagcctgtgaccgtgtcctggaatagcggagcactgacaagcggcgtgcacacctttccagccgtgctgcaaagcagcggcctgtactctctgagcagcgtggtcacagtgcctagctctagcctgggcacccagacctacatctgcaatgtgaaccacaagcctagcaacaccaaggtggacaagagagtggaacccaagagctgtatccccgaggacacattcttcccaagccccgagagcagctgcgacgtgaagctggtggaaaagagcttcgagacagacaccaacctgaacttccagaacctgagcgtgatcggcttcagaatcctgctgctgaaagtggccggctttaacctgctgatgaccctgcggctgtggtccagc

SEQ ID NO: 3227 - DNA, 2292 bp, Artificial Sequence
  Synthetic Polynucloetide
atggccttaccagtgaccgccttgctcctgccgctggccttgctgctccacgccgccaggccggaagtgcagctggttgaatctggcggaggactggttcagcctggcggatctctgagactgtcttgtgccgccagcggcttcagcttcagcgacttttggatgagctgggtccgacaggcccctggcaaaggacttgaatgggtcgccacaatcagccaggccggcagcgagaaggactacgtggactctgtgaagggcagattcaccatcagccgggacaacgccaagaagtccctgtacctccagatgaacagcctgagagccgaggacaccgccgtgtactattgtgcctctggcgtgtacagcttcgactacagaggccagggcaccctggtcacagtctcttctggtaccggcggaggcggatctggcggcggaggtagcggtggcggaggatctgaattcgacatccagatgacccagagccccagcagcctgtctgccagcgtgggcgacagagtgaccatcacctgtagagccagccagggcatcagctcttggctggcctggtatcagcagaagcccgagaaggcccccaagagcctgatctacgccgcctctagtctccagagcggcgtgcccagcagattttctggcagcggctccggcaccgacttcaccctgacaatcagctccctccagcccgaggacttcgccacctactactgccagcagtacaacagctaccctcccacctttggcggaggcaccaaggtggaaatcaagctcgagggacagcctaaggccaatcctaccgtgacactgttccctccaagcagcgaagaactccaggccaacaaggccacacttgtgtgcctgatctccgacttctaccctggggctgtgacagtggcttggaaggccgatggatctcctgtgaaagccggcgtggaaaccaccaagccatccaagcagagcaacaacaaatacgccgccagctcctacctgagcctgacacctgagcagtggaagtcccacagatcctacagctgccaagtgacccacgaaggcagcaccgtggaaaagacagtggcccctacagagtgcagcggcagagccgattgcggctttaccagcgagagctaccagcagggcgtgctgagcgccaccatcctgtacgagatcctgctgggcaaggccaccctgtacgccgtgctggtgtctgccctggtgctgatggctatggtcaagcggaaggacagccggggacgcgccaagagaagcggatctggcgtgaagcagaccctgaatttcgacctgctgaagctggctggcgacgtggaatccaacccaggccctactagtatggactggatttggcgcatccttttccttgtcggcgctgctaccggcgcgcattccttcgaagaagtgcaactggtggaatccgggggaggctctgtgcagcctggcgagtctctgagactgagctgtgtggcctccggcttcaccttcagccggtacaagatgaactgggtgcgccaggcccctggcaagggactggaatgggtgtcctacatcagccgcagcggcagagacatctactacgccgacagcgtgaagggccggttcaccatcagcagagacaacgccaagaacagcctgtacctccagatgaactccctgcgggacgaggacaccgccgtgtactactgtgccggaaccgtgaccacctattactacgacttcggcatggacgtgtggggccagggcacaaccgtgacagtgtctagcacgcgtgcctctacaaagggaccctccgtgtttcctctggctcccagcagcaagtctacaagcggaggaacagccgctctgggctgcctggtcaaggattactttcccgagcctgtgaccgtgtcctggaatagcggagcactgacaagcggcgtgcacacctttccagccgtgctgcaaagcagcggcctgtactctctgagcagcgtggtcacagtgcctagctctagcctgggcacccagacctacatctgcaatgtgaaccacaagcctagcaacaccaaggtggacaagagagtggaacccaagagctgtatccccgaggacacattcttcccaagccccgagagcagctgcgacgtgaagctggtggaaaagagcttcgagacagacaccaacctgaacttccagaacctgagcgtgatcggcttcagaatcctgctgctgaaagtggccggctttaacctgctgatgaccctgcggctgtggtccagc

SEQ ID NO: 3228 - DNA, 2286 bp, Artificial Sequence
  Synthetic Polynucloetide
atggccttaccagtgaccgccttgctcctgccgctggccttgctgctccacgccgccaggccggaagtgcagctggttgaatctggcggaggactggttcagcctggcggatctctgagactgtcttgtgccgccagcggcttcagcttcagcgacttttggatgagctgggtccgacaggcccctggcaaaggacttgaatgggtcgccacaatcagccaggccggcagcgagaaggactacgtggactctgtgaagggcagattcaccatcagccgggacaacgccaagaagtccctgtacctccagatgaacagcctgagagccgaggacaccgccgtgtactattgtgcctctggcgtgtacagcttcgactacagaggccagggcaccctggtcacagtctcttctggtaccggcggaggcggatctggcggcggaggtagcggtggcggaggatctgaattccagtctgtgctgacacagcctccatctgcctctggcacacctggacagagagtgaccatcagctgtagcggcagcagaagcaacgtcggcggcaactacgtgttctggtatcagcaggtcccaggcgctacccctaagctgctgatctacagaagcaatcagcggcctagcggcgtgcccgatagatttgccggaagcaagagcggcagctctgccagccttgccatctctggactgagaagcgaggacgaggccgactactactgtgccacctgggatgatagcctgagcggcttcgtgtttggcaccggcaccaaagtgacagtgcttggtctcgagggacagcctaaggccaatcctaccgtgacactgttccctccaagcagcgaagaactccaggccaacaaggccacacttgtgtgcctgatctccgacttctaccctggggctgtgacagtggcttggaaggccgatggatctcctgtgaaagccggcgtggaaaccaccaagccatccaagcagagcaacaacaaatacgccgccagctcctacctgagcctgacacctgagcagtggaagtcccacagatcctacagctgccaagtgacccacgaaggcagcaccgtggaaaagacagtggcccctacagagtgcagcggcagagccgattgcggctttaccagcgagagctaccagcagggcgtgctgagcgccaccatcctgtacgagatcctgctgggcaaggccaccctgtacgccgtgctggtgtctgccctggtgctgatggctatggtcaagcggaaggacagccggggacgcgccaagagaagcggatctggcgtgaagcagaccctgaatttcgacctgctgaagctggctggcgacgtggaatccaacccaggccctactagtatggactggatttggcgcatccttttccttgtcggcgctgctaccggcgcgcattccttcgaagttcagctggttgaatctggcggcggactggttaagcctggcggatctctgagactgtcttgtgccgccagcggcttcaccttcagcgattactacatgagctggatcagacaggcccctggcaaaggactggaatgggtgtcctacatcagcagcagcggctccaccatctactacgccgatagcgtgaagggcagattcaccatcagccgggacaacgccaagaacagcctgtacctccagatgaactccctgagagccgaggacaccgccgtgtactattgcgccagaggctacggcaaagcctacgatcaatggggccagggcacactggtcaccgtttcttctacgcgtgcctctacaaagggaccctccgtgtttcctctggctcccagcagcaagtctacaagcggaggaacagccgctctgggctgcctggtcaaggattactttcccgagcctgtgaccgtgtcctggaatagcggagcactgacaagcggcgtgcacacctttccagccgtgctgcaaagcagcggcctgtactctctgagcagcgtggtcacagtgcctagctctagcctgggcacccagacctacatctgcaatgtgaaccacaagcctagcaacaccaaggtggacaagagagtggaacccaagagctgtatccccgaggacacattcttcccaagccccgagagcagctgcgacgtgaagctggtggaaaagagcttcgagacagacaccaacctgaacttccagaacctgagcgtgatcggcttcagaatcctgctgctgaaagtggccggctttaacctgctgatgaccctgcggctgtggtccagc

SEQ ID NO: 3229 - DNA, 2283 bp, Artificial Sequence
  Synthetic Polynucloetide
atggccttaccagtgaccgccttgctcctgccgctggccttgctgctccacgccgccaggccggaagtgcagctggttgaatctggcggaggactggttcagcctggcggatctctgagactgtcttgtgccgccagcggcttcagcttcagcgacttttggatgagctgggtccgacaggcccctggcaaaggacttgaatgggtcgccacaatcagccaggccggcagcgagaaggactacgtggactctgtgaagggcagattcaccatcagccgggacaacgccaagaagtccctgtacctccagatgaacagcctgagagccgaggacaccgccgtgtactattgtgcctctggcgtgtacagcttcgactacagaggccagggcaccctggtcacagtctcttctggtaccggcggaggcggatctggcggcggaggtagcggtggcggaggatctgaattccagtctgtggtcacacagccacctagcatgtctgccgctccaggccagcaagtgaccatctcttgtagcggcggcaacagcaacatcgagcggaactacgtgtcctggtatctgcaactgcctggcacagcccctaagctggtcatcttcgacaacgacagacggcccagcggcatccccgatagattttctggcagcaagagcggcaccagcgccacactgggaattaccggacttcagacaggcgacgaggccgactactactgtggcacatgggactctagcctgagaggctgggttttcggcggaggcacaaagctgacagtgcttggtctcgagggacagcctaaggccaatcctaccgtgacactgttccctccaagcagcgaagaactccaggccaacaaggccacacttgtgtgcctgatctccgacttctaccctggggctgtgacagtggcttggaaggccgatggatctcctgtgaaagccggcgtggaaaccaccaagccatccaagcagagcaacaacaaatacgccgccagctcctacctgagcctgacacctgagcagtggaagtcccacagatcctacagctgccaagtgacccacgaaggcagcaccgtggaaaagacagtggcccctacagagtgcagcggcagagccgattgcggctttaccagcgagagctaccagcagggcgtgctgagcgccaccatcctgtacgagatcctgctgggcaaggccaccctgtacgccgtgctggtgtctgccctggtgctgatggctatggtcaagcggaaggacagccggggacgcgccaagagaagcggatctggcgtgaagcagaccctgaatttcgacctgctgaagctggctggcgacgtggaatccaacccaggccctactagtatggactggatttggcgcatccttttccttgtcggcgctgctaccggcgcgcattccttcgaagtgcagctcgttgagtctggcggcggactgattcaacctggcggaagcctgagactgagctgtgccgcttccggcttcaccttcagcaactacgccatgaactgggttcgacaggcccctggcaaaggactggaatgggtgtccaccatcaacggcagaggcagcagcaccatctacgccgattctgtgaagggcagattcaccatcagccgggacaacagcaagaacaccctgtacctccagatgaactccctgagagccgaggacaccgccacctattactgtgcccggtacatcagcagaggactgggcgattcttggggccagggcacactggttacagtgacgcgtgcctctacaaagggaccctccgtgtttcctctggctcccagcagcaagtctacaagcggaggaacagccgctctgggctgcctggtcaaggattactttcccgagcctgtgaccgtgtcctggaatagcggagcactgacaagcggcgtgcacacctttccagccgtgctgcaaagcagcggcctgtactctctgagcagcgtggtcacagtgcctagctctagcctgggcacccagacctacatctgcaatgtgaaccacaagcctagcaacaccaaggtggacaagagagtggaacccaagagctgtatccccgaggacacattcttcccaagccccgagagcagctgcgacgtgaagctggtggaaaagagcttcgagacagacaccaacctgaacttccagaacctgagcgtgatcggcttcagaatcctgctgctgaaagtggccggctttaacctgctgatgaccctgcggctgtggtccagc

SEQ ID NO: 3230 - DNA, 2286 bp, Artificial Sequence
  Synthetic Polynucloetide
atggccttaccagtgaccgccttgctcctgccgctggccttgctgctccacgccgccaggccggaagtgcagctggttgaatctggcggaggactggttcagcctggcggatctctgagactgtcttgtgccgccagcggcttcagcttcagcgacttttggatgagctgggtccgacaggcccctggcaaaggacttgaatgggtcgccacaatcagccaggccggcagcgagaaggactacgtggactctgtgaagggcagattcaccatcagccgggacaacgccaagaagtccctgtacctccagatgaacagcctgagagccgaggacaccgccgtgtactattgtgcctctggcgtgtacagcttcgactacagaggccagggcaccctggtcacagtctcttctggtaccggcggaggcggatctggcggcggaggtagcggtggcggaggatctgaattcgacgtcgtgatgacccagacccctctgagcctgcctgtgtccctgggcgatcaggccagcatcagctgtagaagcagccagagcctggtgcacagcaacggcaacacctacctgcactggtatctccagaagcccggccagagccccaagctgctgatctacaaggtgtccaacagattcagcggcgtgcccgacagattctccggcagcggctctggcaccgacttcaccctgaagatcagccgggtggaagccgaggacctgggcgtgtacttctgtagccagaacacccccgtgccccccaagtttggcagcggcaccaagctggaaatcaagctcgagggacagcctaaggccaatcctaccgtgacactgttccctccaagcagcgaagaactccaggccaacaaggccacacttgtgtgcctgatctccgacttctaccctggggctgtgacagtggcttggaaggccgatggatctcctgtgaaagccggcgtggaaaccaccaagccatccaagcagagcaacaacaaatacgccgccagctcctacctgagcctgacacctgagcagtggaagtcccacagatcctacagctgccaagtgacccacgaaggcagcaccgtggaaaagacagtggcccctacagagtgcagcggcagagccgattgcggctttaccagcgagagctaccagcagggcgtgctgagcgccaccatcctgtacgagatcctgctgggcaaggccaccctgtacgccgtgctggtgtctgccctggtgctgatggctatggtcaagcggaaggacagccggggacgcgccaagagaagcggatctggcgtgaagcagaccctgaatttcgacctgctgaagctggctggcgacgtggaatccaacccaggccctactagtatggactggatttggcgcatccttttccttgtcggcgctgctaccggcgcgcattccttcgaacaggtgcagctccagcagtctggcgctgaactcgtgcggcctggcgcttctgtgaagctgtcttgcaaggccagcggctacaccttcaacgactacgagatgcactgggtcaagcagacccctgtgcacggcctgaagtggatcggagccctggaacccaagaccggcgataccgcctacagccagaagttcaagggcaaggccaccctgaccgccgacaagagcagcagcacagcctacatggaactgcggagcctgaccagcgaggacagcgccgtgtactactgcaccagctgctactactacacctacagcggccagggcaccctcgtgacagtgtctgctacgcgtgcctctacaaagggaccctccgtgtttcctctggctcccagcagcaagtctacaagcggaggaacagccgctctgggctgcctggtcaaggattactttcccgagcctgtgaccgtgtcctggaatagcggagcactgacaagcggcgtgcacacctttccagccgtgctgcaaagcagcggcctgtactctctgagcagcgtggtcacagtgcctagctctagcctgggcacccagacctacatctgcaatgtgaaccacaagcctagcaacaccaaggtggacaagagagtggaacccaagagctgtatccccgaggacacattcttcccaagccccgagagcagctgcgacgtgaagctggtggaaaagagcttcgagacagacaccaacctgaacttccagaacctgagcgtgatcggcttcagaatcctgctgctgaaagtggccggctttaacctgctgatgaccctgcggctgtggtccagc

SEQ ID NO: 3231 - DNA, 2283 bp, Artificial Sequence
  Synthetic Polynucloetide
atggccttaccagtgaccgccttgctcctgccgctggccttgctgctccacgccgccaggccggaagtgcagctggttgaatctggcggaggactggttcagcctggcggatctctgagactgtcttgtgccgccagcggcttcagcttcagcgacttttggatgagctgggtccgacaggcccctggcaaaggacttgaatgggtcgccacaatcagccaggccggcagcgagaaggactacgtggactctgtgaagggcagattcaccatcagccgggacaacgccaagaagtccctgtacctccagatgaacagcctgagagccgaggacaccgccgtgtactattgtgcctctggcgtgtacagcttcgactacagaggccagggcaccctggtcacagtctcttctggtaccggcggaggcggatctggcggcggaggtagcggtggcggaggatctgaattcgacatccaactgacccagagccccagcagcctgtctgcctctgtgggcgacagagtgaccatcacctgtagagccagccagggcatcagaaacgacctgggctggtatcagcagaagcccggcaaggcccccaagcggctgatctatgctgccagctccctccagaatggcgtgcccagcagattttccggcagcggctctggcaccgagttcaccctgaccatcagctccctccagcccgaggacttcgccacctactactgcctccagcacaacacctaccccgccttcggccagggcaccaaggtggaaatcaagagactcgagggacagcctaaggccaatcctaccgtgacactgttccctccaagcagcgaagaactccaggccaacaaggccacacttgtgtgcctgatctccgacttctaccctggggctgtgacagtggcttggaaggccgatggatctcctgtgaaagccggcgtggaaaccaccaagccatccaagcagagcaacaacaaatacgccgccagctcctacctgagcctgacacctgagcagtggaagtcccacagatcctacagctgccaagtgacccacgaaggcagcaccgtggaaaagacagtggcccctacagagtgcagcggcagagccgattgcggctttaccagcgagagctaccagcagggcgtgctgagcgccaccatcctgtacgagatcctgctgggcaaggccaccctgtacgccgtgctggtgtctgccctggtgctgatggctatggtcaagcggaaggacagccggggacgcgccaagagaagcggatctggcgtgaagcagaccctgaatttcgacctgctgaagctggctggcgacgtggaatccaacccaggccctactagtatggactggatttggcgcatccttttccttgtcggcgctgctaccggcgcgcattccttcgaacaggtgcaactccaggaatctggccctggcctcgtgaagcctagccagaccctgagcctgacctgtaccgtgtctggcggcagcatcagcagcttcaactactactggtcctggatcagacaccaccctggcaagggcctggaatggatcggctacatctactacagcggcagcacctacagcaaccccagcctgaagtcccgcgtgaccatctccgtggacaccagcaagaaccagtttagcctgaccctgtccagcgtgacagccgccgataccgccgtgtactactgcgccagaggctacaactggaactacttcgactactggggccagggaaccctcgtgaccgtgtctagtacgcgtgcctctacaaagggaccctccgtgtttcctctggctcccagcagcaagtctacaagcggaggaacagccgctctgggctgcctggtcaaggattactttcccgagcctgtgaccgtgtcctggaatagcggagcactgacaagcggcgtgcacacctttccagccgtgctgcaaagcagcggcctgtactctctgagcagcgtggtcacagtgcctagctctagcctgggcacccagacctacatctgcaatgtgaaccacaagcctagcaacaccaaggtggacaagagagtggaacccaagagctgtatccccgaggacacattcttcccaagccccgagagcagctgcgacgtgaagctggtggaaaagagcttcgagacagacaccaacctgaacttccagaacctgagcgtgatcggcttcagaatcctgctgctgaaagtggccggctttaacctgctgatgaccctgcggctgtggtccagc

SEQ ID NO: 3232 - DNA, 2289 bp, Artificial Sequence
  Synthetic Polynucloetide
atggccttaccagtgaccgccttgctcctgccgctggccttgctgctccacgccgccaggccggaagtgcagctggttgaatctggcggaggactggttcagcctggcggatctctgagactgtcttgtgccgccagcggcttcagcttcagcgacttttggatgagctgggtccgacaggcccctggcaaaggacttgaatgggtcgccacaatcagccaggccggcagcgagaaggactacgtggactctgtgaagggcagattcaccatcagccgggacaacgccaagaagtccctgtacctccagatgaacagcctgagagccgaggacaccgccgtgtactattgtgcctctggcgtgtacagcttcgactacagaggccagggcaccctggtcacagtctcttctggtaccggcggaggcggatctggcggcggaggtagcggtggcggaggatctgaattcgacgacatcgtgctgacccagagccccgccagcctggccgtgagcctgggccagagcgtgaccatcagctgcagagccagcgagagcgtggagtactacggcaccagcctgatgcagtggtaccagcagaagcccggccagccccccaagctgctgatctacgccaccagcaacgtggagagcggcgtgcccgccagattcagcggcagcggcagcggcaccgacttcagcctgaacatccaccccgtggaggaggacgacatcgccatgtacttctgccagcagagcagaaagctgcccagcaccttcggcggcggcaccaagctggagatcaagctcgagggacagcctaaggccaatcctaccgtgacactgttccctccaagcagcgaagaactccaggccaacaaggccacacttgtgtgcctgatctccgacttctaccctggggctgtgacagtggcttggaaggccgatggatctcctgtgaaagccggcgtggaaaccaccaagccatccaagcagagcaacaacaaatacgccgccagctcctacctgagcctgacacctgagcagtggaagtcccacagatcctacagctgccaagtgacccacgaaggcagcaccgtggaaaagacagtggcccctacagagtgcagcggcagagccgattgcggctttaccagcgagagctaccagcagggcgtgctgagcgccaccatcctgtacgagatcctgctgggcaaggccaccctgtacgccgtgctggtgtctgccctggtgctgatggctatggtcaagcggaaggacagccggggacgcgccaagagaagcggatctggcgtgaagcagaccctgaatttcgacctgctgaagctggctggcgacgtggaatccaacccaggccctactagtatggactggatttggcgcatccttttccttgtcggcgctgctaccggcgcgcattccttcgaagacgtgagactgcaggagagcggccccggccaggtgaagcccagccagaccgtgagcctgacctgcagcgtgaccggctacagcatcaccaacggcaaccactggtggaactggatcagacaggtgagcggcagcaagctggagtggatcggctacatcagcagcagcggcagcaccgacagcaaccccagcctgaagagcagaatcagcatcaccagagacaccagcaagaaccagctgttcctgcagctgaacagcgtgaccaccgaggacatcgccacctactactgcgccagaggctactacttcgactactggggccagggcaccaccctgaccgtgagcagcacgcgtgcctctacaaagggaccctccgtgtttcctctggctcccagcagcaagtctacaagcggaggaacagccgctctgggctgcctggtcaaggattactttcccgagcctgtgaccgtgtcctggaatagcggagcactgacaagcggcgtgcacacctttccagccgtgctgcaaagcagcggcctgtactctctgagcagcgtggtcacagtgcctagctctagcctgggcacccagacctacatctgcaatgtgaaccacaagcctagcaacaccaaggtggacaagagagtggaacccaagagctgtatccccgaggacacattcttcccaagccccgagagcagctgcgacgtgaagctggtggaaaagagcttcgagacagacaccaacctgaacttccagaacctgagcgtgatcggcttcagaatcctgctgctgaaagtggccggctttaacctgctgatgaccctgcggctgtggtccagc

SEQ ID NO: 3233 - DNA, 2286 bp, Artificial Sequence
  Synthetic Polynucloetide
atggccttaccagtgaccgccttgctcctgccgctggccttgctgctccacgccgccaggccggaagtgcagctggttgaatctggcggaggactggttcagcctggcggatctctgagactgtcttgtgccgccagcggcttcagcttcagcgacttttggatgagctgggtccgacaggcccctggcaaaggacttgaatgggtcgccacaatcagccaggccggcagcgagaaggactacgtggactctgtgaagggcagattcaccatcagccgggacaacgccaagaagtccctgtacctccagatgaacagcctgagagccgaggacaccgccgtgtactattgtgcctctggcgtgtacagcttcgactacagaggccagggcaccctggtcacagtctcttctggtaccggcggaggcggatctggcggcggaggtagcggtggcggaggatctgaattcgacatccagatgacccagagccccagcagcctgtctgccagcgtgggcgacagagtgaccatcacctgtagagccagccaggacgtgaacaccgccgtggcctggtatcagcagaagcctggcaaggcccccaagctgctgatctacagcgccagcttcctggaaagcggcgtgcccagcagattcagcggaagcagaagcggcaccgacttcaccctgaccatcagctccctccagcccgaggacttcgccacctactactgccagcagcactacaccacccctcccaccttcggccagaccaaggtggaaatcaagagactcgagggacagcctaaggccaatcctaccgtgacactgttccctccaagcagcgaagaactccaggccaacaaggccacacttgtgtgcctgatctccgacttctaccctggggctgtgacagtggcttggaaggccgatggatctcctgtgaaagccggcgtggaaaccaccaagccatccaagcagagcaacaacaaatacgccgccagctcctacctgagcctgacacctgagcagtggaagtcccacagatcctacagctgccaagtgacccacgaaggcagcaccgtggaaaagacagtggcccctacagagtgcagcggcagagccgattgcggctttaccagcgagagctaccagcagggcgtgctgagcgccaccatcctgtacgagatcctgctgggcaaggccaccctgtacgccgtgctggtgtctgccctggtgctgatggctatggtcaagcggaaggacagccggggacgcgccaagagaagcggatctggcgtgaagcagaccctgaatttcgacctgctgaagctggctggcgacgtggaatccaacccaggccctactagtatggactggatttggcgcatccttttccttgtcggcgctgctaccggcgcgcattccttcgaagaagtgcaactggtggaatctggcggcggactggtgcagcctggcggatctctgagactgagctgtgccgccagcggcttcaacatcaaggacacctacatccactgggtgcgccaggcccctggaaagggactggaatgggtggcccggatctaccccaccaacggctacaccagatacgccgacagcgtgaagggccggttcaccatcagcgccgacaccagcaagaataccgcctacctccagatgaacagcctgcgggccgaggataccgccgtgtactactgctcaagatggggaggcgacggcttctacgctatggacgtgtggggccagggcacccttgtgaccgtgtcatctacgcgtgcctctacaaagggaccctccgtgtttcctctggctcccagcagcaagtctacaagcggaggaacagccgctctgggctgcctggtcaaggattactttcccgagcctgtgaccgtgtcctggaatagcggagcactgacaagcggcgtgcacacctttccagccgtgctgcaaagcagcggcctgtactctctgagcagcgtggtcacagtgcctagctctagcctgggcacccagacctacatctgcaatgtgaaccacaagcctagcaacaccaaggtggacaagagagtggaacccaagagctgtatccccgaggacacattcttcccaagccccgagagcagctgcgacgtgaagctggtggaaaagagcttcgagacagacaccaacctgaacttccagaacctgagcgtgatcggcttcagaatcctgctgctgaaagtggccggctttaacctgctgatgaccctgcggctgtggtccagc

SEQ ID NO: 3234 - DNA, 2283 bp, Artificial Sequence
  Synthetic Polynucloetide
atggccttaccagtgaccgccttgctcctgccgctggccttgctgctccacgccgccaggccggaagtgcagctggttgaatctggcggaggactggttcagcctggcggatctctgagactgtcttgtgccgccagcggcttcagcttcagcgacttttggatgagctgggtccgacaggcccctggcaaaggacttgaatgggtcgccacaatcagccaggccggcagcgagaaggactacgtggactctgtgaagggcagattcaccatcagccgggacaacgccaagaagtccctgtacctccagatgaacagcctgagagccgaggacaccgccgtgtactattgtgcctctggcgtgtacagcttcgactacagaggccagggcaccctggtcacagtctcttctggtaccggcggaggcggatctggcggcggaggtagcggtggcggaggatctgaattcgaccagagcgtgctgacacagcctcctagcgtgtcagtggcccctggcaagaccgccagaatcccctgcgagggcaactacatcggcagcagcaacgtgcactggtatcagcagaagcccggccaggctcccgtgctcgtgatccacttcgacagcgacagacccagcggcatccccgacagattcagcggcagcaacagcggcaacatggctaccctgaccatcagcagagtggaagccggggacgaggccgactactactgtcaagtgtgggagaaccacggctgggtgttcggcggaggcaccaagctgacagtgctgtctctcgagggacagcctaaggccaatcctaccgtgacactgttccctccaagcagcgaagaactccaggccaacaaggccacacttgtgtgcctgatctccgacttctaccctggggctgtgacagtggcttggaaggccgatggatctcctgtgaaagccggcgtggaaaccaccaagccatccaagcagagcaacaacaaatacgccgccagctcctacctgagcctgacacctgagcagtggaagtcccacagatcctacagctgccaagtgacccacgaaggcagcaccgtggaaaagacagtggcccctacagagtgcagcggcagagccgattgcggctttaccagcgagagctaccagcagggcgtgctgagcgccaccatcctgtacgagatcctgctgggcaaggccaccctgtacgccgtgctggtgtctgccctggtgctgatggctatggtcaagcggaaggacagccggggacgcgccaagagaagcggatctggcgtgaagcagaccctgaatttcgacctgctgaagctggctggcgacgtggaatccaacccaggccctactagtatggactggatttggcgcatccttttccttgtcggcgctgctaccggcgcgcattccttcgaagaggtgcaactggtggaaacaggcggcggactggtgcagcctggcgagtctctgagactgagctgtgccgccagcggcttcaccttcagcgactacgagatgaactgggtgcgccaggcccctggaaagggcctggaatgggtgtcctacatcagcagctccggcagcaccatctactacgccgacagcgtgaagggccggtttaccatctaccgggacaacgccaagaacagcctgtacctccagatgaactccctgcgggccgaggacaccgccctgtactattgtgccagagcctggggcgtgggaccccctgattattggggacagggcaccctcgtgaccgtgtcctctacgcgtgcctctacaaagggaccctccgtgtttcctctggctcccagcagcaagtctacaagcggaggaacagccgctctgggctgcctggtcaaggattactttcccgagcctgtgaccgtgtcctggaatagcggagcactgacaagcggcgtgcacacctttccagccgtgctgcaaagcagcggcctgtactctctgagcagcgtggtcacagtgcctagctctagcctgggcacccagacctacatctgcaatgtgaaccacaagcctagcaacaccaaggtggacaagagagtggaacccaagagctgtatccccgaggacacattcttcccaagccccgagagcagctgcgacgtgaagctggtggaaaagagcttcgagacagacaccaacctgaacttccagaacctgagcgtgatcggcttcagaatcctgctgctgaaagtggccggctttaacctgctgatgaccctgcggctgtggtccagc

SEQ ID NO: 3235 - DNA, 2307 bp, Artificial Sequence
  Synthetic Polynucloetide
atggccttaccagtgaccgccttgctcctgccgctggccttgctgctccacgccgccaggccggaagtgcagctggttgaatctggcggaggactggttcagcctggcggatctctgagactgtcttgtgccgccagcggcttcagcttcagcgacttttggatgagctgggtccgacaggcccctggcaaaggacttgaatgggtcgccacaatcagccaggccggcagcgagaaggactacgtggactctgtgaagggcagattcaccatcagccgggacaacgccaagaagtccctgtacctccagatgaacagcctgagagccgaggacaccgccgtgtactattgtgcctctggcgtgtacagcttcgactacagaggccagggcaccctggtcacagtctcttctggtaccggcggaggcggatctggcggcggaggtagcggtggcggaggatctgaattcgacatccagatgacccagagccccagcagcctgtctgccagcgtgggcgataccgtgaccatcacctgtcaggccaacggctacctgaactggtatcagcagcggagaggcaaggcccccaagctgctgatctacgacggcagcaagctggaaagaggcgtgcccagcagattcagcggcagaagatggggccaggagtacaacctgaccatcaacaacctccagcccgaggatattgccacatacttttgccaggtgtacgagttcgtggtgcccggcacacggctggacctgaagagaacagtggctgctcctctcgagggacagcctaaggccaatcctaccgtgacactgttccctccaagcagcgaagaactccaggccaacaaggccacacttgtgtgcctgatctccgacttctaccctggggctgtgacagtggcttggaaggccgatggatctcctgtgaaagccggcgtggaaaccaccaagccatccaagcagagcaacaacaaatacgccgccagctcctacctgagcctgacacctgagcagtggaagtcccacagatcctacagctgccaagtgacccacgaaggcagcaccgtggaaaagacagtggcccctacagagtgcagcggcagagccgattgcggctttaccagcgagagctaccagcagggcgtgctgagcgccaccatcctgtacgagatcctgctgggcaaggccaccctgtacgccgtgctggtgtctgccctggtgctgatggctatggtcaagcggaaggacagccggggacgcgccaagagaagcggatctggcgtgaagcagaccctgaatttcgacctgctgaagctggctggcgacgtggaatccaacccaggccctactagtatggactggatttggcgcatccttttccttgtcggcgctgctaccggcgcgcattccttcgaacaggtgcagctgctccagtctggcgctgccgtgacaaagcctggcgcttctgtgcgggtgtcctgtgaagccagcggctacaacatccgggactacttcatccactggtggcggcaggctccaggccagggactccagtgggtgggatggatcaaccccaagaccggccagcccaacaaccccagacagttccagggcagagtgtccctgaccagacacgccagctgggacttcgacaccttcagcttctacatggatctgaaggccctgcggagcgacgataccgccgtgtacttctgcgccagacagagaagcgactactgggatttcgacgtgtggggcagcggcacccaagtgacagtgtctagcgccagcaccaagggacccacgcgtgcctctacaaagggaccctccgtgtttcctctggctcccagcagcaagtctacaagcggaggaacagccgctctgggctgcctggtcaaggattactttcccgagcctgtgaccgtgtcctggaatagcggagcactgacaagcggcgtgcacacctttccagccgtgctgcaaagcagcggcctgtactctctgagcagcgtggtcacagtgcctagctctagcctgggcacccagacctacatctgcaatgtgaaccacaagcctagcaacaccaaggtggacaagagagtggaacccaagagctgtatccccgaggacacattcttcccaagccccgagagcagctgcgacgtgaagctggtggaaaagagcttcgagacagacaccaacctgaacttccagaacctgagcgtgatcggcttcagaatcctgctgctgaaagtggccggctttaacctgctgatgaccctgcggctgtggtccagc

SEQ ID NO: 3236 - DNA, 2325 bp, Artificial Sequence
  Synthetic Polynucloetide
atggccttaccagtgaccgccttgctcctgccgctggccttgctgctccacgccgccaggccggaagtgcagctggttgaatctggcggaggactggttcagcctggcggatctctgagactgtcttgtgccgccagcggcttcagcttcagcgacttttggatgagctgggtccgacaggcccctggcaaaggacttgaatgggtcgccacaatcagccaggccggcagcgagaaggactacgtggactctgtgaagggcagattcaccatcagccgggacaacgccaagaagtccctgtacctccagatgaacagcctgagagccgaggacaccgccgtgtactattgtgcctctggcgtgtacagcttcgactacagaggccagggcaccctggtcacagtctcttctggtaccggcggaggcggatctggcggcggaggtagcggtggcggaggatctgaattccagtctgccctgacacagcctcctagcgcctctggctctcccggccagagcatcaccatcagctgtaccggcaccagcaacaacttcgtgtcctggtatcagcagcacgccggcaaggcccccaagctcgtgatctacgacgtgaacaagcggcccagcggcgtgcccgatagattcagcggcagcaagagcggcaacaccgccagcctgacagtgtctggcctccagaccgatgacgaggccgtgtactactgcggcagcctcgtgggcaactgggacgtgatctttggcggaggcaccaagctgaccgtgctgctcgagggacagcctaaggccaatcctaccgtgacactgttccctccaagcagcgaagaactccaggccaacaaggccacacttgtgtgcctgatctccgacttctaccctggggctgtgacagtggcttggaaggccgatggatctcctgtgaaagccggcgtggaaaccaccaagccatccaagcagagcaacaacaaatacgccgccagctcctacctgagcctgacacctgagcagtggaagtcccacagatcctacagctgccaagtgacccacgaaggcagcaccgtggaaaagacagtggcccctacagagtgcagcggcagagccgattgcggctttaccagcgagagctaccagcagggcgtgctgagcgccaccatcctgtacgagatcctgctgggcaaggccaccctgtacgccgtgctggtgtctgccctggtgctgatggctatggtcaagcggaaggacagccggggacgcgccaagagaagcggatctggcgtgaagcagaccctgaatttcgacctgctgaagctggctggcgacgtggaatccaacccaggccctactagtatggactggatttggcgcatccttttccttgtcggcgctgctaccggcgcgcattccttcgaacagccccagctccaggaatctggccccacactggtggaagccagcgagacactgagcctgacctgtgccgtgtccggcgattctaccgccgcctgcaatagcttctggggctgggtgcgccagcctcctggaaagggactggaatgggtgggaagcctgagccactgcgccagctattggaaccggggctggacctaccacaaccccagcctgaagtccagactgaccctggccctggacacccccaagaacctggtgttcctgaagctgaacagcgtgacagccgccgacaccgccacctactactgtgccagatttggcggcgaggtgctgcggtacaccgactggcctaaacctgcctgggtggacctgtggggcagaggaacactcgtgaccgtgtccagcacgcgtgcctctacaaagggaccctccgtgtttcctctggctcccagcagcaagtctacaagcggaggaacagccgctctgggctgcctggtcaaggattactttcccgagcctgtgaccgtgtcctggaatagcggagcactgacaagcggcgtgcacacctttccagccgtgctgcaaagcagcggcctgtactctctgagcagcgtggtcacagtgcctagctctagcctgggcacccagacctacatctgcaatgtgaaccacaagcctagcaacaccaaggtggacaagagagtggaacccaagagctgtatccccgaggacacattcttcccaagccccgagagcagctgcgacgtgaagctggtggaaaagagcttcgagacagacaccaacctgaacttccagaacctgagcgtgatcggcttcagaatcctgctgctgaaagtggccggctttaacctgctgatgaccctgcggctgtggtccagc

SEQ ID NO: 3237 - DNA, 2280 bp, Artificial Sequence
  Synthetic Polynucloetide
atggccttaccagtgaccgccttgctcctgccgctggccttgctgctccacgccgccaggccggaagtgcagctggttgaatctggcggaggactggttcagcctggcggatctctgagactgtcttgtgccgccagcggcttcagcttcagcgacttttggatgagctgggtccgacaggcccctggcaaaggacttgaatgggtcgccacaatcagccaggccggcagcgagaaggactacgtggactctgtgaagggcagattcaccatcagccgggacaacgccaagaagtccctgtacctccagatgaacagcctgagagccgaggacaccgccgtgtactattgtgcctctggcgtgtacagcttcgactacagaggccagggcaccctggtcacagtctcttctggtaccggcggaggcggatctggcggcggaggtagcggtggcggaggatctgaattcgagatcgtgctgacacagagccctggcaccctgagcctgtctccaggcgagacagccatcatcagctgccggacaagccagtacggcagcctggcctggtatcagcagaggccaggacaggcccccagactcgtgatctacagcggcagcacaagagccgccggaatccccgatagattcagcggctccagatggggacccgactacaacctgaccatcagcaacctggaaagcggcgacttcggcgtgtactactgccagcagtacgagttcttcggccagggcaccaaggtgcaggtggacatcaaaagactcgagggacagcctaaggccaatcctaccgtgacactgttccctccaagcagcgaagaactccaggccaacaaggccacacttgtgtgcctgatctccgacttctaccctggggctgtgacagtggcttggaaggccgatggatctcctgtgaaagccggcgtggaaaccaccaagccatccaagcagagcaacaacaaatacgccgccagctcctacctgagcctgacacctgagcagtggaagtcccacagatcctacagctgccaagtgacccacgaaggcagcaccgtggaaaagacagtggcccctacagagtgcagcggcagagccgattgcggctttaccagcgagagctaccagcagggcgtgctgagcgccaccatcctgtacgagatcctgctgggcaaggccaccctgtacgccgtgctggtgtctgccctggtgctgatggctatggtcaagcggaaggacagccggggacgcgccaagagaagcggatctggcgtgaagcagaccctgaatttcgacctgctgaagctggctggcgacgtggaatccaacccaggccctactagtatggactggatttggcgcatccttttccttgtcggcgctgctaccggcgcgcattccttcgaacaggtgcagctggtgcagtctggcggccagatgaagaaacccggcgagagcatgagaatcagctgtcgggcctccggctacgagttcatcgactgcaccctgaactggatcagactggcccctggcaagcggcctgagtggatgggatggctgaagcctagaggcggagccgtgaactacgccagacctctccagggcagagtgaccatgaccagggacgtgtacagcgataccgccttcctggaactgcggagcctgaccgtggatgataccgccgtgtacttctgcaccagaggcaagaactgcgattacaactgggacttcgagcactggggcagaggcacccctgtgatcgtgtctagcacgcgtgcctctacaaagggaccctccgtgtttcctctggctcccagcagcaagtctacaagcggaggaacagccgctctgggctgcctggtcaaggattactttcccgagcctgtgaccgtgtcctggaatagcggagcactgacaagcggcgtgcacacctttccagccgtgctgcaaagcagcggcctgtactctctgagcagcgtggtcacagtgcctagctctagcctgggcacccagacctacatctgcaatgtgaaccacaagcctagcaacaccaaggtggacaagagagtggaacccaagagctgtatccccgaggacacattcttcccaagccccgagagcagctgcgacgtgaagctggtggaaaagagcttcgagacagacaccaacctgaacttccagaacctgagcgtgatcggcttcagaatcctgctgctgaaagtggccggctttaacctgctgatgaccctgcggctgtggtccagc

SEQ ID NO: 3238 - DNA, 2310 bp, Artificial Sequence
  Synthetic Polynucloetide
atggccttaccagtgaccgccttgctcctgccgctggccttgctgctccacgccgccaggccggaagtgcagctggttgaatctggcggaggactggttcagcctggcggatctctgagactgtcttgtgccgccagcggcttcagcttcagcgacttttggatgagctgggtccgacaggcccctggcaaaggacttgaatgggtcgccacaatcagccaggccggcagcgagaaggactacgtggactctgtgaagggcagattcaccatcagccgggacaacgccaagaagtccctgtacctccagatgaacagcctgagagccgaggacaccgccgtgtactattgtgcctctggcgtgtacagcttcgactacagaggccagggcaccctggtcacagtctcttctggtaccggcggaggcggatctggcggcggaggtagcggtggcggaggatctgaattcgagctggtgctgacacagagccctggcaccctgtctctgtctgccggcgaaagagccaccctgagctgtagagccagccagagcgtgtcctctggcagcctggcttggtatcagcagaagccaggccaggcccccagactgctgatctacggcgcttctaccagagccaccggcatccccgatagattcagcggctctggctccggcaccgacttcaccctgacaatcggcagactggaacccgaggacctggccgtgtactactgccagcagtacggcaccagcccctacacattcggccagggcaccaagctggaaatcctcgagggacagcctaaggccaatcctaccgtgacactgttccctccaagcagcgaagaactccaggccaacaaggccacacttgtgtgcctgatctccgacttctaccctggggctgtgacagtggcttggaaggccgatggatctcctgtgaaagccggcgtggaaaccaccaagccatccaagcagagcaacaacaaatacgccgccagctcctacctgagcctgacacctgagcagtggaagtcccacagatcctacagctgccaagtgacccacgaaggcagcaccgtggaaaagacagtggcccctacagagtgcagcggcagagccgattgcggctttaccagcgagagctaccagcagggcgtgctgagcgccaccatcctgtacgagatcctgctgggcaaggccaccctgtacgccgtgctggtgtctgccctggtgctgatggctatggtcaagcggaaggacagccggggacgcgccaagagaagcggatctggcgtgaagcagaccctgaatttcgacctgctgaagctggctggcgacgtggaatccaacccaggccctactagtatggactggatttggcgcatccttttccttgtcggcgctgctaccggcgcgcattccttcgaactggaacagagcggagccgaagtgaagaaacccggcagcagcgtgcaggtgtcctgcaaagcaagcggcggcaccttctctatgtacggcttcaactgggtgcgccaggctcctggacacggcctggaatggatgggcggcatcatccccatcttcggcacctccaactacgcccagaaattccggggcagagtgaccttcaccgccgaccaggccacaagcaccgcctacatggaactgaccaacctgcggagcgacgacaccgccgtgtattattgcgccagagacttcggccccgactgggaggatggcgacagctacgatggcagcggcagaggcttcttcgacttctggggccagggaacccttgtgaccgtgtcctcaacgcgtgcctctacaaagggaccctccgtgtttcctctggctcccagcagcaagtctacaagcggaggaacagccgctctgggctgcctggtcaaggattactttcccgagcctgtgaccgtgtcctggaatagcggagcactgacaagcggcgtgcacacctttccagccgtgctgcaaagcagcggcctgtactctctgagcagcgtggtcacagtgcctagctctagcctgggcacccagacctacatctgcaatgtgaaccacaagcctagcaacaccaaggtggacaagagagtggaacccaagagctgtatccccgaggacacattcttcccaagccccgagagcagctgcgacgtgaagctggtggaaaagagcttcgagacagacaccaacctgaacttccagaacctgagcgtgatcggcttcagaatcctgctgctgaaagtggccggctttaacctgctgatgaccctgcggctgtggtccagc

SEQ ID NO: 3239 - DNA, 2250 bp, Artificial Sequence
  Synthetic Polynucloetide
atggccttaccagtgaccgccttgctcctgccgctggccttgctgctccacgccgccaggccggaagtgcagctggttgaatctggcggaggactggttcagcctggcggatctctgagactgtcttgtgccgccagcggcttcagcttcagcgacttttggatgagctgggtccgacaggcccctggcaaaggacttgaatgggtcgccacaatcagccaggccggcagcgagaaggactacgtggactctgtgaagggcagattcaccatcagccgggacaacgccaagaagtccctgtacctccagatgaacagcctgagagccgaggacaccgccgtgtactattgtgcctctggcgtgtacagcttcgactacagaggccagggcaccctggtcacagtctcttctggtaccggcggaggcggatctggcggcggaggtagcggtggcggaggatctgaattcgacatccagatgacccagagccccagcagcctgtctgccagcgtgggcgacagagtgaccatcacctgtcaggccagccaggacatcaacaactacctgaactggtatcagcagaagcccggcaaggcccccaagctgctgatctacgacgccagcaatctgcagaccggcgtgcccagcagattttccggctctggcagcggcaccgacttcaccttcaccatcgaggacattgccacctactactgccagcagtacaccttcggccctggcaccaaggtggacatcaaactcgagggacagcctaaggccaatcctaccgtgacactgttccctccaagcagcgaagaactccaggccaacaaggccacacttgtgtgcctgatctccgacttctaccctggggctgtgacagtggcttggaaggccgatggatctcctgtgaaagccggcgtggaaaccaccaagccatccaagcagagcaacaacaaatacgccgccagctcctacctgagcctgacacctgagcagtggaagtcccacagatcctacagctgccaagtgacccacgaaggcagcaccgtggaaaagacagtggcccctacagagtgcagcggcagagccgattgcggctttaccagcgagagctaccagcagggcgtgctgagcgccaccatcctgtacgagatcctgctgggcaaggccaccctgtacgccgtgctggtgtctgccctggtgctgatggctatggtcaagcggaaggacagccggggacgcgccaagagaagcggatctggcgtgaagcagaccctgaatttcgacctgctgaagctggctggcgacgtggaatccaacccaggccctactagtatggactggatttggcgcatccttttccttgtcggcgctgctaccggcgcgcattccttcgaagaagtgcaactgctggaatctggcggcggactggtgcagcctggcggatctctgagactgagctgtgccgccagcggcttcacctttagctggtacagcatgacctgggtgcgccaggcccctggcaaaggactggaatgggtgtccagcatcgtgccctggggcgatttcacccagtacgccgatagcgtgaagggccggttcaccatcagccgggacaacagcaagaacaccctgtacctgcagatgaacagcctgcgggccgaggacaccgccgtgtactattgtgccaagggacctggctggggcagcttcgatctgtggggcagaggaacccttgtgaccgtgtccagcacgcgtgcctctacaaagggaccctccgtgtttcctctggctcccagcagcaagtctacaagcggaggaacagccgctctgggctgcctggtcaaggattactttcccgagcctgtgaccgtgtcctggaatagcggagcactgacaagcggcgtgcacacctttccagccgtgctgcaaagcagcggcctgtactctctgagcagcgtggtcacagtgcctagctctagcctgggcacccagacctacatctgcaatgtgaaccacaagcctagcaacaccaaggtggacaagagagtggaacccaagagctgtatccccgaggacacattcttcccaagccccgagagcagctgcgacgtgaagctggtggaaaagagcttcgagacagacaccaacctgaacttccagaacctgagcgtgatcggcttcagaatcctgctgctgaaagtggccggctttaacctgctgatgaccctgcggctgtggtccagc

SEQ ID NO: 3240 - DNA, 2280 bp, Artificial Sequence
  Synthetic Polynucloetide
atggccttaccagtgaccgccttgctcctgccgctggccttgctgctccacgccgccaggccggaagtgcagctggttgaatctggcggaggactggttcagcctggcggatctctgagactgtcttgtgccgccagcggcttcagcttcagcgacttttggatgagctgggtccgacaggcccctggcaaaggacttgaatgggtcgccacaatcagccaggccggcagcgagaaggactacgtggactctgtgaagggcagattcaccatcagccgggacaacgccaagaagtccctgtacctccagatgaacagcctgagagccgaggacaccgccgtgtactattgtgcctctggcgtgtacagcttcgactacagaggccagggcaccctggtcacagtctcttctggtaccggcggaggcggatctggcggcggaggtagcggtggcggaggatctgaattcgacatccagatgacccagagccccagcagcctgtctgccagcgtgggcgacagagtgaccatcacctgtaccgccagcctgagcgtgtccagcacctacctgcactggtatcagcagaagcccggcagcagccccaagctgtggatctacagcaccagcaacctggcctccggcgtgcccagcagattttctggcagcggctctggcaccagctacaccctgaccatcagctccctccagcccgaggacttcgccacctactactgccaccagtaccacagaagccccctgacctttggcggaggcaccaaggtggaaatcaagagactcgagggacagcctaaggccaatcctaccgtgacactgttccctccaagcagcgaagaactccaggccaacaaggccacacttgtgtgcctgatctccgacttctaccctggggctgtgacagtggcttggaaggccgatggatctcctgtgaaagccggcgtggaaaccaccaagccatccaagcagagcaacaacaaatacgccgccagctcctacctgagcctgacacctgagcagtggaagtcccacagatcctacagctgccaagtgacccacgaaggcagcaccgtggaaaagacagtggcccctacagagtgcagcggcagagccgattgcggctttaccagcgagagctaccagcagggcgtgctgagcgccaccatcctgtacgagatcctgctgggcaaggccaccctgtacgccgtgctggtgtctgccctggtgctgatggctatggtcaagcggaaggacagccggggacgcgccaagagaagcggatctggcgtgaagcagaccctgaatttcgacctgctgaagctggctggcgacgtggaatccaacccaggccctactagtatggactggatttggcgcatccttttccttgtcggcgctgctaccggcgcgcattccttcgaagaagtgcaactggtggaatctggcggcggactggtgcagcctggcggatctctgagactgagctgtgccgccagcggcttcagcctgaccaaatacggcgtgcactgggtgcgccaggcccctggaaaaggactggaatgggtgggagtgaagtgggctggcggctccaccgactacaacagcgccctgatgagccggttcaccatcagcaaggacaacgccaagaacagcctgtacctccagatgaactccctgcgggccgaggacaccgccgtgtactactgtgccagagatcaccgggacgctatggactactggggccagggaacactcgtgaccgtgtcctctacgcgtgcctctacaaagggaccctccgtgtttcctctggctcccagcagcaagtctacaagcggaggaacagccgctctgggctgcctggtcaaggattactttcccgagcctgtgaccgtgtcctggaatagcggagcactgacaagcggcgtgcacacctttccagccgtgctgcaaagcagcggcctgtactctctgagcagcgtggtcacagtgcctagctctagcctgggcacccagacctacatctgcaatgtgaaccacaagcctagcaacaccaaggtggacaagagagtggaacccaagagctgtatccccgaggacacattcttcccaagccccgagagcagctgcgacgtgaagctggtggaaaagagcttcgagacagacaccaacctgaacttccagaacctgagcgtgatcggcttcagaatcctgctgctgaaagtggccggctttaacctgctgatgaccctgcggctgtggtccagc

SEQ ID NO: 3241 - DNA, 2292 bp, Artificial Sequence
  Synthetic Polynucloetide
atggccttaccagtgaccgccttgctcctgccgctggccttgctgctccacgccgccaggccggaagtgcagctggttgaatctggcggaggactggttcagcctggcggatctctgagactgtcttgtgccgccagcggcttcagcttcagcgacttttggatgagctgggtccgacaggcccctggcaaaggacttgaatgggtcgccacaatcagccaggccggcagcgagaaggactacgtggactctgtgaagggcagattcaccatcagccgggacaacgccaagaagtccctgtacctccagatgaacagcctgagagccgaggacaccgccgtgtactattgtgcctctggcgtgtacagcttcgactacagaggccagggcaccctggtcacagtctcttctggtaccggcggaggcggatctggcggcggaggtagcggtggcggaggatctgaattcgacatccagatgacccagagccccagcagcctgtctgccagcgtgggcgacagagtgaccatcacatgcaaggccagccaggacgtgggaacagccgtggcctggtatcagcagaagcctggcaaggcccccaagctgctgatctacagcgccagctacagatccaccggcgtgcccagcagattttccggctctggcagcggcaccgacttcaccctgaccatctctagcctccagcccgaggacttcgccacctactactgccagcaccactactccgccccctggacatttggcggaggcaccaaggtggaaatcaagctcgagggacagcctaaggccaatcctaccgtgacactgttccctccaagcagcgaagaactccaggccaacaaggccacacttgtgtgcctgatctccgacttctaccctggggctgtgacagtggcttggaaggccgatggatctcctgtgaaagccggcgtggaaaccaccaagccatccaagcagagcaacaacaaatacgccgccagctcctacctgagcctgacacctgagcagtggaagtcccacagatcctacagctgccaagtgacccacgaaggcagcaccgtggaaaagacagtggcccctacagagtgcagcggcagagccgattgcggctttaccagcgagagctaccagcagggcgtgctgagcgccaccatcctgtacgagatcctgctgggcaaggccaccctgtacgccgtgctggtgtctgccctggtgctgatggctatggtcaagcggaaggacagccggggacgcgccaagagaagcggatctggcgtgaagcagaccctgaatttcgacctgctgaagctggctggcgacgtggaatccaacccaggccctactagtatggactggatttggcgcatccttttccttgtcggcgctgctaccggcgcgcattccttcgaagaagtgcaactggtggaatcaggcggcggactggtgcagcctggcggatctctgagactgagctgtgccgccagcggcttcaccttcagcagaaacggcatgagctgggtgcgccaggcccctggaaaaggactggaatgggtggcaaccgtgtccagcggcggcagctacatctactacgccgacagcgtgaagggccggttcaccatctccagagacaacgccaagaacagcctgtacctccagatgaactccctgcgggccgaggacaccgccgtgtactattgtgccagacagggcaccaccgccctggctaccagattcttcgatgtgtggggccagggcaccctcgtgaccgtgtcatctacgcgtgcctctacaaagggaccctccgtgtttcctctggctcccagcagcaagtctacaagcggaggaacagccgctctgggctgcctggtcaaggattactttcccgagcctgtgaccgtgtcctggaatagcggagcactgacaagcggcgtgcacacctttccagccgtgctgcaaagcagcggcctgtactctctgagcagcgtggtcacagtgcctagctctagcctgggcacccagacctacatctgcaatgtgaaccacaagcctagcaacaccaaggtggacaagagagtggaacccaagagctgtatccccgaggacacattcttcccaagccccgagagcagctgcgacgtgaagctggtggaaaagagcttcgagacagacaccaacctgaacttccagaacctgagcgtgatcggcttcagaatcctgctgctgaaagtggccggctttaacctgctgatgaccctgcggctgtggtccagc

SEQ ID NO: 3242 - DNA, 2280 bp, Artificial Sequence
  Synthetic Polynucloetide
atggccttaccagtgaccgccttgctcctgccgctggccttgctgctccacgccgccaggccggaagtgcagctggttgaatctggcggaggactggttcagcctggcggatctctgagactgtcttgtgccgccagcggcttcagcttcagcgacttttggatgagctgggtccgacaggcccctggcaaaggacttgaatgggtcgccacaatcagccaggccggcagcgagaaggactacgtggactctgtgaagggcagattcaccatcagccgggacaacgccaagaagtccctgtacctccagatgaacagcctgagagccgaggacaccgccgtgtactattgtgcctctggcgtgtacagcttcgactacagaggccagggcaccctggtcacagtctcttctggtaccggcggaggcggatctggcggcggaggtagcggtggcggaggatctgaattcgacatccagatgacccagagcccccctagcctgtctgcctctgtgggcggcaaagtgaccatcacatgcaaggccagccaggacatcgaccgctacatggcctggtatcaggacaagcccggcaagggacccaagctgctgatccacgataccagcaccctccagcccggcatccccagcagattttctggcagcggctccggcagagactacagcttcagcatcagcaacctggaacccgaggacattgccacctactactgcctccagtacgacaacctgtggaccttcggcggaggcaccaagctggaaatcaagagactcgagggacagcctaaggccaatcctaccgtgacactgttccctccaagcagcgaagaactccaggccaacaaggccacacttgtgtgcctgatctccgacttctaccctggggctgtgacagtggcttggaaggccgatggatctcctgtgaaagccggcgtggaaaccaccaagccatccaagcagagcaacaacaaatacgccgccagctcctacctgagcctgacacctgagcagtggaagtcccacagatcctacagctgccaagtgacccacgaaggcagcaccgtggaaaagacagtggcccctacagagtgcagcggcagagccgattgcggctttaccagcgagagctaccagcagggcgtgctgagcgccaccatcctgtacgagatcctgctgggcaaggccaccctgtacgccgtgctggtgtctgccctggtgctgatggctatggtcaagcggaaggacagccggggacgcgccaagagaagcggatctggcgtgaagcagaccctgaatttcgacctgctgaagctggctggcgacgtggaatccaacccaggccctactagtatggactggatttggcgcatccttttccttgtcggcgctgctaccggcgcgcattccttcgaacaggtgcaactggtgcagagcggagccgagcttgtgaagcctggcgcttccgtgaagatgagctgcaaagccagcggctacatcttcaccaactacaacatccactgggtcaagaagtccccaggccagggcctggaatggatcggagccatctaccccggaaacggcgacgccccttacagccagaagttccaggacagagccaccctgaccgccgacaccagcagcagcaccacctacatggaactgagcagcctgaccagcgaggacagcgccgtgtactattgcgtgcgggccaactgggatgtggccttcgcctattggggccagggcacactggtgtccgtgtcctctacgcgtgcctctacaaagggaccctccgtgtttcctctggctcccagcagcaagtctacaagcggaggaacagccgctctgggctgcctggtcaaggattactttcccgagcctgtgaccgtgtcctggaatagcggagcactgacaagcggcgtgcacacctttccagccgtgctgcaaagcagcggcctgtactctctgagcagcgtggtcacagtgcctagctctagcctgggcacccagacctacatctgcaatgtgaaccacaagcctagcaacaccaaggtggacaagagagtggaacccaagagctgtatccccgaggacacattcttcccaagccccgagagcagctgcgacgtgaagctggtggaaaagagcttcgagacagacaccaacctgaacttccagaacctgagcgtgatcggcttcagaatcctgctgctgaaagtggccggctttaacctgctgatgaccctgcggctgtggtccagc

SEQ ID NO: 3243 - DNA, 2283 bp, Artificial Sequence
  Synthetic Polynucloetide
atggccttaccagtgaccgccttgctcctgccgctggccttgctgctccacgccgccaggccggaagtgcagctggttgaatctggcggaggactggttcagcctggcggatctctgagactgtcttgtgccgccagcggcttcagcttcagcgacttttggatgagctgggtccgacaggcccctggcaaaggacttgaatgggtcgccacaatcagccaggccggcagcgagaaggactacgtggactctgtgaagggcagattcaccatcagccgggacaacgccaagaagtccctgtacctccagatgaacagcctgagagccgaggacaccgccgtgtactattgtgcctctggcgtgtacagcttcgactacagaggccagggcaccctggtcacagtctcttctggtaccggcggaggcggatctggcggcggaggtagcggtggcggaggatctgaattcgacatccagatgacccagagccctgccagcctgtctgcctctgtgggcgagacagtgaccatcacctgtcgggtgtccggcaacatccacaactacctggcctggtatcagcagaagcagggcaagagcccccaactgctggtgtacaacgccaagaccctggccgatggcgtgcccagcagattttctggctctggcagcggcacccagtacagcctgaagatcaacagcctccagcccgaggacttcggcagctactactgccagcacttctggtccaacccctacaccttcggcggaggcaccaagctggaaatcaagctcgagggacagcctaaggccaatcctaccgtgacactgttccctccaagcagcgaagaactccaggccaacaaggccacacttgtgtgcctgatctccgacttctaccctggggctgtgacagtggcttggaaggccgatggatctcctgtgaaagccggcgtggaaaccaccaagccatccaagcagagcaacaacaaatacgccgccagctcctacctgagcctgacacctgagcagtggaagtcccacagatcctacagctgccaagtgacccacgaaggcagcaccgtggaaaagacagtggcccctacagagtgcagcggcagagccgattgcggctttaccagcgagagctaccagcagggcgtgctgagcgccaccatcctgtacgagatcctgctgggcaaggccaccctgtacgccgtgctggtgtctgccctggtgctgatggctatggtcaagcggaaggacagccggggacgcgccaagagaagcggatctggcgtgaagcagaccctgaatttcgacctgctgaagctggctggcgacgtggaatccaacccaggccctactagtatggactggatttggcgcatccttttccttgtcggcgctgctaccggcgcgcattccttcgaacaggtgcaactccagcagtctggcgcttccgtgaaggtgtcctgcaaggccagcgaactcgtgcggcctggcacaggctacgccttcaccaattacctgatcgagtgggtcaagcagaggcccggacagggcctggaatggatcggagtgattaacccaggcagcggcggcaccaactacaacgagaagttcaagggcaaggccaccctgaccgccgacaagagcagcagcacagcctacatgcaactgagcagcctgaccagcgacgacagcgccgtgtacttctgcgcccggtacagaagctacgactggtacttcgacgtgtggggagccggcaccaccgtgacagtgtcatctacgcgtgcctctacaaagggaccctccgtgtttcctctggctcccagcagcaagtctacaagcggaggaacagccgctctgggctgcctggtcaaggattactttcccgagcctgtgaccgtgtcctggaatagcggagcactgacaagcggcgtgcacacctttccagccgtgctgcaaagcagcggcctgtactctctgagcagcgtggtcacagtgcctagctctagcctgggcacccagacctacatctgcaatgtgaaccacaagcctagcaacaccaaggtggacaagagagtggaacccaagagctgtatccccgaggacacattcttcccaagccccgagagcagctgcgacgtgaagctggtggaaaagagcttcgagacagacaccaacctgaacttccagaacctgagcgtgatcggcttcagaatcctgctgctgaaagtggccggctttaacctgctgatgaccctgcggctgtggtccagc

SEQ ID NO: 3244 - DNA, 2280 bp, Artificial Sequence
  Synthetic Polynucloetide
atggccttaccagtgaccgccttgctcctgccgctggccttgctgctccacgccgccaggccggaagtgcagctggttgaatctggcggaggactggttcagcctggcggatctctgagactgtcttgtgccgccagcggcttcagcttcagcgacttttggatgagctgggtccgacaggcccctggcaaaggacttgaatgggtcgccacaatcagccaggccggcagcgagaaggactacgtggactctgtgaagggcagattcaccatcagccgggacaacgccaagaagtccctgtacctccagatgaacagcctgagagccgaggacaccgccgtgtactattgtgcctctggcgtgtacagcttcgactacagaggccagggcaccctggtcacagtctcttctggtaccggcggaggcggatctggcggcggaggtagcggtggcggaggatctgaattcgacatccagatgacccagagcttcagcagcctgagcgccagcgtgggcgacagagtgaccatcacctgtagagccagccaggacatcagcaactacctgaactggtatcagcagaagcccggcaaggcccccaagctgctgatctactacaccagcagactgcacagcggcgtgcccagcagattttctggcagcggctccggcaccgactacaccctgacaatcagctccctgcagcccgaggacttcgctacctacttctgtcagcaaggcaacaccctgccctggacctttggcggaggcaccaagctggaaatcaagagactcgagggacagcctaaggccaatcctaccgtgacactgttccctccaagcagcgaagaactccaggccaacaaggccacacttgtgtgcctgatctccgacttctaccctggggctgtgacagtggcttggaaggccgatggatctcctgtgaaagccggcgtggaaaccaccaagccatccaagcagagcaacaacaaatacgccgccagctcctacctgagcctgacacctgagcagtggaagtcccacagatcctacagctgccaagtgacccacgaaggcagcaccgtggaaaagacagtggcccctacagagtgcagcggcagagccgattgcggctttaccagcgagagctaccagcagggcgtgctgagcgccaccatcctgtacgagatcctgctgggcaaggccaccctgtacgccgtgctggtgtctgccctggtgctgatggctatggtcaagcggaaggacagccggggacgcgccaagagaagcggatctggcgtgaagcagaccctgaatttcgacctgctgaagctggctggcgacgtggaatccaacccaggccctactagtatggactggatttggcgcatccttttccttgtcggcgctgctaccggcgcgcattccttcgaagaagtgcaactggtgcagtccggcggagggctggtgcagagcggaggatctctgagactgagctgcagagccagcggctacaccttcacccggtactggatgctgtgggtgcgccagaggccaggcaagggactggaatgggtggccgagatcaacccccggaacgaccggaccaactacaacgagaagttcaagacccggttcaccatcagcgtggacagaagcaagaacaccctgtacctgcagatggacagcctgcgggccgaggataccgccgtgtacttttgtgctctgggaggcggctacgctatggactactggggccagggaacccttgtgaccgtgtcctctacgcgtgcctctacaaagggaccctccgtgtttcctctggctcccagcagcaagtctacaagcggaggaacagccgctctgggctgcctggtcaaggattactttcccgagcctgtgaccgtgtcctggaatagcggagcactgacaagcggcgtgcacacctttccagccgtgctgcaaagcagcggcctgtactctctgagcagcgtggtcacagtgcctagctctagcctgggcacccagacctacatctgcaatgtgaaccacaagcctagcaacaccaaggtggacaagagagtggaacccaagagctgtatccccgaggacacattcttcccaagccccgagagcagctgcgacgtgaagctggtggaaaagagcttcgagacagacaccaacctgaacttccagaacctgagcgtgatcggcttcagaatcctgctgctgaaagtggccggctttaacctgctgatgaccctgcggctgtggtccagc

SEQ ID NO: 3245 - DNA, 2283 bp, Artificial Sequence
  Synthetic Polynucloetide
atggccttaccagtgaccgccttgctcctgccgctggccttgctgctccacgccgccaggccggaagtgcagctggttgaatctggcggaggactggttcagcctggcggatctctgagactgtcttgtgccgccagcggcttcagcttcagcgacttttggatgagctgggtccgacaggcccctggcaaaggacttgaatgggtcgccacaatcagccaggccggcagcgagaaggactacgtggactctgtgaagggcagattcaccatcagccgggacaacgccaagaagtccctgtacctccagatgaacagcctgagagccgaggacaccgccgtgtactattgtgcctctggcgtgtacagcttcgactacagaggccagggcaccctggtcacagtctcttctggtaccggcggaggcggatctggcggcggaggtagcggtggcggaggatctgaattcgacatccagatgacacagtctccggcgtcactgtccgcctccgtgggggagactgtgactattatttgtagggcatcagttaacatctactcttatttggcctggtaccagcagaagcaaggcaagagtcctcagctgctggtgtataatgcgaagatcctggcagagggcgtgccgagccggttctccggcagcggctcaggtacccaattttccctcaagatcaattcactgcagccagaggactttggcagttactattgtcaacaccactacggcacattcactttcgggtccggtacaaaattggagattaagcgactcgagggacagcctaaggccaatcctaccgtgacactgttccctccaagcagcgaagaactccaggccaacaaggccacacttgtgtgcctgatctccgacttctaccctggggctgtgacagtggcttggaaggccgatggatctcctgtgaaagccggcgtggaaaccaccaagccatccaagcagagcaacaacaaatacgccgccagctcctacctgagcctgacacctgagcagtggaagtcccacagatcctacagctgccaagtgacccacgaaggcagcaccgtggaaaagacagtggcccctacagagtgcagcggcagagccgattgcggctttaccagcgagagctaccagcagggcgtgctgagcgccaccatcctgtacgagatcctgctgggcaaggccaccctgtacgccgtgctggtgtctgccctggtgctgatggctatggtcaagcggaaggacagccggggacgcgccaagagaagcggatctggcgtgaagcagaccctgaatttcgacctgctgaagctggctggcgacgtggaatccaacccaggccctactagtatggactggatttggcgcatccttttccttgtcggcgctgctaccggcgcgcattccttcgaacaggtacagttgaaagaaagcgggcctggactggtagcgccttcccaatctctctccatcacgtgcaccatctctggcttctccctgacttcctatggagttcactgggtgaggcagccccccggcaagggactggaatggctggtcgtcatctggtccgacgggtccacaacctacaactccgctctgaaaagtcggctctctatttctaaagataatagcaagagccaggtgtttctgaaaatgaactctctgcagaccgatgatacggccatttactactgcgcttcacactatggctcaaccttggcattcgcttcctggggccacggaacactggtgaccgtttccgcagccacgcgtgcctctacaaagggaccctccgtgtttcctctggctcccagcagcaagtctacaagcggaggaacagccgctctgggctgcctggtcaaggattactttcccgagcctgtgaccgtgtcctggaatagcggagcactgacaagcggcgtgcacacctttccagccgtgctgcaaagcagcggcctgtactctctgagcagcgtggtcacagtgcctagctctagcctgggcacccagacctacatctgcaatgtgaaccacaagcctagcaacaccaaggtggacaagagagtggaacccaagagctgtatccccgaggacacattcttcccaagccccgagagcagctgcgacgtgaagctggtggaaaagagcttcgagacagacaccaacctgaacttccagaacctgagcgtgatcggcttcagaatcctgctgctgaaagtggccggctttaacctgctgatgaccctgcggctgtggtccagc

SEQ ID NO: 3246 - DNA, 2307 bp, Artificial Sequence
  Synthetic Polynucloetide
atggccttaccagtgaccgccttgctcctgccgctggccttgctgctccacgccgccaggccggaagtgcagctggttgaatctggcggaggactggttcagcctggcggatctctgagactgtcttgtgccgccagcggcttcagcttcagcgacttttggatgagctgggtccgacaggcccctggcaaaggacttgaatgggtcgccacaatcagccaggccggcagcgagaaggactacgtggactctgtgaagggcagattcaccatcagccgggacaacgccaagaagtccctgtacctccagatgaacagcctgagagccgaggacaccgccgtgtactattgtgcctctggcgtgtacagcttcgactacagaggccagggcaccctggtcacagtctcttctggtaccggcggaggcggatctggcggcggaggtagcggtggcggaggatctgaattcgacattgtgatgacccagtctcacaaattcatgtccacatcagtaggagacagggtcagcgtcacctgcaaggccagtcagaatgtgggtaataatgtagcctggtatcaacagaaaccagggcaatctcctaaagtactgatttactcggcatcctaccggtacagtggagtccctgatcgcttcacaggcagtggatctgggacagatttcactctcaccatcagtaatgtgcagtctgaagacttggcagagtatttctgtcagcaatataacacctatccattcacgttcggctcggggacaaagttggaaataaaactcgagggacagcctaaggccaatcctaccgtgacactgttccctccaagcagcgaagaactccaggccaacaaggccacacttgtgtgcctgatctccgacttctaccctggggctgtgacagtggcttggaaggccgatggatctcctgtgaaagccggcgtggaaaccaccaagccatccaagcagagcaacaacaaatacgccgccagctcctacctgagcctgacacctgagcagtggaagtcccacagatcctacagctgccaagtgacccacgaaggcagcaccgtggaaaagacagtggcccctacagagtgcagcggcagagccgattgcggctttaccagcgagagctaccagcagggcgtgctgagcgccaccatcctgtacgagatcctgctgggcaaggccaccctgtacgccgtgctggtgtctgccctggtgctgatggctatggtcaagcggaaggacagccggggacgcgccaagagaagcggatctggcgtgaagcagaccctgaatttcgacctgctgaagctggctggcgacgtggaatccaacccaggccctactagtatggactggatttggcgcatccttttccttgtcggcgctgctaccggcgcgcattccttcgaagaggtacagctggaggaaagcggtggaggactggtgcaacctggagggtctatgaagctctcttgcgtagcttctgggttcacgttctccaattactggatgaactgggtgcggcagtcccccgagaaaggcctggaatgggtagcagaaattcggttcaagtcccataactatgctacacactttgccgagtctgtcaaaggccggttcactattagtcgagacgacagcaagtcttcagtctacctgcagatgaataacttgcgggcagaggacacaggtatctactactgcaccaggagaatcggcaactccgactatgactggtggtactttgacgtctggggagcaggcaccagcgtgacggtgagttcagcctcaacgcgtgcctctacaaagggaccctccgtgtttcctctggctcccagcagcaagtctacaagcggaggaacagccgctctgggctgcctggtcaaggattactttcccgagcctgtgaccgtgtcctggaatagcggagcactgacaagcggcgtgcacacctttccagccgtgctgcaaagcagcggcctgtactctctgagcagcgtggtcacagtgcctagctctagcctgggcacccagacctacatctgcaatgtgaaccacaagcctagcaacaccaaggtggacaagagagtggaacccaagagctgtatccccgaggacacattcttcccaagccccgagagcagctgcgacgtgaagctggtggaaaagagcttcgagacagacaccaacctgaacttccagaacctgagcgtgatcggcttcagaatcctgctgctgaaagtggccggctttaacctgctgatgaccctgcggctgtggtccagc

SEQ ID NO: 3247 - DNA, 2286 bp, Artificial Sequence
  Synthetic Polynucloetide
atggccttaccagtgaccgccttgctcctgccgctggccttgctgctccacgccgccaggccggaagtgcagctggttgaatctggcggaggactggttcagcctggcggatctctgagactgtcttgtgccgccagcggcttcagcttcagcgacttttggatgagctgggtccgacaggcccctggcaaaggacttgaatgggtcgccacaatcagccaggccggcagcgagaaggactacgtggactctgtgaagggcagattcaccatcagccgggacaacgccaagaagtccctgtacctccagatgaacagcctgagagccgaggacaccgccgtgtactattgtgcctctggcgtgtacagcttcgactacagaggccagggcaccctggtcacagtctcttctggtaccggcggaggcggatctggcggcggaggtagcggtggcggaggatctgaattcgaccagatcgtgctgacccagtcccccgctattatgtccgcatcaccgggcgaaaaagtgacgatctcctgtagcgcttcatctagcgtctcctacatgtattggtatcaacagaaacctgggtctagcccaaagccgtggatctacagaaccagtaaccttgccagtggggtgccagcccgcttcagcggtagtggcagtggaacttcctatagcctcacaataagcaacatggaggctgaagatgccgctgcctattactgccagcagtaccacagttacccaaccacgttcggcgggggaactaagctcgaagtaaaactcgagggacagcctaaggccaatcctaccgtgacactgttccctccaagcagcgaagaactccaggccaacaaggccacacttgtgtgcctgatctccgacttctaccctggggctgtgacagtggcttggaaggccgatggatctcctgtgaaagccggcgtggaaaccaccaagccatccaagcagagcaacaacaaatacgccgccagctcctacctgagcctgacacctgagcagtggaagtcccacagatcctacagctgccaagtgacccacgaaggcagcaccgtggaaaagacagtggcccctacagagtgcagcggcagagccgattgcggctttaccagcgagagctaccagcagggcgtgctgagcgccaccatcctgtacgagatcctgctgggcaaggccaccctgtacgccgtgctggtgtctgccctggtgctgatggctatggtcaagcggaaggacagccggggacgcgccaagagaagcggatctggcgtgaagcagaccctgaatttcgacctgctgaagctggctggcgacgtggaatccaacccaggccctactagtatggactggatttggcgcatccttttccttgtcggcgctgctaccggcgcgcattccttcgaagaggtgcagctggtggaatctgggggcggcctggtccaacctaagggatcactcaagctctcttgtgcggccagcggattctctttcaatacctatgctatgaattgggtgagacaggcgcccggaaagggcctcgaatggatagcccatatccggtcaaaatcaaacaatttcgcaacctactatgcggactccgtgaaggaccgattttccatctcccgagatgcctccgagaatattctgttcctgcagatgaataacctcaagacagaggacaccgccatgtactactgtgtgcgccagggcggtgactttcccatggattactgggggcaggggaccagcgtgaccgtgagctctacgcgtgcctctacaaagggaccctccgtgtttcctctggctcccagcagcaagtctacaagcggaggaacagccgctctgggctgcctggtcaaggattactttcccgagcctgtgaccgtgtcctggaatagcggagcactgacaagcggcgtgcacacctttccagccgtgctgcaaagcagcggcctgtactctctgagcagcgtggtcacagtgcctagctctagcctgggcacccagacctacatctgcaatgtgaaccacaagcctagcaacaccaaggtggacaagagagtggaacccaagagctgtatccccgaggacacattcttcccaagccccgagagcagctgcgacgtgaagctggtggaaaagagcttcgagacagacaccaacctgaacttccagaacctgagcgtgatcggcttcagaatcctgctgctgaaagtggccggctttaacctgctgatgaccctgcggctgtggtccagc

SEQ ID NO: 3248 - DNA, 2283 bp, Artificial Sequence
  Synthetic Polynucloetide
atggccttaccagtgaccgccttgctcctgccgctggccttgctgctccacgccgccaggccggaagtgcagctggttgaatctggcggaggactggttcagcctggcggatctctgagactgtcttgtgccgccagcggcttcagcttcagcgacttttggatgagctgggtccgacaggcccctggcaaaggacttgaatgggtcgccacaatcagccaggccggcagcgagaaggactacgtggactctgtgaagggcagattcaccatcagccgggacaacgccaagaagtccctgtacctccagatgaacagcctgagagccgaggacaccgccgtgtactattgtgcctctggcgtgtacagcttcgactacagaggccagggcaccctggtcacagtctcttctggtaccggcggaggcggatctggcggcggaggtagcggtggcggaggatctgaattcgacgacatccagatgacccagagcagcagcagcttcagcgtgagcctgggcgacagagtgaccatcacctgcatggccagcgaggacatctacatcagactggcctggtaccagcagaagcccggcaacgcccccagactgctgatcagcgccgccaccagcctggagaccggcgtgcccagcagattcagcggcagcggcagcggcaaggactacaccctgagcatcaccagcctgcagaccgaggacgtgggcacctactactgccagcagtactggagcagcccctggaccttcggcggcggcaccaagctggagatcaacctcgagggacagcctaaggccaatcctaccgtgacactgttccctccaagcagcgaagaactccaggccaacaaggccacacttgtgtgcctgatctccgacttctaccctggggctgtgacagtggcttggaaggccgatggatctcctgtgaaagccggcgtggaaaccaccaagccatccaagcagagcaacaacaaatacgccgccagctcctacctgagcctgacacctgagcagtggaagtcccacagatcctacagctgccaagtgacccacgaaggcagcaccgtggaaaagacagtggcccctacagagtgcagcggcagagccgattgcggctttaccagcgagagctaccagcagggcgtgctgagcgccaccatcctgtacgagatcctgctgggcaaggccaccctgtacgccgtgctggtgtctgccctggtgctgatggctatggtcaagcggaaggacagccggggacgcgccaagagaagcggatctggcgtgaagcagaccctgaatttcgacctgctgaagctggctggcgacgtggaatccaacccaggccctactagtatggactggatttggcgcatccttttccttgtcggcgctgctaccggcgcgcattccttcgaagacgtgcagctgcaggagagcggccccggcctggtgaagcccagccagagcctgagcctgacctgcaccgtgaccggctacagcatcaccagcgactacacctggaactggatcagacagttccccggcaacaagctggagtggatgggctacatcacctacagcggcagcaccagctacaaccccagcctgaagagcagaaacagcatcaccagagacaccagcaagaaccagttcttcctgcagctgaacagcgtgaccaccgaggacaccgccacctactactgcgccagactgggcagaagatacacaatggactactggggccagggcaccagcgtgaccgtgagcagcacgcgtgcctctacaaagggaccctccgtgtttcctctggctcccagcagcaagtctacaagcggaggaacagccgctctgggctgcctggtcaaggattactttcccgagcctgtgaccgtgtcctggaatagcggagcactgacaagcggcgtgcacacctttccagccgtgctgcaaagcagcggcctgtactctctgagcagcgtggtcacagtgcctagctctagcctgggcacccagacctacatctgcaatgtgaaccacaagcctagcaacaccaaggtggacaagagagtggaacccaagagctgtatccccgaggacacattcttcccaagccccgagagcagctgcgacgtgaagctggtggaaaagagcttcgagacagacaccaacctgaacttccagaacctgagcgtgatcggcttcagaatcctgctgctgaaagtggccggctttaacctgctgatgaccctgcggctgtggtccagc

SEQ ID NO: 3249 - DNA, 2292 bp, Artificial Sequence
  Synthetic Polynucloetide
atggccttaccagtgaccgccttgctcctgccgctggccttgctgctccacgccgccaggccggaagtgcagctggttgaatctggcggaggactggttcagcctggcggatctctgagactgtcttgtgccgccagcggcttcagcttcagcgacttttggatgagctgggtccgacaggcccctggcaaaggacttgaatgggtcgccacaatcagccaggccggcagcgagaaggactacgtggactctgtgaagggcagattcaccatcagccgggacaacgccaagaagtccctgtacctccagatgaacagcctgagagccgaggacaccgccgtgtactattgtgcctctggcgtgtacagcttcgactacagaggccagggcaccctggtcacagtctcttctggtaccggcggaggcggatctggcggcggaggtagcggtggcggaggatctgaattcgacgacatccagatgacccagagccccagcagcctgtctgccagcgtgggcgacagagtgaccatcacctgtagagccagccagagcatcagcagctacctgaactggtatcagcagaagcccggcaaggcccccaaactgctgatctacgacgccagcaacctggaaaccggcgtgcccagcagattttccggcagcggctctggcaccgacttcaccttcaccatcagctccctccagcccgaggacattgccacctactactgccagcagtacgacaacctgcccctgacctttggcggaggcaccaaggtggacatcaagagactcgagggacagcctaaggccaatcctaccgtgacactgttccctccaagcagcgaagaactccaggccaacaaggccacacttgtgtgcctgatctccgacttctaccctggggctgtgacagtggcttggaaggccgatggatctcctgtgaaagccggcgtggaaaccaccaagccatccaagcagagcaacaacaaatacgccgccagctcctacctgagcctgacacctgagcagtggaagtcccacagatcctacagctgccaagtgacccacgaaggcagcaccgtggaaaagacagtggcccctacagagtgcagcggcagagccgattgcggctttaccagcgagagctaccagcagggcgtgctgagcgccaccatcctgtacgagatcctgctgggcaaggccaccctgtacgccgtgctggtgtctgccctggtgctgatggctatggtcaagcggaaggacagccggggacgcgccaagagaagcggatctggcgtgaagcagaccctgaatttcgacctgctgaagctggctggcgacgtggaatccaacccaggccctactagtatggactggatttggcgcatccttttccttgtcggcgctgctaccggcgcgcattccttcgaacaggtgcaactggtggaatctggcggcggagtggtgcagcctggcagaagcctgagactgagctgtgccgccagcggcttcacctttagcagctacgccatgcactgggtgcgccaggcccctggaaaaggcctggaatgggtggccgtgatctcctacgacggctccaacaagtattacgccgacagcgtgaagggccggttcaccatctccagagacaacagcaagaacaccctgtacctccagatgaacagcctgcgggccgaggacaccgccgtgtactattgtgccagggctcacaacagcagctcttggagcttcgactactggggccagggcaccctcgtgaccgtgtcatctacgcgtgcctctacaaagggaccctccgtgtttcctctggctcccagcagcaagtctacaagcggaggaacagccgctctgggctgcctggtcaaggattactttcccgagcctgtgaccgtgtcctggaatagcggagcactgacaagcggcgtgcacacctttccagccgtgctgcaaagcagcggcctgtactctctgagcagcgtggtcacagtgcctagctctagcctgggcacccagacctacatctgcaatgtgaaccacaagcctagcaacaccaaggtggacaagagagtggaacccaagagctgtatccccgaggacacattcttcccaagccccgagagcagctgcgacgtgaagctggtggaaaagagcttcgagacagacaccaacctgaacttccagaacctgagcgtgatcggcttcagaatcctgctgctgaaagtggccggctttaacctgctgatgaccctgcggctgtggtccagc

SEQ ID NO: 3250 - DNA, 2319 bp, Artificial Sequence
  Synthetic Polynucloetide
atggccttaccagtgaccgccttgctcctgccgctggccttgctgctccacgccgccaggccggaagtgcagctggttgaatctggcggaggactggttcagcctggcggatctctgagactgtcttgtgccgccagcggcttcagcttcagcgacttttggatgagctgggtccgacaggcccctggcaaaggacttgaatgggtcgccacaatcagccaggccggcagcgagaaggactacgtggactctgtgaagggcagattcaccatcagccgggacaacgccaagaagtccctgtacctccagatgaacagcctgagagccgaggacaccgccgtgtactattgtgcctctggcgtgtacagcttcgactacagaggccagggcaccctggtcacagtctcttctggtaccggcggaggcggatctggcggcggaggtagcggtggcggaggatctgaattcgacgacgtcgtgatgacccagagccctctgagcctgcctgtgtccctgggcgatcaggccagcatctcctgcagatccagccagagactggtgcacagcaacggcaacacctacctgcactggtatctgcagaagcccggccagagccccaagctgctgatctaccgggtgtccaacagattccccggcgtgcccgatagattcagcggctctggcagcggcaccgacttcaccctgaagatcagccgggtggaagccgaggacctgggcatctatttctgcagccagagcacccacgtgccctacacctttggcggaggcaccaagctggaaatcaagcggctcgagggacagcctaaggccaatcctaccgtgacactgttccctccaagcagcgaagaactccaggccaacaaggccacacttgtgtgcctgatctccgacttctaccctggggctgtgacagtggcttggaaggccgatggatctcctgtgaaagccggcgtggaaaccaccaagccatccaagcagagcaacaacaaatacgccgccagctcctacctgagcctgacacctgagcagtggaagtcccacagatcctacagctgccaagtgacccacgaaggcagcaccgtggaaaagacagtggcccctacagagtgcagcggcagagccgattgcggctttaccagcgagagctaccagcagggcgtgctgagcgccaccatcctgtacgagatcctgctgggcaaggccaccctgtacgccgtgctggtgtctgccctggtgctgatggctatggtcaagcggaaggacagccggggacgcgccaagagaagcggatctggcgtgaagcagaccctgaatttcgacctgctgaagctggctggcgacgtggaatccaacccaggccctactagtatggactggatttggcgcatccttttccttgtcggcgctgctaccggcgcgcattccttcgaagaagtgcggctgcagcagtctggccccgacctgattaagcctggggccagcgtgaagatgagctgcaaggccagcggctacaccttcaccggctacgtgatgcactgggtcaagcagaggccaggccagggcctggaatggatcggcttcatcaacccctacaacgacgacatccagagcaacgagcggttccggggcaaggccaccctgaccagcgataagagcagcaccaccgcctacatggaactgagcagcctgacctccgaggacagcgccgtgtactactgtgctaggggagccggctacaacttcgacggggcctacagattcttcgacttttggggccagggcaccacactgaccgtgtcctctacgcgtgcctctacaaagggaccctccgtgtttcctctggctcccagcagcaagtctacaagcggaggaacagccgctctgggctgcctggtcaaggattactttcccgagcctgtgaccgtgtcctggaatagcggagcactgacaagcggcgtgcacacctttccagccgtgctgcaaagcagcggcctgtactctctgagcagcgtggtcacagtgcctagctctagcctgggcacccagacctacatctgcaatgtgaaccacaagcctagcaacaccaaggtggacaagagagtggaacccaagagctgtatccccgaggacacattcttcccaagccccgagagcagctgcgacgtgaagctggtggaaaagagcttcgagacagacaccaacctgaacttccagaacctgagcgtgatcggcttcagaatcctgctgctgaaagtggccggctttaacctgctgatgaccctgcggctgtggtccagc

SEQ ID NO: 3251 - DNA, 2292 bp, Artificial Sequence
  Synthetic Polynucloetide
atggccttaccagtgaccgccttgctcctgccgctggccttgctgctccacgccgccaggccggaagtgcagctggttgaatctggcggaggactggttcagcctggcggatctctgagactgtcttgtgccgccagcggcttcagcttcagcgacttttggatgagctgggtccgacaggcccctggcaaaggacttgaatgggtcgccacaatcagccaggccggcagcgagaaggactacgtggactctgtgaagggcagattcaccatcagccgggacaacgccaagaagtccctgtacctccagatgaacagcctgagagccgaggacaccgccgtgtactattgtgcctctggcgtgtacagcttcgactacagaggccagggcaccctggtcacagtctcttctggtaccggcggaggcggatctggcggcggaggtagcggtggcggaggatctgaattcgacagctacgagctgacccagcctcctagcgtgtccgtgtctcctggacagaccgccaccatctcttgcagcggcgatcaactgggcgggaagtacggccactggtatcagaagaagcccggccagagccccgtgctggtgctgtaccaggacagaaaacggcctgccggcatccccgagagattcagcggaagcagcagcggcaacaccatcaccctgaccatcagcggcacccaggccgtggatgaggccgactactactgccaggcttgggacaccaatctgggcggcgtgttcggcggaggcaccaaagtgacagtgctgggacagctcgagggacagcctaaggccaatcctaccgtgacactgttccctccaagcagcgaagaactccaggccaacaaggccacacttgtgtgcctgatctccgacttctaccctggggctgtgacagtggcttggaaggccgatggatctcctgtgaaagccggcgtggaaaccaccaagccatccaagcagagcaacaacaaatacgccgccagctcctacctgagcctgacacctgagcagtggaagtcccacagatcctacagctgccaagtgacccacgaaggcagcaccgtggaaaagacagtggcccctacagagtgcagcggcagagccgattgcggctttaccagcgagagctaccagcagggcgtgctgagcgccaccatcctgtacgagatcctgctgggcaaggccaccctgtacgccgtgctggtgtctgccctggtgctgatggctatggtcaagcggaaggacagccggggacgcgccaagagaagcggatctggcgtgaagcagaccctgaatttcgacctgctgaagctggctggcgacgtggaatccaacccaggccctactagtatggactggatttggcgcatccttttccttgtcggcgctgctaccggcgcgcattccttcgaacaggtgcaactggtggaaagcggagccgaagtgaagaaacctggggccagcgtgaaggtgtcctgcaaggccagcggctacacctttaccggctactacatgcactgggtgcgccaggctccaggccagggactggaatggatgggccggatcaaccccaatagcggcggcaccaactacgcccagaaattccagggcagagtgaccatgaccagagacaccagcatcagcaccgcctacatggaactgagccggctgagaagcgacgacaccgccgtgtactactgcgccagccctagaggcagaggcagcgccttcgatatttggggccagggcacactcgtgaccgtgtcctctacgcgtgcctctacaaagggaccctccgtgtttcctctggctcccagcagcaagtctacaagcggaggaacagccgctctgggctgcctggtcaaggattactttcccgagcctgtgaccgtgtcctggaatagcggagcactgacaagcggcgtgcacacctttccagccgtgctgcaaagcagcggcctgtactctctgagcagcgtggtcacagtgcctagctctagcctgggcacccagacctacatctgcaatgtgaaccacaagcctagcaacaccaaggtggacaagagagtggaacccaagagctgtatccccgaggacacattcttcccaagccccgagagcagctgcgacgtgaagctggtggaaaagagcttcgagacagacaccaacctgaacttccagaacctgagcgtgatcggcttcagaatcctgctgctgaaagtggccggctttaacctgctgatgaccctgcggctgtggtccagc

SEQ ID NO: 3252 - DNA, 2301 bp, Artificial Sequence
  Synthetic Polynucloetide
atggccttaccagtgaccgccttgctcctgccgctggccttgctgctccacgccgccaggccggaagtgcagctggttgaatctggcggaggactggttcagcctggcggatctctgagactgtcttgtgccgccagcggcttcagcttcagcgacttttggatgagctgggtccgacaggcccctggcaaaggacttgaatgggtcgccacaatcagccaggccggcagcgagaaggactacgtggactctgtgaagggcagattcaccatcagccgggacaacgccaagaagtccctgtacctccagatgaacagcctgagagccgaggacaccgccgtgtactattgtgcctctggcgtgtacagcttcgactacagaggccagggcaccctggtcacagtctcttctggtaccggcggaggcggatctggcggcggaggtagcggtggcggaggatctgaattcgacaacttcatgctgacccagccccacagcgtgtccgagagccctggcaagaccgtgaccatctcctgcaccagaagcagcggctctatcgccagcaaatacgtgcagtggtatcagcagaggcccggcagcagccctaccaccgtgatctacgaggacaaccagaggcctagcggcgtgcccgatagattcagcggcagcatcgacaccagcagcaacagcgccagcctgaccatcagcggcctgagaacagaggacgaggccgactactactgccacagctacgacagcaacaaccactccgtgttcggcggaggcaccaaagtgacagtgctgggacagctcgagggacagcctaaggccaatcctaccgtgacactgttccctccaagcagcgaagaactccaggccaacaaggccacacttgtgtgcctgatctccgacttctaccctggggctgtgacagtggcttggaaggccgatggatctcctgtgaaagccggcgtggaaaccaccaagccatccaagcagagcaacaacaaatacgccgccagctcctacctgagcctgacacctgagcagtggaagtcccacagatcctacagctgccaagtgacccacgaaggcagcaccgtggaaaagacagtggcccctacagagtgcagcggcagagccgattgcggctttaccagcgagagctaccagcagggcgtgctgagcgccaccatcctgtacgagatcctgctgggcaaggccaccctgtacgccgtgctggtgtctgccctggtgctgatggctatggtcaagcggaaggacagccggggacgcgccaagagaagcggatctggcgtgaagcagaccctgaatttcgacctgctgaagctggctggcgacgtggaatccaacccaggccctactagtatggactggatttggcgcatccttttccttgtcggcgctgctaccggcgcgcattccttcgaagaagtgcaactggtggaaagcgggggaggcgtggtgcagccaggcggatctctgagactgagctgtgccgccagcggcttcaccttcagcagctacgccatgagctgggtgcgccaggcccctggaaaaggcctggaatgggtgtccgccatctctggctctggcggcagcacctactacgccgatagcgtgaagggccggttcagcatcagccgggacaacagcaagaacaccctgtacctccagatgaacagcctgcgggccgaggacaccgccgtgtactactgtgccagaaccagaagctccggggccttcgacatctggggccagggaacactcgtgaccgtgtcctctacgcgtgcctctacaaagggaccctccgtgtttcctctggctcccagcagcaagtctacaagcggaggaacagccgctctgggctgcctggtcaaggattactttcccgagcctgtgaccgtgtcctggaatagcggagcactgacaagcggcgtgcacacctttccagccgtgctgcaaagcagcggcctgtactctctgagcagcgtggtcacagtgcctagctctagcctgggcacccagacctacatctgcaatgtgaaccacaagcctagcaacaccaaggtggacaagagagtggaacccaagagctgtatccccgaggacacattcttcccaagccccgagagcagctgcgacgtgaagctggtggaaaagagcttcgagacagacaccaacctgaacttccagaacctgagcgtgatcggcttcagaatcctgctgctgaaagtggccggctttaacctgctgatgaccctgcggctgtggtccagc

SEQ ID NO: 3253 - DNA, 2286 bp, Artificial Sequence
  Synthetic Polynucloetide
atggccttaccagtgaccgccttgctcctgccgctggccttgctgctccacgccgccaggccggaagtgcagctggttgaatctggcggaggactggttcagcctggcggatctctgagactgtcttgtgccgccagcggcttcagcttcagcgacttttggatgagctgggtccgacaggcccctggcaaaggacttgaatgggtcgccacaatcagccaggccggcagcgagaaggactacgtggactctgtgaagggcagattcaccatcagccgggacaacgccaagaagtccctgtacctccagatgaacagcctgagagccgaggacaccgccgtgtactattgtgcctctggcgtgtacagcttcgactacagaggccagggcaccctggtcacagtctcttctggtaccggcggaggcggatctggcggcggaggtagcggtggcggaggatctgaattcgacatccagatgaaccagagccccagcagcctgagcgccagcctgggcgataccatcaccatcacctgtcacgccagccagaacatcaacgtgtggctgagctggtatcagcagaagcccggcaacatccccaagctgctgatctacaaggccagcaacctgcacaccggcgtgcccagcagattttctggcagcggctctggcaccggcttcaccattaccatcagctccctccagcccgaggacattgccacctactactgccagcagggccagagctacccctggacatttggcggaggcaccaagctggaaatcaagagactcgagggacagcctaaggccaatcctaccgtgacactgttccctccaagcagcgaagaactccaggccaacaaggccacacttgtgtgcctgatctccgacttctaccctggggctgtgacagtggcttggaaggccgatggatctcctgtgaaagccggcgtggaaaccaccaagccatccaagcagagcaacaacaaatacgccgccagctcctacctgagcctgacacctgagcagtggaagtcccacagatcctacagctgccaagtgacccacgaaggcagcaccgtggaaaagacagtggcccctacagagtgcagcggcagagccgattgcggctttaccagcgagagctaccagcagggcgtgctgagcgccaccatcctgtacgagatcctgctgggcaaggccaccctgtacgccgtgctggtgtctgccctggtgctgatggctatggtcaagcggaaggacagccggggacgcgccaagagaagcggatctggcgtgaagcagaccctgaatttcgacctgctgaagctggctggcgacgtggaatccaacccaggccctactagtatggactggatttggcgcatccttttccttgtcggcgctgctaccggcgcgcattccttcgaagaagtgcaactccagcagagcggcccagagcttgtgaagcctggcgcttccgtgaagattagctgcaaagccagcggctacagcttcaccggctacttcatgaactgggtcaagcagagccacggcaagagcctggagtacatcggcagattcaacccctacaacggcgagacactgtacaaccagaagttcaagggcaaggccaccctgaccgtggacaagagcagcagcaccgtgcacatggaactgctgagcgtgaccagcgaggacagcgccgtgtactactgtggcagaagcggcaacgacgacgctatggactattggggccagggcaccagcgtgaccgtgtctagtgctacgcgtgcctctacaaagggaccctccgtgtttcctctggctcccagcagcaagtctacaagcggaggaacagccgctctgggctgcctggtcaaggattactttcccgagcctgtgaccgtgtcctggaatagcggagcactgacaagcggcgtgcacacctttccagccgtgctgcaaagcagcggcctgtactctctgagcagcgtggtcacagtgcctagctctagcctgggcacccagacctacatctgcaatgtgaaccacaagcctagcaacaccaaggtggacaagagagtggaacccaagagctgtatccccgaggacacattcttcccaagccccgagagcagctgcgacgtgaagctggtggaaaagagcttcgagacagacaccaacctgaacttccagaacctgagcgtgatcggcttcagaatcctgctgctgaaagtggccggctttaacctgctgatgaccctgcggctgtggtccagc

SEQ ID NO: 3254 - DNA, 2289 bp, Artificial Sequence
  Synthetic Polynucloetide
atggccttaccagtgaccgccttgctcctgccgctggccttgctgctccacgccgccaggccggaagtgcagctggttgaatctggcggaggactggttcagcctggcggatctctgagactgtcttgtgccgccagcggcttcagcttcagcgacttttggatgagctgggtccgacaggcccctggcaaaggacttgaatgggtcgccacaatcagccaggccggcagcgagaaggactacgtggactctgtgaagggcagattcaccatcagccgggacaacgccaagaagtccctgtacctccagatgaacagcctgagagccgaggacaccgccgtgtactattgtgcctctggcgtgtacagcttcgactacagaggccagggcaccctggtcacagtctcttctggtaccggcggaggcggatctggcggcggaggtagcggtggcggaggatctgaattcgagatcgtgctgacacagagccctgccaccctgtctctgagccctggcgaaagagccaccctgagctgtagagccagccagagcgtgcggagctacctggcctggtatcagcagaagcctggacaggcccccagactgctgatctacgacgccagcaatcgggccacaggcatccccgccagattttctggctctggcagcggcaccgacttcaccctgacaatcagcagcctggaacccgaggacttcgccgtgtactactgccagcagcggagcaactggccccctacctttggacagggcaccaaggtggaaatcaagctcgagggacagcctaaggccaatcctaccgtgacactgttccctccaagcagcgaagaactccaggccaacaaggccacacttgtgtgcctgatctccgacttctaccctggggctgtgacagtggcttggaaggccgatggatctcctgtgaaagccggcgtggaaaccaccaagccatccaagcagagcaacaacaaatacgccgccagctcctacctgagcctgacacctgagcagtggaagtcccacagatcctacagctgccaagtgacccacgaaggcagcaccgtggaaaagacagtggcccctacagagtgcagcggcagagccgattgcggctttaccagcgagagctaccagcagggcgtgctgagcgccaccatcctgtacgagatcctgctgggcaaggccaccctgtacgccgtgctggtgtctgccctggtgctgatggctatggtcaagcggaaggacagccggggacgcgccaagagaagcggatctggcgtgaagcagaccctgaatttcgacctgctgaagctggctggcgacgtggaatccaacccaggccctactagtatggactggatttggcgcatccttttccttgtcggcgctgctaccggcgcgcattccttcgaacaactccaggtgcaggaatctggccccggactcgtgaagcccagcgagacactgagcctgacctgtaccgtgtccggcggcagcatcagcaacagctacttctcctggggctggatcagacagccccctggcaagggcctggaatggatcggcagcttctactacggcgagaaaacctactacaaccccagcctgaagtccagagccaccatcagcatcgacaccagcaagagccagttctccctgaagctgagcagcgtgacagccgccgacaccgccgtgtattattgccccagaggccccaccatgatccggggcgtgatcgactcttggggccagggaacactcgtgaccgtgtcctctacgcgtgcctctacaaagggaccctccgtgtttcctctggctcccagcagcaagtctacaagcggaggaacagccgctctgggctgcctggtcaaggattactttcccgagcctgtgaccgtgtcctggaatagcggagcactgacaagcggcgtgcacacctttccagccgtgctgcaaagcagcggcctgtactctctgagcagcgtggtcacagtgcctagctctagcctgggcacccagacctacatctgcaatgtgaaccacaagcctagcaacaccaaggtggacaagagagtggaacccaagagctgtatccccgaggacacattcttcccaagccccgagagcagctgcgacgtgaagctggtggaaaagagcttcgagacagacaccaacctgaacttccagaacctgagcgtgatcggcttcagaatcctgctgctgaaagtggccggctttaacctgctgatgaccctgcggctgtggtccagc

SEQ ID NO: 3255 - DNA, 2316 bp, Artificial Sequence
  Synthetic Polynucloetide
atggccttaccagtgaccgccttgctcctgccgctggccttgctgctccacgccgccaggccggaagtgcagctggttgaatctggcggaggactggttcagcctggcggatctctgagactgtcttgtgccgccagcggcttcagcttcagcgacttttggatgagctgggtccgacaggcccctggcaaaggacttgaatgggtcgccacaatcagccaggccggcagcgagaaggactacgtggactctgtgaagggcagattcaccatcagccgggacaacgccaagaagtccctgtacctccagatgaacagcctgagagccgaggacaccgccgtgtactattgtgcctctggcgtgtacagcttcgactacagaggccagggcaccctggtcacagtctcttctggtaccggcggaggcggatctggcggcggaggtagcggtggcggaggatctgaattcgacatcgtgatgacccagacccccctgagcctgcctgtgacacctggcgagcctgccagcatctcctgcagaagcagcagaagcctgctggacagcgacgacggcaacacctacctggactggtatctgcagaaacccggccagagcccccaactgctgatctacaccctgagctacagagccagcggcgtgcccgatagattttccggctctggcagcggcaccgacttcaccctgaagatcagccgggtggaagccgaggacgtgggcgtgtactactgtatgcagcgggtggaatttcccatcaccttcggccagggcaccagactggaaatcaagagactcgagggacagcctaaggccaatcctaccgtgacactgttccctccaagcagcgaagaactccaggccaacaaggccacacttgtgtgcctgatctccgacttctaccctggggctgtgacagtggcttggaaggccgatggatctcctgtgaaagccggcgtggaaaccaccaagccatccaagcagagcaacaacaaatacgccgccagctcctacctgagcctgacacctgagcagtggaagtcccacagatcctacagctgccaagtgacccacgaaggcagcaccgtggaaaagacagtggcccctacagagtgcagcggcagagccgattgcggctttaccagcgagagctaccagcagggcgtgctgagcgccaccatcctgtacgagatcctgctgggcaaggccaccctgtacgccgtgctggtgtctgccctggtgctgatggctatggtcaagcggaaggacagccggggacgcgccaagagaagcggatctggcgtgaagcagaccctgaatttcgacctgctgaagctggctggcgacgtggaatccaacccaggccctactagtatggactggatttggcgcatccttttccttgtcggcgctgctaccggcgcgcattccttcgaacaggtgcaactggtggaatctggcgggggagtggtgcagcctggcagatccctgagactgagctgtgccgccagcggcttcatcttcagcagatacggaatgcactgggtgcgccaggcccctggcaagggactgaaatgggtggccgtgatttggtacgacggcagcaacaagctgtacgccgacagcgtgaagggccggttcaccatcagcagagacaacagcaagaacaccctgtacctgcagatgaacagcctgcgggccgaggacaccgccgtgtactattgcgccagagactactacgacaacagccggcaccactggggcttcgactattggggccagggaacccttgtgaccgtgtcctctacgcgtgcctctacaaagggaccctccgtgtttcctctggctcccagcagcaagtctacaagcggaggaacagccgctctgggctgcctggtcaaggattactttcccgagcctgtgaccgtgtcctggaatagcggagcactgacaagcggcgtgcacacctttccagccgtgctgcaaagcagcggcctgtactctctgagcagcgtggtcacagtgcctagctctagcctgggcacccagacctacatctgcaatgtgaaccacaagcctagcaacaccaaggtggacaagagagtggaacccaagagctgtatccccgaggacacattcttcccaagccccgagagcagctgcgacgtgaagctggtggaaaagagcttcgagacagacaccaacctgaacttccagaacctgagcgtgatcggcttcagaatcctgctgctgaaagtggccggctttaacctgctgatgaccctgcggctgtggtccagc

SEQ ID NO: 3256 - DNA, 2286 bp, Artificial Sequence
  Synthetic Polynucloetide
atggccttaccagtgaccgccttgctcctgccgctggccttgctgctccacgccgccaggccggaagtgcagctggttgaatctggcggaggactggttcagcctggcggatctctgagactgtcttgtgccgccagcggcttcagcttcagcgacttttggatgagctgggtccgacaggcccctggcaaaggacttgaatgggtcgccacaatcagccaggccggcagcgagaaggactacgtggactctgtgaagggcagattcaccatcagccgggacaacgccaagaagtccctgtacctccagatgaacagcctgagagccgaggacaccgccgtgtactattgtgcctctggcgtgtacagcttcgactacagaggccagggcaccctggtcacagtctcttctggtaccggcggaggcggatctggcggcggaggtagcggtggcggaggatctgaattcgagatccagatgacccagagccccagcagcatgtctgccagcctgggcgacaccatcaccatcacatgccaggccacccaggacatcttcaagaacctgaactggtatcagcagaagcccggcaagccccccagcctgctgatctactatgccaccgaactggccgagggcgtgcccagcagattttctggcagcggcagcggctccgactacagcctgaccatcagcaacctggaaagcgaggacttcgccgcctactactgcctccagttcttcgagttcccattcaccttcggctccggcaccaagctggaaatgaagctcgagggacagcctaaggccaatcctaccgtgacactgttccctccaagcagcgaagaactccaggccaacaaggccacacttgtgtgcctgatctccgacttctaccctggggctgtgacagtggcttggaaggccgatggatctcctgtgaaagccggcgtggaaaccaccaagccatccaagcagagcaacaacaaatacgccgccagctcctacctgagcctgacacctgagcagtggaagtcccacagatcctacagctgccaagtgacccacgaaggcagcaccgtggaaaagacagtggcccctacagagtgcagcggcagagccgattgcggctttaccagcgagagctaccagcagggcgtgctgagcgccaccatcctgtacgagatcctgctgggcaaggccaccctgtacgccgtgctggtgtctgccctggtgctgatggctatggtcaagcggaaggacagccggggacgcgccaagagaagcggatctggcgtgaagcagaccctgaatttcgacctgctgaagctggctggcgacgtggaatccaacccaggccctactagtatggactggatttggcgcatccttttccttgtcggcgctgctaccggcgcgcattccttcgaacaggtgcaactccagcagtctggcgctgagcttgtgcggcctggcacctctgtgaaggtgtcctgtaaagccagcggctacgtgttcaccaactactggatcgagtggatcaagcagcggccaggccagggcctggaatggatcggcgtgatgaatccaggcagcggcgagacaacctacaacgagaagttcaagggcaaggccaccctgaccgccgacaagagcagcagcacagcctacatgcaactgtcctccctgaccagcgtggacagcgccgtgtacttctgcgccagggaccacgaccgggactactacgctatggactactggggccagggcaccagcgtgaccgtgtcatctacgcgtgcctctacaaagggaccctccgtgtttcctctggctcccagcagcaagtctacaagcggaggaacagccgctctgggctgcctggtcaaggattactttcccgagcctgtgaccgtgtcctggaatagcggagcactgacaagcggcgtgcacacctttccagccgtgctgcaaagcagcggcctgtactctctgagcagcgtggtcacagtgcctagctctagcctgggcacccagacctacatctgcaatgtgaaccacaagcctagcaacaccaaggtggacaagagagtggaacccaagagctgtatccccgaggacacattcttcccaagccccgagagcagctgcgacgtgaagctggtggaaaagagcttcgagacagacaccaacctgaacttccagaacctgagcgtgatcggcttcagaatcctgctgctgaaagtggccggctttaacctgctgatgaccctgcggctgtggtccagc

SEQ ID NO: 3257 - DNA, 2277 bp, Artificial Sequence
  Synthetic Polynucloetide
atggccttaccagtgaccgccttgctcctgccgctggccttgctgctccacgccgccaggccggaagtgcagctggttgaatctggcggaggactggttcagcctggcggatctctgagactgtcttgtgccgccagcggcttcagcttcagcgacttttggatgagctgggtccgacaggcccctggcaaaggacttgaatgggtcgccacaatcagccaggccggcagcgagaaggactacgtggactctgtgaagggcagattcaccatcagccgggacaacgccaagaagtccctgtacctccagatgaacagcctgagagccgaggacaccgccgtgtactattgtgcctctggcgtgtacagcttcgactacagaggccagggcaccctggtcacagtctcttctggtaccggcggaggcggatctggcggcggaggtagcggtggcggaggatctgaattcgacatcctgctgacacagagccccgccatcctgtccgtgtctccaggcgagagagtgtcctttagctgccgggccagccagaacatcggcaccagcatccactggtatcagcagcggaccaacggcagccccagactgctgattaagtacgccagcgagtccgtgtccggcatccccagcagattttctggcagcggctccggcaccgacttcaccctgagcatcaacagcgtggaaagcgaggacattgccgactactactgccagcacaccaatagctggcccaccacctttggcggaggcaccaagctggaaatcaagagactcgagggacagcctaaggccaatcctaccgtgacactgttccctccaagcagcgaagaactccaggccaacaaggccacacttgtgtgcctgatctccgacttctaccctggggctgtgacagtggcttggaaggccgatggatctcctgtgaaagccggcgtggaaaccaccaagccatccaagcagagcaacaacaaatacgccgccagctcctacctgagcctgacacctgagcagtggaagtcccacagatcctacagctgccaagtgacccacgaaggcagcaccgtggaaaagacagtggcccctacagagtgcagcggcagagccgattgcggctttaccagcgagagctaccagcagggcgtgctgagcgccaccatcctgtacgagatcctgctgggcaaggccaccctgtacgccgtgctggtgtctgccctggtgctgatggctatggtcaagcggaaggacagccggggacgcgccaagagaagcggatctggcgtgaagcagaccctgaatttcgacctgctgaagctggctggcgacgtggaatccaacccaggccctactagtatggactggatttggcgcatccttttccttgtcggcgctgctaccggcgcgcattccttcgaacaggtgcaactccagcagtccgacgccgagcttgtgaagcctggcgcttccgtgaagattagctgcaaggccagcggctacaccttcaccgaccacgccattcactgggtcaagcagaagcccgagcagggcctggaatggatcggctacttcagccccggcaacggcgacatcaagtacaacgagaagttcaagggcaaggccaccctgaccgccgacaagagcagcagcacagcctacatgcaactgaacagcctgaccagcgaggactccgccgtgtacttctgcaagcggagctacggcaactacgactactggggccagggcaccacactgaccgtgtctagtacgcgtgcctctacaaagggaccctccgtgtttcctctggctcccagcagcaagtctacaagcggaggaacagccgctctgggctgcctggtcaaggattactttcccgagcctgtgaccgtgtcctggaatagcggagcactgacaagcggcgtgcacacctttccagccgtgctgcaaagcagcggcctgtactctctgagcagcgtggtcacagtgcctagctctagcctgggcacccagacctacatctgcaatgtgaaccacaagcctagcaacaccaaggtggacaagagagtggaacccaagagctgtatccccgaggacacattcttcccaagccccgagagcagctgcgacgtgaagctggtggaaaagagcttcgagacagacaccaacctgaacttccagaacctgagcgtgatcggcttcagaatcctgctgctgaaagtggccggctttaacctgctgatgaccctgcggctgtggtccagc

SEQ ID NO: 3258 - DNA, 2292 bp, Artificial Sequence
  Synthetic Polynucloetide
atggccttaccagtgaccgccttgctcctgccgctggccttgctgctccacgccgccaggccggaagtgcagctggttgaatctggcggaggactggttcagcctggcggatctctgagactgtcttgtgccgccagcggcttcagcttcagcgacttttggatgagctgggtccgacaggcccctggcaaaggacttgaatgggtcgccacaatcagccaggccggcagcgagaaggactacgtggactctgtgaagggcagattcaccatcagccgggacaacgccaagaagtccctgtacctccagatgaacagcctgagagccgaggacaccgccgtgtactattgtgcctctggcgtgtacagcttcgactacagaggccagggcaccctggtcacagtctcttctggtaccggcggaggcggatctggcggcggaggtagcggtggcggaggatctgaattcgacatcgtgatgacccagagccccgatagcctggccgtgtctctgggagagagagccaccatcaactgcaagagcagccagagcctgctgaacagcggcgaccagaagaactacctgacctggtatcagcagaagcccggccagccccccaagctgctgatctactgggccagcaccagagaaagcggcgtgcccgatagattcagcggcagcggaagtggcaccgacttcaccctgaccatcagttctcttcaggccgaggacgtggccgtgtactactgccagaacgactacagctaccccctgaccttcggccagggcaccaaggtggaaatcaagctcgagggacagcctaaggccaatcctaccgtgacactgttccctccaagcagcgaagaactccaggccaacaaggccacacttgtgtgcctgatctccgacttctaccctggggctgtgacagtggcttggaaggccgatggatctcctgtgaaagccggcgtggaaaccaccaagccatccaagcagagcaacaacaaatacgccgccagctcctacctgagcctgacacctgagcagtggaagtcccacagatcctacagctgccaagtgacccacgaaggcagcaccgtggaaaagacagtggcccctacagagtgcagcggcagagccgattgcggctttaccagcgagagctaccagcagggcgtgctgagcgccaccatcctgtacgagatcctgctgggcaaggccaccctgtacgccgtgctggtgtctgccctggtgctgatggctatggtcaagcggaaggacagccggggacgcgccaagagaagcggatctggcgtgaagcagaccctgaatttcgacctgctgaagctggctggcgacgtggaatccaacccaggccctactagtatggactggatttggcgcatccttttccttgtcggcgctgctaccggcgcgcattccttcgaacaggtgcagctggtgcagtctggggccgaagtgaagaaaaccggcagcagcgtgaaggtgtcctgcaaggccagcggctacacctttaccgaccacgccattcacgtgtggcggcaggctccaggacaggccctggaatggatgggccacttcagccccggcaacaccgacatcaagtacaacgacaagttcaagggcagagtgaccctgaccgtggaccgcagcatgagcaccgcctacatggaactgagcagcctgcggagcgaggacaccgccatgtactattgcaagaccagcaccttctttttcgactactggggccagggaacaatggtcaccgtgtccagcacgcgtgcctctacaaagggaccctccgtgtttcctctggctcccagcagcaagtctacaagcggaggaacagccgctctgggctgcctggtcaaggattactttcccgagcctgtgaccgtgtcctggaatagcggagcactgacaagcggcgtgcacacctttccagccgtgctgcaaagcagcggcctgtactctctgagcagcgtggtcacagtgcctagctctagcctgggcacccagacctacatctgcaatgtgaaccacaagcctagcaacaccaaggtggacaagagagtggaacccaagagctgtatccccgaggacacattcttcccaagccccgagagcagctgcgacgtgaagctggtggaaaagagcttcgagacagacaccaacctgaacttccagaacctgagcgtgatcggcttcagaatcctgctgctgaaagtggccggctttaacctgctgatgaccctgcggctgtggtccagc

SEQ ID NO: 3259 - DNA, 2289 bp, Artificial Sequence
  Synthetic Polynucloetide
atggccttaccagtgaccgccttgctcctgccgctggccttgctgctccacgccgccaggccggaagtgcagctggttgaatctggcggaggactggttcagcctggcggatctctgagactgtcttgtgccgccagcggcttcagcttcagcgacttttggatgagctgggtccgacaggcccctggcaaaggacttgaatgggtcgccacaatcagccaggccggcagcgagaaggactacgtggactctgtgaagggcagattcaccatcagccgggacaacgccaagaagtccctgtacctccagatgaacagcctgagagccgaggacaccgccgtgtactattgtgcctctggcgtgtacagcttcgactacagaggccagggcaccctggtcacagtctcttctggtaccggcggaggcggatctggcggcggaggtagcggtggcggaggatctgaattcgacatccagatgacccagagccccagcagcctgtctgccagcgtgggcgacagagtgaccatcacatgcaaggccagccaggacgtgtccattgccgtggcctggtatcagcagaagcccggcaaggcccccaaggtgctgatctacagcgccagctacagatacaccggcgtgcccgacagattcagcggctctggcagcggcaccgacttcaccttcaccatcagctccctccagcccgaggatattgccgtgtactactgccagcagcactacatcacccccctgacctttggcggaggcaccaaggtggaaatcaagctcgagggacagcctaaggccaatcctaccgtgacactgttccctccaagcagcgaagaactccaggccaacaaggccacacttgtgtgcctgatctccgacttctaccctggggctgtgacagtggcttggaaggccgatggatctcctgtgaaagccggcgtggaaaccaccaagccatccaagcagagcaacaacaaatacgccgccagctcctacctgagcctgacacctgagcagtggaagtcccacagatcctacagctgccaagtgacccacgaaggcagcaccgtggaaaagacagtggcccctacagagtgcagcggcagagccgattgcggctttaccagcgagagctaccagcagggcgtgctgagcgccaccatcctgtacgagatcctgctgggcaaggccaccctgtacgccgtgctggtgtctgccctggtgctgatggctatggtcaagcggaaggacagccggggacgcgccaagagaagcggatctggcgtgaagcagaccctgaatttcgacctgctgaagctggctggcgacgtggaatccaacccaggccctactagtatggactggatttggcgcatccttttccttgtcggcgctgctaccggcgcgcattccttcgaacagatccaactggtgcagagcggccacgaagtgaagaaacctggggccagcgtgaaggtgtcctgcaaagccagcggctacacctttaccaactacggcatgaactgggtgcgccaggcccctggacagggcctggaatggatgggctggatcaacaccaagaccggcgagcccacctacgccgaagagttcaagggcagattcgtgttcagcctggaaaccagcgcctccaccgcctacctccagatcagctctctgaaggccgaggacaccgccatgtacttttgcggcagaggcggctacggcagcagctactggtacttcgatgtgtggggccagggcaccaccgtgaccgtgtcatctacgcgtgcctctacaaagggaccctccgtgtttcctctggctcccagcagcaagtctacaagcggaggaacagccgctctgggctgcctggtcaaggattactttcccgagcctgtgaccgtgtcctggaatagcggagcactgacaagcggcgtgcacacctttccagccgtgctgcaaagcagcggcctgtactctctgagcagcgtggtcacagtgcctagctctagcctgggcacccagacctacatctgcaatgtgaaccacaagcctagcaacaccaaggtggacaagagagtggaacccaagagctgtatccccgaggacacattcttcccaagccccgagagcagctgcgacgtgaagctggtggaaaagagcttcgagacagacaccaacctgaacttccagaacctgagcgtgatcggcttcagaatcctgctgctgaaagtggccggctttaacctgctgatgaccctgcggctgtggtccagc

SEQ ID NO: 3260 - DNA, 2295 bp, Artificial Sequence
  Synthetic Polynucloetide
atggccttaccagtgaccgccttgctcctgccgctggccttgctgctccacgccgccaggccggaagtgcagctggttgaatctggcggaggactggttcagcctggcggatctctgagactgtcttgtgccgccagcggcttcagcttcagcgacttttggatgagctgggtccgacaggcccctggcaaaggacttgaatgggtcgccacaatcagccaggccggcagcgagaaggactacgtggactctgtgaagggcagattcaccatcagccgggacaacgccaagaagtccctgtacctccagatgaacagcctgagagccgaggacaccgccgtgtactattgtgcctctggcgtgtacagcttcgactacagaggccagggcaccctggtcacagtctcttctggtaccggcggaggcggatctggcggcggaggtagcggtggcggaggatctgaattcgacatcgtgatgacccagagccccgatagcctggccgtgtctctgggagagagagccaccatcaactgccgggccagcaagagcgtgtccaccagcggctacagctacatgcactggtatcagcagaagcccggccagccccccaagctgctgatctacctggcctccaacctggaaagcggcgtgcccgatagattcagcggcagcggctctggcaccgacttcaccctgaccatcagttctcttcaggccgaggacgtggccgtgtactactgccagcacagcagagagctgccctacaccttcggccagggcaccaagctggaaatcaagctcgagggacagcctaaggccaatcctaccgtgacactgttccctccaagcagcgaagaactccaggccaacaaggccacacttgtgtgcctgatctccgacttctaccctggggctgtgacagtggcttggaaggccgatggatctcctgtgaaagccggcgtggaaaccaccaagccatccaagcagagcaacaacaaatacgccgccagctcctacctgagcctgacacctgagcagtggaagtcccacagatcctacagctgccaagtgacccacgaaggcagcaccgtggaaaagacagtggcccctacagagtgcagcggcagagccgattgcggctttaccagcgagagctaccagcagggcgtgctgagcgccaccatcctgtacgagatcctgctgggcaaggccaccctgtacgccgtgctggtgtctgccctggtgctgatggctatggtcaagcggaaggacagccggggacgcgccaagagaagcggatctggcgtgaagcagaccctgaatttcgacctgctgaagctggctggcgacgtggaatccaacccaggccctactagtatggactggatttggcgcatccttttccttgtcggcgctgctaccggcgcgcattccttcgaacaggtgcaactccaggaatctggccctggccttgtgaagcccagcgagacactgagcctgacctgtaccgtgtccggcggcagcatcagctcttacggcgtgcactggattcggcagcctccaggcaagggcctggaatggatcggcgtgatctggacctccggcgtgaccgactacaacagcgccctgatgggcagagtgaccatctccgtggacaccagcaagaaccagttcagcctgaagctgagcagcgtgacagccgccgataccgccgtgtattattgcgccagagatggcgactacgaccgctacacaatggactactggggccagggaacccttgtgaccgtgtcctctacgcgtgcctctacaaagggaccctccgtgtttcctctggctcccagcagcaagtctacaagcggaggaacagccgctctgggctgcctggtcaaggattactttcccgagcctgtgaccgtgtcctggaatagcggagcactgacaagcggcgtgcacacctttccagccgtgctgcaaagcagcggcctgtactctctgagcagcgtggtcacagtgcctagctctagcctgggcacccagacctacatctgcaatgtgaaccacaagcctagcaacaccaaggtggacaagagagtggaacccaagagctgtatccccgaggacacattcttcccaagccccgagagcagctgcgacgtgaagctggtggaaaagagcttcgagacagacaccaacctgaacttccagaacctgagcgtgatcggcttcagaatcctgctgctgaaagtggccggctttaacctgctgatgaccctgcggctgtggtccagc

SEQ ID NO: 3261 - DNA, 2295 bp, Artificial Sequence
  Synthetic Polynucloetide
atggccttaccagtgaccgccttgctcctgccgctggccttgctgctccacgccgccaggccggaagtgcagctggttgaatctggcggaggactggttcagcctggcggatctctgagactgtcttgtgccgccagcggcttcagcttcagcgacttttggatgagctgggtccgacaggcccctggcaaaggacttgaatgggtcgccacaatcagccaggccggcagcgagaaggactacgtggactctgtgaagggcagattcaccatcagccgggacaacgccaagaagtccctgtacctccagatgaacagcctgagagccgaggacaccgccgtgtactattgtgcctctggcgtgtacagcttcgactacagaggccagggcaccctggtcacagtctcttctggtaccggcggaggcggatctggcggcggaggtagcggtggcggaggatctgaattcgacatccagatgacccagagccccagcagcctgtctgccagcgtgggcgacagagtgaccatcacctgtagagccagccagagcatcggcaccagcctgcactggtatcagcagaagcctggcaaggcccccaagctgctgattaagttcgccagcagactgcagagcggcgtgcccagcagattttctggcagcggctccggcaccgacttcaccctgacaatcagctccctgcagcccgaggacttcgccacctactactgccagcagagccccggcttccctccaacctttggacagggcaccaagctggaaatcaagcggctcgagggacagcctaaggccaatcctaccgtgacactgttccctccaagcagcgaagaactccaggccaacaaggccacacttgtgtgcctgatctccgacttctaccctggggctgtgacagtggcttggaaggccgatggatctcctgtgaaagccggcgtggaaaccaccaagccatccaagcagagcaacaacaaatacgccgccagctcctacctgagcctgacacctgagcagtggaagtcccacagatcctacagctgccaagtgacccacgaaggcagcaccgtggaaaagacagtggcccctacagagtgcagcggcagagccgattgcggctttaccagcgagagctaccagcagggcgtgctgagcgccaccatcctgtacgagatcctgctgggcaaggccaccctgtacgccgtgctggtgtctgccctggtgctgatggctatggtcaagcggaaggacagccggggacgcgccaagagaagcggatctggcgtgaagcagaccctgaatttcgacctgctgaagctggctggcgacgtggaatccaacccaggccctactagtatggactggatttggcgcatccttttccttgtcggcgctgctaccggcgcgcattccttcgaacaggtgcaactggtggaatctggcggcggacttgtgaagccaggcggcagcctgagactgagctgtgccgccagcggcttcagcatcaccaccagcggctactactggacctggatcagacagttccccggcaagggcctggaatggatgggctacatcggctacaacagcaagacctactacaaccccgccctgaagtcccggatcaccatcagcagagacaacgccaagaacagcctgtacctgcagatgaactccctgagagccgaggataccgccgtgtactactgcgccagatccctgtacggcggctacaaggacgccttcgatagctggggccagggaacccttgtgaccgtgtctagcacgcgtgcctctacaaagggaccctccgtgtttcctctggctcccagcagcaagtctacaagcggaggaacagccgctctgggctgcctggtcaaggattactttcccgagcctgtgaccgtgtcctggaatagcggagcactgacaagcggcgtgcacacctttccagccgtgctgcaaagcagcggcctgtactctctgagcagcgtggtcacagtgcctagctctagcctgggcacccagacctacatctgcaatgtgaaccacaagcctagcaacaccaaggtggacaagagagtggaacccaagagctgtatccccgaggacacattcttcccaagccccgagagcagctgcgacgtgaagctggtggaaaagagcttcgagacagacaccaacctgaacttccagaacctgagcgtgatcggcttcagaatcctgctgctgaaagtggccggctttaacctgctgatgaccctgcggctgtggtccagc

SEQ ID NO: 3262 - DNA, 2310 bp, Artificial Sequence
  Synthetic Polynucloetide
atggccttaccagtgaccgccttgctcctgccgctggccttgctgctccacgccgccaggccggaagtgcagctggttgaatctggcggaggactggttcagcctggcggatctctgagactgtcttgtgccgccagcggcttcagcttcagcgacttttggatgagctgggtccgacaggcccctggcaaaggacttgaatgggtcgccacaatcagccaggccggcagcgagaaggactacgtggactctgtgaagggcagattcaccatcagccgggacaacgccaagaagtccctgtacctccagatgaacagcctgagagccgaggacaccgccgtgtactattgtgcctctggcgtgtacagcttcgactacagaggccagggcaccctggtcacagtctcttctggtaccggcggaggcggatctggcggcggaggtagcggtggcggaggatctgaattcgacgagatcgtgctgacccagagccctctgagcctgcctgtgacacctggcgagcctgccagcatctcctgtagaagcagccagagcctgctgcacagcatcggctacaactacctggactggtatctccagaagcccggccagagcccccaactgctgatctacctgggcagcaacagagccagcggcgtgcccgatagattttccggcagcggctccggcaccgacttcaccctgaagatcagccgggtggaagccgaggacgtgggcgtgtactactgtatgcaggccctccagacccccctgacctttggcggaggcaccaaggtggaaatcaagcggctcgagggacagcctaaggccaatcctaccgtgacactgttccctccaagcagcgaagaactccaggccaacaaggccacacttgtgtgcctgatctccgacttctaccctggggctgtgacagtggcttggaaggccgatggatctcctgtgaaagccggcgtggaaaccaccaagccatccaagcagagcaacaacaaatacgccgccagctcctacctgagcctgacacctgagcagtggaagtcccacagatcctacagctgccaagtgacccacgaaggcagcaccgtggaaaagacagtggcccctacagagtgcagcggcagagccgattgcggctttaccagcgagagctaccagcagggcgtgctgagcgccaccatcctgtacgagatcctgctgggcaaggccaccctgtacgccgtgctggtgtctgccctggtgctgatggctatggtcaagcggaaggacagccggggacgcgccaagagaagcggatctggcgtgaagcagaccctgaatttcgacctgctgaagctggctggcgacgtggaatccaacccaggccctactagtatggactggatttggcgcatccttttccttgtcggcgctgctaccggcgcgcattccttcgaagaagtgcaactggtggaaagcggaggcggcgtggtgcagcctggaagaagcctgagactgagctgtgccgccagcggcttcaccttccggtcctacggaatgcactgggtgcgccaggcccctggcaaaggactggaatgggtggccgtgatctcctacgacggctccaacaagtactacaccgacagcgtgaacggcagattcaccatcagcagagacaacagcaagaacaccctgtacctccagatgaacagcctgcgggccgaggacaccgccgtgtactattgtgctagaggcggaggctactacgagacaagcggccctgattactggggccagggcacactcgtgaccgtgtctagtacgcgtgcctctacaaagggaccctccgtgtttcctctggctcccagcagcaagtctacaagcggaggaacagccgctctgggctgcctggtcaaggattactttcccgagcctgtgaccgtgtcctggaatagcggagcactgacaagcggcgtgcacacctttccagccgtgctgcaaagcagcggcctgtactctctgagcagcgtggtcacagtgcctagctctagcctgggcacccagacctacatctgcaatgtgaaccacaagcctagcaacaccaaggtggacaagagagtggaacccaagagctgtatccccgaggacacattcttcccaagccccgagagcagctgcgacgtgaagctggtggaaaagagcttcgagacagacaccaacctgaacttccagaacctgagcgtgatcggcttcagaatcctgctgctgaaagtggccggctttaacctgctgatgaccctgcggctgtggtccagc

SEQ ID NO: 3263 - DNA, 2304 bp, Artificial Sequence
  Synthetic Polynucloetide
atggccttaccagtgaccgccttgctcctgccgctggccttgctgctccacgccgccaggccggaagtgcagctggttgaatctggcggaggactggttcagcctggcggatctctgagactgtcttgtgccgccagcggcttcagcttcagcgacttttggatgagctgggtccgacaggcccctggcaaaggacttgaatgggtcgccacaatcagccaggccggcagcgagaaggactacgtggactctgtgaagggcagattcaccatcagccgggacaacgccaagaagtccctgtacctccagatgaacagcctgagagccgaggacaccgccgtgtactattgtgcctctggcgtgtacagcttcgactacagaggccagggcaccctggtcacagtctcttctggtaccggcggaggcggatctggcggcggaggtagcggtggcggaggatctgaattcgacgacgtcgtgatgacccagagccctctgagcctgcctgtgacacctggcgagcctgccagcatctcctgtagaagcagccagagcctgctgcacagcatcggctacaactacctgcactggtttctccagaagcccggccagagcccccaactgctgatctacctgggcagcaacagagccagcggcgtgcccgatagattttccggcagcggctccggcaccgacttcaccctgaagatcagccgggtggaagccgaggacgtgggcgtgtactactgtatgcaggccctccagacccctcccacctttggacagggcaccagactggaaatcaagcggctcgagggacagcctaaggccaatcctaccgtgacactgttccctccaagcagcgaagaactccaggccaacaaggccacacttgtgtgcctgatctccgacttctaccctggggctgtgacagtggcttggaaggccgatggatctcctgtgaaagccggcgtggaaaccaccaagccatccaagcagagcaacaacaaatacgccgccagctcctacctgagcctgacacctgagcagtggaagtcccacagatcctacagctgccaagtgacccacgaaggcagcaccgtggaaaagacagtggcccctacagagtgcagcggcagagccgattgcggctttaccagcgagagctaccagcagggcgtgctgagcgccaccatcctgtacgagatcctgctgggcaaggccaccctgtacgccgtgctggtgtctgccctggtgctgatggctatggtcaagcggaaggacagccggggacgcgccaagagaagcggatctggcgtgaagcagaccctgaatttcgacctgctgaagctggctggcgacgtggaatccaacccaggccctactagtatggactggatttggcgcatccttttccttgtcggcgctgctaccggcgcgcattccttcgaacaactccaactccaggaaagcggccctggcctcgtgaagcctagcggcacactgagcctgacatgtgccgtgtctggcggcagcatcagcagcagcaactggtggtcttgggtgcgccagcctcctggcaagggcctggaatggatcggcgaaatctaccacagcggcagcaccaactacaaccccagcctgaagtccagagtgaccatcagcgtggacaagagcaagaaccagttctccctgaagctgagcagcgtgacagccgccgataccgccgtgtactattgcgtgggcagcccctacggcgactacgtgctggattattggggccagggcaccctcgtgaccgtgtctagtacgcgtgcctctacaaagggaccctccgtgtttcctctggctcccagcagcaagtctacaagcggaggaacagccgctctgggctgcctggtcaaggattactttcccgagcctgtgaccgtgtcctggaatagcggagcactgacaagcggcgtgcacacctttccagccgtgctgcaaagcagcggcctgtactctctgagcagcgtggtcacagtgcctagctctagcctgggcacccagacctacatctgcaatgtgaaccacaagcctagcaacaccaaggtggacaagagagtggaacccaagagctgtatccccgaggacacattcttcccaagccccgagagcagctgcgacgtgaagctggtggaaaagagcttcgagacagacaccaacctgaacttccagaacctgagcgtgatcggcttcagaatcctgctgctgaaagtggccggctttaacctgctgatgaccctgcggctgtggtccagc

SEQ ID NO: 3264 - DNA, 2298 bp, Artificial Sequence
  Synthetic Polynucloetide
atggccttaccagtgaccgccttgctcctgccgctggccttgctgctccacgccgccaggccggaagtgcagctggttgaatctggcggaggactggttcagcctggcggatctctgagactgtcttgtgccgccagcggcttcagcttcagcgacttttggatgagctgggtccgacaggcccctggcaaaggacttgaatgggtcgccacaatcagccaggccggcagcgagaaggactacgtggactctgtgaagggcagattcaccatcagccgggacaacgccaagaagtccctgtacctccagatgaacagcctgagagccgaggacaccgccgtgtactattgtgcctctggcgtgtacagcttcgactacagaggccagggcaccctggtcacagtctcttctggtaccggcggaggcggatctggcggcggaggtagcggtggcggaggatctgaattcgacgagatcgtgctgacacagagccctggcaccctgagcctgtctctgggagagagagccacactgagctgtcgggccagccagtctatcagcagcagcttcctggcctggtatcagcagaagcccggccaggcccctaagctgctgatctacgccgccagcacaagagccaccggcatccccgatagattcagcggctctggcagcggcaccgacttcaccctgaccatcagcagactggaacccgaggacttcgccgtgtactactgccagcagtacggcagaagcctgagcttcggcggaggcaccaaggtggaagtgaagctcgagggacagcctaaggccaatcctaccgtgacactgttccctccaagcagcgaagaactccaggccaacaaggccacacttgtgtgcctgatctccgacttctaccctggggctgtgacagtggcttggaaggccgatggatctcctgtgaaagccggcgtggaaaccaccaagccatccaagcagagcaacaacaaatacgccgccagctcctacctgagcctgacacctgagcagtggaagtcccacagatcctacagctgccaagtgacccacgaaggcagcaccgtggaaaagacagtggcccctacagagtgcagcggcagagccgattgcggctttaccagcgagagctaccagcagggcgtgctgagcgccaccatcctgtacgagatcctgctgggcaaggccaccctgtacgccgtgctggtgtctgccctggtgctgatggctatggtcaagcggaaggacagccggggacgcgccaagagaagcggatctggcgtgaagcagaccctgaatttcgacctgctgaagctggctggcgacgtggaatccaacccaggccctactagtatggactggatttggcgcatccttttccttgtcggcgctgctaccggcgcgcattccttcgaacaggtgcaactccagcagtctggccccggactcgtgaagcctagccagacactgagcctgacctgcgccatcagcggcgatagcgtgtccggcaatagcgccacctggaactggatcagacagagcccatctcggggcctggaatggctgggccggacctactaccgcagcaagtggaaccacgactacgccgagagcgtgaagtcccggatcaccatcaaccccgacaccagcaagaaccagttctccttgcaactgaacagcgtgacccccgaggacacagccgtgtattattgcgccagaggcgacagcagctcttggtacgccttcgactattggggccagggcaccctcgtgaccgtgtctagtacgcgtgcctctacaaagggaccctccgtgtttcctctggctcccagcagcaagtctacaagcggaggaacagccgctctgggctgcctggtcaaggattactttcccgagcctgtgaccgtgtcctggaatagcggagcactgacaagcggcgtgcacacctttccagccgtgctgcaaagcagcggcctgtactctctgagcagcgtggtcacagtgcctagctctagcctgggcacccagacctacatctgcaatgtgaaccacaagcctagcaacaccaaggtggacaagagagtggaacccaagagctgtatccccgaggacacattcttcccaagccccgagagcagctgcgacgtgaagctggtggaaaagagcttcgagacagacaccaacctgaacttccagaacctgagcgtgatcggcttcagaatcctgctgctgaaagtggccggctttaacctgctgatgaccctgcggctgtggtccagc

SEQ ID NO: 3265 - DNA, 2295 bp, Artificial Sequence
  Synthetic Polynucloetide
atggccttaccagtgaccgccttgctcctgccgctggccttgctgctccacgccgccaggccggaagtgcagctggttgaatctggcggaggactggttcagcctggcggatctctgagactgtcttgtgccgccagcggcttcagcttcagcgacttttggatgagctgggtccgacaggcccctggcaaaggacttgaatgggtcgccacaatcagccaggccggcagcgagaaggactacgtggactctgtgaagggcagattcaccatcagccgggacaacgccaagaagtccctgtacctccagatgaacagcctgagagccgaggacaccgccgtgtactattgtgcctctggcgtgtacagcttcgactacagaggccagggcaccctggtcacagtctcttctggtaccggcggaggcggatctggcggcggaggtagcggtggcggaggatctgaattcgaccagagcgtcgtgacacagcctcctagcgtgtcagtggcccctggcaagaccgccagaatcacctgtggccggaacaacatcggcagcaagagcgtgcactggtatcagcagaagcccggccaggctcctgtgctggtggtgtacgacgacagcgacagacccagcggcatccccgagagattcagcggcagcaactccggcaataccgccaccctgaccatcagcagagtggaagccggcgacgaggccgactactactgccaagtgtgggacagcagcagcgatcacgtggtgtttggcggaggcaccaagctgacagtgctgggtctcgagggacagcctaaggccaatcctaccgtgacactgttccctccaagcagcgaagaactccaggccaacaaggccacacttgtgtgcctgatctccgacttctaccctggggctgtgacagtggcttggaaggccgatggatctcctgtgaaagccggcgtggaaaccaccaagccatccaagcagagcaacaacaaatacgccgccagctcctacctgagcctgacacctgagcagtggaagtcccacagatcctacagctgccaagtgacccacgaaggcagcaccgtggaaaagacagtggcccctacagagtgcagcggcagagccgattgcggctttaccagcgagagctaccagcagggcgtgctgagcgccaccatcctgtacgagatcctgctgggcaaggccaccctgtacgccgtgctggtgtctgccctggtgctgatggctatggtcaagcggaaggacagccggggacgcgccaagagaagcggatctggcgtgaagcagaccctgaatttcgacctgctgaagctggctggcgacgtggaatccaacccaggccctactagtatggactggatttggcgcatccttttccttgtcggcgctgctaccggcgcgcattccttcgaagtgcaactggtgcagtctggcggaggggtcatgcggcctggcggatctctgagactgtcttgtgccgccagcggcttcaccttcgacgactacggcatgagctgggtgcgccaggcccctggaaaaggcctggaatgggtgtccggcatcaactggaatggcggcagcaccggctacgccgattctgtgcggggcagattcaccatcagccgggacaacgccaagaacagcctgtacctgcagatgaactccctgcgggccgaggacaccgccctgtactattgcgccagagagcggggctacggctaccacgaccctcacgattattggggccagggcacccttgttaccgtgtcctctacgcgtgcctctacaaagggaccctccgtgtttcctctggctcccagcagcaagtctacaagcggaggaacagccgctctgggctgcctggtcaaggattactttcccgagcctgtgaccgtgtcctggaatagcggagcactgacaagcggcgtgcacacctttccagccgtgctgcaaagcagcggcctgtactctctgagcagcgtggtcacagtgcctagctctagcctgggcacccagacctacatctgcaatgtgaaccacaagcctagcaacaccaaggtggacaagagagtggaacccaagagctgtatccccgaggacacattcttcccaagccccgagagcagctgcgacgtgaagctggtggaaaagagcttcgagacagacaccaacctgaacttccagaacctgagcgtgatcggcttcagaatcctgctgctgaaagtggccggctttaacctgctgatgaccctgcggctgtggtccagc

SEQ ID NO: 3266 - DNA, 2334 bp, Artificial Sequence
  Synthetic Polynucloetide
atggccttaccagtgaccgccttgctcctgccgctggccttgctgctccacgccgccaggccggaagtgcagctggttgaatctggcggaggactggttcagcctggcggatctctgagactgtcttgtgccgccagcggcttcagcttcagcgacttttggatgagctgggtccgacaggcccctggcaaaggacttgaatgggtcgccacaatcagccaggccggcagcgagaaggactacgtggactctgtgaagggcagattcaccatcagccgggacaacgccaagaagtccctgtacctccagatgaacagcctgagagccgaggacaccgccgtgtactattgtgcctctggcgtgtacagcttcgactacagaggccagggcaccctggtcacagtctcttctggtaccggcggaggcggatctggcggcggaggtagcggtggcggaggatctgaattcgaacagaaactcatcagtgaagaagacctggaattccaggctgtcgtgacacagcctcctagcgcctctggcacaccaggccagagagtgaccatctcctgtagcggcagcagcagcaacatcggcagcaacaccgtgaactggtatcagcaggtgcccggcaccgctcccaagctgctgatctacagcaacaaccagcggcccagcggcgtgcccgatagattttctggcagcaagagcggcaccagcgccagcctggctatctctggactccagtccgaggacgaggccgactactattgcgccgcctgggacgatagcctgaacggctgggtgttcggcggaggcaccaagctgacagtgctgctcgagggacagcctaaggccaatcctaccgtgacactgttccctccaagcagcgaagaactccaggccaacaaggccacacttgtgtgcctgatctccgacttctaccctggggctgtgacagtggcttggaaggccgatggatctcctgtgaaagccggcgtggaaaccaccaagccatccaagcagagcaacaacaaatacgccgccagctcctacctgagcctgacacctgagcagtggaagtcccacagatcctacagctgccaagtgacccacgaaggcagcaccgtggaaaagacagtggcccctacagagtgcagcggcagagccgattgcggctttaccagcgagagctaccagcagggcgtgctgagcgccaccatcctgtacgagatcctgctgggcaaggccaccctgtacgccgtgctggtgtctgccctggtgctgatggctatggtcaagcggaaggacagccggggacgcgccaagagaagcggatctggcgtgaagcagaccctgaatttcgacctgctgaagctggctggcgacgtggaatccaacccaggccctactagtatggactggatttggcgcatccttttccttgtcggcgctgctaccggcgcgcattccttcgaacagatgcaactggtgcagagcggagccgaagtgaaagagcctggcgagagcctgcggatctcctgcaagggcagcggctacagcttcaccaatttctggatctcttgggtgcgccagatgcccggcaagggcctggaatggatgggcagagtggaccccggctactcctacagcacctacagccctagcttccagggccacgtgaccatcagcgccgacaagagcaccagcaccgcctacctccagtggaacagcctgaaggccagcgacaccgccatgtactactgcgccagagtgcagtacagcggctattacgattggttcgacccctggggccagggcacactcgtgacagtgtcaagcacgcgtgcctctacaaagggaccctccgtgtttcctctggctcccagcagcaagtctacaagcggaggaacagccgctctgggctgcctggtcaaggattactttcccgagcctgtgaccgtgtcctggaatagcggagcactgacaagcggcgtgcacacctttccagccgtgctgcaaagcagcggcctgtactctctgagcagcgtggtcacagtgcctagctctagcctgggcacccagacctacatctgcaatgtgaaccacaagcctagcaacaccaaggtggacaagagagtggaacccaagagctgtatccccgaggacacattcttcccaagccccgagagcagctgcgacgtgaagctggtggaaaagagcttcgagacagacaccaacctgaacttccagaacctgagcgtgatcggcttcagaatcctgctgctgaaagtggccggctttaacctgctgatgaccctgcggctgtggtccagc

SEQ ID NO: 3267 - DNA, 2316 bp, Artificial Sequence
  Synthetic Polynucloetide
atggccttaccagtgaccgccttgctcctgccgctggccttgctgctccacgccgccaggccggaagtgcagctggttgaatctggcggaggactggttcagcctggcggatctctgagactgtcttgtgccgccagcggcttcagcttcagcgacttttggatgagctgggtccgacaggcccctggcaaaggacttgaatgggtcgccacaatcagccaggccggcagcgagaaggactacgtggactctgtgaagggcagattcaccatcagccgggacaacgccaagaagtccctgtacctccagatgaacagcctgagagccgaggacaccgccgtgtactattgtgcctctggcgtgtacagcttcgactacagaggccagggcaccctggtcacagtctcttctggtaccggcggaggcggatctggcggcggaggtagcggtggcggaggatctgaattcgaacagaaactcatcagtgaagaagacctggaattcgacatccagatgacccagagccccagcacactgagcgccagcgtgggcgacagagtgaccatcacctgtcgggccagccagaacatcaacaagtggctggcctggtatcagcagaggcccggaaaagccccccagctgctgatctacaaggccagcagcctggaaagcggcgtgcccagcagattttctggcagcggctctggcaccgagtacaccctgaccatcagctccctccagcccgacgacttcgccacctactactgccagcagtacaacagctacgccaccttcggccagggcaccaaggtggaaatcaagagactcgagggacagcctaaggccaatcctaccgtgacactgttccctccaagcagcgaagaactccaggccaacaaggccacacttgtgtgcctgatctccgacttctaccctggggctgtgacagtggcttggaaggccgatggatctcctgtgaaagccggcgtggaaaccaccaagccatccaagcagagcaacaacaaatacgccgccagctcctacctgagcctgacacctgagcagtggaagtcccacagatcctacagctgccaagtgacccacgaaggcagcaccgtggaaaagacagtggcccctacagagtgcagcggcagagccgattgcggctttaccagcgagagctaccagcagggcgtgctgagcgccaccatcctgtacgagatcctgctgggcaaggccaccctgtacgccgtgctggtgtctgccctggtgctgatggctatggtcaagcggaaggacagccggggacgcgccaagagaagcggatctggcgtgaagcagaccctgaatttcgacctgctgaagctggctggcgacgtggaatccaacccaggccctactagtatggactggatttggcgcatccttttccttgtcggcgctgctaccggcgcgcattccttcgaacaggtgcagctggtgcagtctggggccgaagtgaagaagcctggcgagagcctgaagatcagctgcaagggctccggctacaacttctctaacaagtggatcggctgggtgcgccagctgcctggcagaggactggaatggatcgccatcatctaccccggctacagcgacatcacctacagccccagcttccagggccgcgtgacaatcagcgccgacaccagcatcaacaccgcctacctgcactggcacagcctgaaggccagcgacaccgccatgtactactgcgtgcggcatacagccctggctggcttcgattattggggcctgggcaccctcgtgaccgtgtctagtacgcgtgcctctacaaagggaccctccgtgtttcctctggctcccagcagcaagtctacaagcggaggaacagccgctctgggctgcctggtcaaggattactttcccgagcctgtgaccgtgtcctggaatagcggagcactgacaagcggcgtgcacacctttccagccgtgctgcaaagcagcggcctgtactctctgagcagcgtggtcacagtgcctagctctagcctgggcacccagacctacatctgcaatgtgaaccacaagcctagcaacaccaaggtggacaagagagtggaacccaagagctgtatccccgaggacacattcttcccaagccccgagagcagctgcgacgtgaagctggtggaaaagagcttcgagacagacaccaacctgaacttccagaacctgagcgtgatcggcttcagaatcctgctgctgaaagtggccggctttaacctgctgatgaccctgcggctgtggtccagc

SEQ ID NO: 3268 - DNA, 2292 bp, Artificial Sequence
  Synthetic Polynucloetide
atggccttaccagtgaccgccttgctcctgccgctggccttgctgctccacgccgccaggccggaagtgcagctggttgaatctggcggaggactggttcagcctggcggatctctgagactgtcttgtgccgccagcggcttcagcttcagcgacttttggatgagctgggtccgacaggcccctggcaaaggacttgaatgggtcgccacaatcagccaggccggcagcgagaaggactacgtggactctgtgaagggcagattcaccatcagccgggacaacgccaagaagtccctgtacctccagatgaacagcctgagagccgaggacaccgccgtgtactattgtgcctctggcgtgtacagcttcgactacagaggccagggcaccctggtcacagtctcttctggtaccggcggaggcggatctggcggcggaggtagcggtggcggaggatctgaattcgacatcgtgctgacacagagccctgcttctctggccgtgtctctgggacagagagccaccatcagctgtagagccagcgagagcgtggacaactacggcaacaccttcatgcactggtatcagcagaagcccggccagcctcctaagctgctgatctacagagccagcaacctggaaagcggcatccccgccagattttctggcagcggcagcagaaccgacttcaccctgaccatcaatcccgtggaagccgacgacgtggcaacctactactgccagcagagcaacgaggaccctcctacatttggagccggcaccaagctggaactgaaactcgagggacagcctaaggccaatcctaccgtgacactgttccctccaagcagcgaagaactccaggccaacaaggccacacttgtgtgcctgatctccgacttctaccctggggctgtgacagtggcttggaaggccgatggatctcctgtgaaagccggcgtggaaaccaccaagccatccaagcagagcaacaacaaatacgccgccagctcctacctgagcctgacacctgagcagtggaagtcccacagatcctacagctgccaagtgacccacgaaggcagcaccgtggaaaagacagtggcccctacagagtgcagcggcagagccgattgcggctttaccagcgagagctaccagcagggcgtgctgagcgccaccatcctgtacgagatcctgctgggcaaggccaccctgtacgccgtgctggtgtctgccctggtgctgatggctatggtcaagcggaaggacagccggggacgcgccaagagaagcggatctggcgtgaagcagaccctgaatttcgacctgctgaagctggctggcgacgtggaatccaacccaggccctactagtatggactggatttggcgcatccttttccttgtcggcgctgctaccggcgcgcattccttcgaacagattcagctggtgcagtctggccccgagctgaagaaacctggcgagacagtgaagatcagctgcaaggccagcggctacatcttcaccaattacggcatgaactgggtcaagcaggcccctggcaagagcttcaagtggatgggctggatcaacacctacaccggcgagagcacatacagcgccgacttcaagggcagattcgccttcagcctggaaaccagcgccagcacagcctacctgcacatcaacgacctgaagaacgaggacaccgccacctacttttgcgccagaagcggcggctacgaccctatggattattggggccagggcaccagcgtgaccgtttcttctacgcgtgcctctacaaagggaccctccgtgtttcctctggctcccagcagcaagtctacaagcggaggaacagccgctctgggctgcctggtcaaggattactttcccgagcctgtgaccgtgtcctggaatagcggagcactgacaagcggcgtgcacacctttccagccgtgctgcaaagcagcggcctgtactctctgagcagcgtggtcacagtgcctagctctagcctgggcacccagacctacatctgcaatgtgaaccacaagcctagcaacaccaaggtggacaagagagtggaacccaagagctgtatccccgaggacacattcttcccaagccccgagagcagctgcgacgtgaagctggtggaaaagagcttcgagacagacaccaacctgaacttccagaacctgagcgtgatcggcttcagaatcctgctgctgaaagtggccggctttaacctgctgatgaccctgcggctgtggtccagc

SEQ ID NO: 3269 - DNA, 2289 bp, Artificial Sequence
  Synthetic Polynucloetide
atggccttaccagtgaccgccttgctcctgccgctggccttgctgctccacgccgccaggccggaagtgcagctggttgaatctggcggaggactggttcagcctggcggatctctgagactgtcttgtgccgccagcggcttcagcttcagcgacttttggatgagctgggtccgacaggcccctggcaaaggacttgaatgggtcgccacaatcagccaggccggcagcgagaaggactacgtggactctgtgaagggcagattcaccatcagccgggacaacgccaagaagtccctgtacctccagatgaacagcctgagagccgaggacaccgccgtgtactattgtgcctctggcgtgtacagcttcgactacagaggccagggcaccctggtcacagtctcttctggtaccggcggaggcggatctggcggcggaggtagcggtggcggaggatctgaattcgacgagatcgtgctgacacagagccctggcaccctgagcctgtctccaggcgaaagagccacactgagctgtcgggccagccagagcgtgtccaatacctacctggcctggtatcaccagaggcccggacaggctccccggctgctgatctatggcgcttctagcagagccaccggcatccccgatagattcagcggctctggcagcggcaccgacttcgccctgacaatcagctccctggaacccgaggacttcgccgtgtactactgccagcagtacagcaactcctggaccttcggccagggcaccaaggtggaaatcaagagactcgagggacagcctaaggccaatcctaccgtgacactgttccctccaagcagcgaagaactccaggccaacaaggccacacttgtgtgcctgatctccgacttctaccctggggctgtgacagtggcttggaaggccgatggatctcctgtgaaagccggcgtggaaaccaccaagccatccaagcagagcaacaacaaatacgccgccagctcctacctgagcctgacacctgagcagtggaagtcccacagatcctacagctgccaagtgacccacgaaggcagcaccgtggaaaagacagtggcccctacagagtgcagcggcagagccgattgcggctttaccagcgagagctaccagcagggcgtgctgagcgccaccatcctgtacgagatcctgctgggcaaggccaccctgtacgccgtgctggtgtctgccctggtgctgatggctatggtcaagcggaaggacagccggggacgcgccaagagaagcggatctggcgtgaagcagaccctgaatttcgacctgctgaagctggctggcgacgtggaatccaacccaggccctactagtatggactggatttggcgcatccttttccttgtcggcgctgctaccggcgcgcattccttcgaacaggtgcaactggtggaatctggcgggggagtggtgcagcctggcagaagcctgagactgtcttgtgccgccagcggcttcaccttcagcagctacgacatgcactgggtgcgccaggcccctggcaaaggactggaatgggtggccgtgatctcctacgacggcaccaacgagtattacgccgacagcgtgaagggccggttcaccatctccagagacaccagcaagaacaccctgtacctccagatgaacagcctgcgggccgaggacacagccgtgtattattgcgccagagagcggtacttcgactggtccttcgactactggggccagggaaccctggtgtccgtgtctagtacgcgtgcctctacaaagggaccctccgtgtttcctctggctcccagcagcaagtctacaagcggaggaacagccgctctgggctgcctggtcaaggattactttcccgagcctgtgaccgtgtcctggaatagcggagcactgacaagcggcgtgcacacctttccagccgtgctgcaaagcagcggcctgtactctctgagcagcgtggtcacagtgcctagctctagcctgggcacccagacctacatctgcaatgtgaaccacaagcctagcaacaccaaggtggacaagagagtggaacccaagagctgtatccccgaggacacattcttcccaagccccgagagcagctgcgacgtgaagctggtggaaaagagcttcgagacagacaccaacctgaacttccagaacctgagcgtgatcggcttcagaatcctgctgctgaaagtggccggctttaacctgctgatgaccctgcggctgtggtccagc

SEQ ID NO: 3270 - DNA, 2286 bp, Artificial Sequence
  Synthetic Polynucloetide
atggccttaccagtgaccgccttgctcctgccgctggccttgctgctccacgccgccaggccggaagtgcagctggttgaatctggcggaggactggttcagcctggcggatctctgagactgtcttgtgccgccagcggcttcagcttcagcgacttttggatgagctgggtccgacaggcccctggcaaaggacttgaatgggtcgccacaatcagccaggccggcagcgagaaggactacgtggactctgtgaagggcagattcaccatcagccgggacaacgccaagaagtccctgtacctccagatgaacagcctgagagccgaggacaccgccgtgtactattgtgcctctggcgtgtacagcttcgactacagaggccagggcaccctggtcacagtctcttctggtaccggcggaggcggatctggcggcggaggtagcggtggcggaggatctgaattcgacgagctgacacaggaccctgctgtgtctgttgccctgggccagacagtgcggattacctgtcaaggcgacagcctgagaagcaactacgccaactggtatcagcagaagcccggacaggctcccgtgctggttatctacggccagaacaacagacccagcggcatccccgatagattcagcggctctagctctggcaataccgccagcctgacaatcactggcgctcaggctgccgatgaggccgactactactgcgatagcagagtgtccaccggcaatcacgtggtgtttggcggcggaacaaagctgacagtgctcggacaactcgagggacagcctaaggccaatcctaccgtgacactgttccctccaagcagcgaagaactccaggccaacaaggccacacttgtgtgcctgatctccgacttctaccctggggctgtgacagtggcttggaaggccgatggatctcctgtgaaagccggcgtggaaaccaccaagccatccaagcagagcaacaacaaatacgccgccagctcctacctgagcctgacacctgagcagtggaagtcccacagatcctacagctgccaagtgacccacgaaggcagcaccgtggaaaagacagtggcccctacagagtgcagcggcagagccgattgcggctttaccagcgagagctaccagcagggcgtgctgagcgccaccatcctgtacgagatcctgctgggcaaggccaccctgtacgccgtgctggtgtctgccctggtgctgatggctatggtcaagcggaaggacagccggggacgcgccaagagaagcggatctggcgtgaagcagaccctgaatttcgacctgctgaagctggctggcgacgtggaatccaacccaggccctactagtatggactggatttggcgcatccttttccttgtcggcgctgctaccggcgcgcattccttcgaagaagttcagctggtgcagagcggagccgaagtgaagaaacctggggcctctgtgaaggtgtcctgcaaggcttccggctacacctttaccagctacgccatgcactgggtccgacaggcacctggacaacggcttgaatggatgggctggatcaacgccggcaacggcaacaccaagtacagccagaaattccagggccgcgtgaccatcaccagagatacaagcgccagcaccgcctacatggaactgtctagcctgagatccgaggacaccgccgtgtactactgtgccagagacatcagctacggcagcttcgactattggggccagggcacactggtcaccgttagctctacgcgtgcctctacaaagggaccctccgtgtttcctctggctcccagcagcaagtctacaagcggaggaacagccgctctgggctgcctggtcaaggattactttcccgagcctgtgaccgtgtcctggaatagcggagcactgacaagcggcgtgcacacctttccagccgtgctgcaaagcagcggcctgtactctctgagcagcgtggtcacagtgcctagctctagcctgggcacccagacctacatctgcaatgtgaaccacaagcctagcaacaccaaggtggacaagagagtggaacccaagagctgtatccccgaggacacattcttcccaagccccgagagcagctgcgacgtgaagctggtggaaaagagcttcgagacagacaccaacctgaacttccagaacctgagcgtgatcggcttcagaatcctgctgctgaaagtggccggctttaacctgctgatgaccctgcggctgtggtccagc

SEQ ID NO: 3271 - DNA, 2292 bp, Artificial Sequence
  Synthetic Polynucloetide
atggccttaccagtgaccgccttgctcctgccgctggccttgctgctccacgccgccaggccggaagtgcagctggttgaatctggcggaggactggttcagcctggcggatctctgagactgtcttgtgccgccagcggcttcagcttcagcgacttttggatgagctgggtccgacaggcccctggcaaaggacttgaatgggtcgccacaatcagccaggccggcagcgagaaggactacgtggactctgtgaagggcagattcaccatcagccgggacaacgccaagaagtccctgtacctccagatgaacagcctgagagccgaggacaccgccgtgtactattgtgcctctggcgtgtacagcttcgactacagaggccagggcaccctggtcacagtctcttctggtaccggcggaggcggatctggcggcggaggtagcggtggcggaggatctgaattcgacgacatcgtgctgacacagacaccagccacactgagcgtgacacctggcgattctgtgtccctgagctgtagagccagccagagcatcagcaacaacctgcactggtatcagcagaagtcccacgagagccccagactgctgattaagaacgccagccagtctatcagcggcatccccagcaagtttagcggctctggcagcggcaccgacttcaccctgagaatcaacagcgtggaaaccgaggacttcgggatgtacttctgccagcagagcaatagctggccctacacatttggctccggcaccaagctggaaatcaaactcgagggacagcctaaggccaatcctaccgtgacactgttccctccaagcagcgaagaactccaggccaacaaggccacacttgtgtgcctgatctccgacttctaccctggggctgtgacagtggcttggaaggccgatggatctcctgtgaaagccggcgtggaaaccaccaagccatccaagcagagcaacaacaaatacgccgccagctcctacctgagcctgacacctgagcagtggaagtcccacagatcctacagctgccaagtgacccacgaaggcagcaccgtggaaaagacagtggcccctacagagtgcagcggcagagccgattgcggctttaccagcgagagctaccagcagggcgtgctgagcgccaccatcctgtacgagatcctgctgggcaaggccaccctgtacgccgtgctggtgtctgccctggtgctgatggctatggtcaagcggaaggacagccggggacgcgccaagagaagcggatctggcgtgaagcagaccctgaatttcgacctgctgaagctggctggcgacgtggaatccaacccaggccctactagtatggactggatttggcgcatccttttccttgtcggcgctgctaccggcgcgcattccttcgaacaagtgaagctgcaacagagcggacccgagctggttaagccaggcgcttccgtgaagattagctgcaaggccagcggctacagcttcaccggctactacatgcactgggtcaagcagagccacggcaacatcctggactggatcggctacatctacccctacaacggcgtgtccagctacaaccagaagttcaagggcaaagccactctgaccgtggacaagagcagcagcaccgcctacatggaactgagaagcctgaccagcgaggacagcgccgtgtactattgtgccagagagcggggcctgtaccagctcagagcaatggattattggggccagggcaccagcgtgaccgtttcttctacgcgtgcctctacaaagggaccctccgtgtttcctctggctcccagcagcaagtctacaagcggaggaacagccgctctgggctgcctggtcaaggattactttcccgagcctgtgaccgtgtcctggaatagcggagcactgacaagcggcgtgcacacctttccagccgtgctgcaaagcagcggcctgtactctctgagcagcgtggtcacagtgcctagctctagcctgggcacccagacctacatctgcaatgtgaaccacaagcctagcaacaccaaggtggacaagagagtggaacccaagagctgtatccccgaggacacattcttcccaagccccgagagcagctgcgacgtgaagctggtggaaaagagcttcgagacagacaccaacctgaacttccagaacctgagcgtgatcggcttcagaatcctgctgctgaaagtggccggctttaacctgctgatgaccctgcggctgtggtccagc

SEQ ID NO: 3272 - DNA, 2265 bp, Artificial Sequence
  Synthetic Polynucloetide
atggccttaccagtgaccgccttgctcctgccgctggccttgctgctccacgccgccaggccggaagtgcagctggttgaatctggcggaggactggttcagcctggcggatctctgagactgtcttgtgccgccagcggcttcagcttcagcgacttttggatgagctgggtccgacaggcccctggcaaaggacttgaatgggtcgccacaatcagccaggccggcagcgagaaggactacgtggactctgtgaagggcagattcaccatcagccgggacaacgccaagaagtccctgtacctccagatgaacagcctgagagccgaggacaccgccgtgtactattgtgcctctggcgtgtacagcttcgactacagaggccagggcaccctggtcacagtctcttctggtaccggcggaggcggatctggcggcggaggtagcggtggcggaggatctgaattcgacgacatcgtgatgacacagacccctgccatcatgagcgcctctccaggccagaaagtgaccatcacatgtagcgccagcagcagcgtgaactacatgcactggtatcagcagaagctgggcagcagccccaagctgtggatctacgataccagcaaactggcccctggcgtgccagccagattttctggttctggcagcggcaccagctacagcctgacaatcagcagcatggaagccgaggatgccgccagctacttctgccatcagtggtctagctacccctacacctttggctccggcaccaagctggaaatcaaactcgagggacagcctaaggccaatcctaccgtgacactgttccctccaagcagcgaagaactccaggccaacaaggccacacttgtgtgcctgatctccgacttctaccctggggctgtgacagtggcttggaaggccgatggatctcctgtgaaagccggcgtggaaaccaccaagccatccaagcagagcaacaacaaatacgccgccagctcctacctgagcctgacacctgagcagtggaagtcccacagatcctacagctgccaagtgacccacgaaggcagcaccgtggaaaagacagtggcccctacagagtgcagcggcagagccgattgcggctttaccagcgagagctaccagcagggcgtgctgagcgccaccatcctgtacgagatcctgctgggcaaggccaccctgtacgccgtgctggtgtctgccctggtgctgatggctatggtcaagcggaaggacagccggggacgcgccaagagaagcggatctggcgtgaagcagaccctgaatttcgacctgctgaagctggctggcgacgtggaatccaacccaggccctactagtatggactggatttggcgcatccttttccttgtcggcgctgctaccggcgcgcattccttcgaagaagttcagctccaagagtctggccccgacctggtcaagcctagccaaagcctgagcctgacctgtaccgtgaccggctacagcatcacaagcggctatggatggcactggatcagacagttccccggcaacaaactggaatggatgggctacatccactacagcggcagcaccacctacaatcccagcctgaagtcccggatcagcatcagcagagacaccagcaagaaccagttcttcctgcaactgaacagcgtgaccaccgaggacaccgccacctactattgtgctcggagcctgagatattggggccagggcacaaccctgaccgtgtcatctacgcgtgcctctacaaagggaccctccgtgtttcctctggctcccagcagcaagtctacaagcggaggaacagccgctctgggctgcctggtcaaggattactttcccgagcctgtgaccgtgtcctggaatagcggagcactgacaagcggcgtgcacacctttccagccgtgctgcaaagcagcggcctgtactctctgagcagcgtggtcacagtgcctagctctagcctgggcacccagacctacatctgcaatgtgaaccacaagcctagcaacaccaaggtggacaagagagtggaacccaagagctgtatccccgaggacacattcttcccaagccccgagagcagctgcgacgtgaagctggtggaaaagagcttcgagacagacaccaacctgaacttccagaacctgagcgtgatcggcttcagaatcctgctgctgaaagtggccggctttaacctgctgatgaccctgcggctgtggtccagc

SEQ ID NO: 3273 - DNA, 2274 bp, Artificial Sequence
  Synthetic Polynucloetide
atggccttaccagtgaccgccttgctcctgccgctggccttgctgctccacgccgccaggccggaagtgcagctggttgaatctggcggaggactggttcagcctggcggatctctgagactgtcttgtgccgccagcggcttcagcttcagcgacttttggatgagctgggtccgacaggcccctggcaaaggacttgaatgggtcgccacaatcagccaggccggcagcgagaaggactacgtggactctgtgaagggcagattcaccatcagccgggacaacgccaagaagtccctgtacctccagatgaacagcctgagagccgaggacaccgccgtgtactattgtgcctctggcgtgtacagcttcgactacagaggccagggcaccctggtcacagtctcttctggtaccggcggaggcggatctggcggcggaggtagcggtggcggaggatctgaattcgacgacatccagatgacacagagccctagcagcctgtctgccagcgtgggagacagagtgaccatcacctgtagcgccaccagcagcatcagctacatgcactggtatcagcagaagcccggcaaggcccctaaaggctggatctacgataccagcaaactggcccacggcgtgcccagcagattttctggttctggcagcggcaccgacttcaccctgacaatatctagcctccagcctgaggacttcgccacctactactgccaccagagaagaagctaccccttcaccttcggccagggcaccaaggtggaaatcaaactcgagggacagcctaaggccaatcctaccgtgacactgttccctccaagcagcgaagaactccaggccaacaaggccacacttgtgtgcctgatctccgacttctaccctggggctgtgacagtggcttggaaggccgatggatctcctgtgaaagccggcgtggaaaccaccaagccatccaagcagagcaacaacaaatacgccgccagctcctacctgagcctgacacctgagcagtggaagtcccacagatcctacagctgccaagtgacccacgaaggcagcaccgtggaaaagacagtggcccctacagagtgcagcggcagagccgattgcggctttaccagcgagagctaccagcagggcgtgctgagcgccaccatcctgtacgagatcctgctgggcaaggccaccctgtacgccgtgctggtgtctgccctggtgctgatggctatggtcaagcggaaggacagccggggacgcgccaagagaagcggatctggcgtgaagcagaccctgaatttcgacctgctgaagctggctggcgacgtggaatccaacccaggccctactagtatggactggatttggcgcatccttttccttgtcggcgctgctaccggcgcgcattccttcgaagaagtgcaactggttcagagcggagccgaagtgaagaaacctggggcctctgtgaaggtgtcctgcaaggcttccggctacacctttaccaatttctggattcactgggtccgacaggctccaggccaaggactggaatggatcggagagatcgaccccagcgacagctacaccaactacaaccagaaattcaaaggccgggtcaccatcaccagagacaccagcacaagcaccgcctacctggaactgagcagcctgagaagcgaggacaccgccgtgtactactgcgccagggaaatcaccaccgtggattattggggccagggaaccctggtcaccgtgtcatctacgcgtgcctctacaaagggaccctccgtgtttcctctggctcccagcagcaagtctacaagcggaggaacagccgctctgggctgcctggtcaaggattactttcccgagcctgtgaccgtgtcctggaatagcggagcactgacaagcggcgtgcacacctttccagccgtgctgcaaagcagcggcctgtactctctgagcagcgtggtcacagtgcctagctctagcctgggcacccagacctacatctgcaatgtgaaccacaagcctagcaacaccaaggtggacaagagagtggaacccaagagctgtatccccgaggacacattcttcccaagccccgagagcagctgcgacgtgaagctggtggaaaagagcttcgagacagacaccaacctgaacttccagaacctgagcgtgatcggcttcagaatcctgctgctgaaagtggccggctttaacctgctgatgaccctgcggctgtggtccagc

SEQ ID NO: 3274 - DNA, 2295 bp, Artificial Sequence
  Synthetic Polynucloetide
atggccttaccagtgaccgccttgctcctgccgctggccttgctgctccacgccgccaggccggaagtgcagctggttgaatctggcggaggactggttcagcctggcggatctctgagactgtcttgtgccgccagcggcttcagcttcagcgacttttggatgagctgggtccgacaggcccctggcaaaggacttgaatgggtcgccacaatcagccaggccggcagcgagaaggactacgtggactctgtgaagggcagattcaccatcagccgggacaacgccaagaagtccctgtacctccagatgaacagcctgagagccgaggacaccgccgtgtactattgtgcctctggcgtgtacagcttcgactacagaggccagggcaccctggtcacagtctcttctggtaccggcggaggcggatctggcggcggaggtagcggtggcggaggatctgaattcgacgacatccagatgacacagagccctagcagcctgtctgccagcgtgggagacagagtgaccatcacatgcaaggccagccagggcttcaacaaatacgtggcctggtatcagcagaagcccggcaaggctcctaagctgctgatctactacaccagcacactccagcctggcgtgcccagcagattttctggctctggcagcggcagagactacaccctgacaatatccagcctccagccagaggacttcgccacctactactgtctccagtacggcaacctgctgtacgcctttggacagggcaccaaggtggaaatcaagagactcgagggacagcctaaggccaatcctaccgtgacactgttccctccaagcagcgaagaactccaggccaacaaggccacacttgtgtgcctgatctccgacttctaccctggggctgtgacagtggcttggaaggccgatggatctcctgtgaaagccggcgtggaaaccaccaagccatccaagcagagcaacaacaaatacgccgccagctcctacctgagcctgacacctgagcagtggaagtcccacagatcctacagctgccaagtgacccacgaaggcagcaccgtggaaaagacagtggcccctacagagtgcagcggcagagccgattgcggctttaccagcgagagctaccagcagggcgtgctgagcgccaccatcctgtacgagatcctgctgggcaaggccaccctgtacgccgtgctggtgtctgccctggtgctgatggctatggtcaagcggaaggacagccggggacgcgccaagagaagcggatctggcgtgaagcagaccctgaatttcgacctgctgaagctggctggcgacgtggaatccaacccaggccctactagtatggactggatttggcgcatccttttccttgtcggcgctgctaccggcgcgcattccttcgaagaagttcagcttgtgcagagcggagccgaagtgaagaaacctggggcctctgtgaaggtgtcctgcaaagccagcggctacacctttaccagctactggatcggctgggtccgacaggctcctggacaaggactggaatggatcggcgacatctatcccggcggaggctacaccaactacaacgagaagttcaagggccgcgtgacaatcaccagagacacctctacaagcaccgcctacctggaactgagcagcctgagaagcgaggacaccgccgtgtactactgcgccagactggatggcagcagctacagaggcgctatggattcttggggccagggcacactggtcaccgtttcttctacgcgtgcctctacaaagggaccctccgtgtttcctctggctcccagcagcaagtctacaagcggaggaacagccgctctgggctgcctggtcaaggattactttcccgagcctgtgaccgtgtcctggaatagcggagcactgacaagcggcgtgcacacctttccagccgtgctgcaaagcagcggcctgtactctctgagcagcgtggtcacagtgcctagctctagcctgggcacccagacctacatctgcaatgtgaaccacaagcctagcaacaccaaggtggacaagagagtggaacccaagagctgtatccccgaggacacattcttcccaagccccgagagcagctgcgacgtgaagctggtggaaaagagcttcgagacagacaccaacctgaacttccagaacctgagcgtgatcggcttcagaatcctgctgctgaaagtggccggctttaacctgctgatgaccctgcggctgtggtccagc

SEQ ID NO: 3275 - DNA, 2283 bp, Artificial Sequence
  Synthetic Polynucloetide
atggccttaccagtgaccgccttgctcctgccgctggccttgctgctccacgccgccaggccggaagtgcagctggttgaatctggcggaggactggttcagcctggcggatctctgagactgtcttgtgccgccagcggcttcagcttcagcgacttttggatgagctgggtccgacaggcccctggcaaaggacttgaatgggtcgccacaatcagccaggccggcagcgagaaggactacgtggactctgtgaagggcagattcaccatcagccgggacaacgccaagaagtccctgtacctccagatgaacagcctgagagccgaggacaccgccgtgtactattgtgcctctggcgtgtacagcttcgactacagaggccagggcaccctggtcacagtctcttctggtaccggcggaggcggatctggcggcggaggtagcggtggcggaggatctgaattcgacgacatccagatgacacagagccctagcagcctgtctgccagcgtgggagacagagtgaccatcacctgtagagccagccaggacatccggtactacctgaactggtatcagcagaagcccggcaaggcccctaagctgctgatctatgtggcctccagcctccagagcggagtgccttctagattttctggcagcggctccggcaccgagtttaccctgacagtgtctagcttgcagcccgaggacttcgccacctactactgcctgcaagtgtacagcacccctcggacctttggacagggcaccaaggtggaaatcaaactcgagggacagcctaaggccaatcctaccgtgacactgttccctccaagcagcgaagaactccaggccaacaaggccacacttgtgtgcctgatctccgacttctaccctggggctgtgacagtggcttggaaggccgatggatctcctgtgaaagccggcgtggaaaccaccaagccatccaagcagagcaacaacaaatacgccgccagctcctacctgagcctgacacctgagcagtggaagtcccacagatcctacagctgccaagtgacccacgaaggcagcaccgtggaaaagacagtggcccctacagagtgcagcggcagagccgattgcggctttaccagcgagagctaccagcagggcgtgctgagcgccaccatcctgtacgagatcctgctgggcaaggccaccctgtacgccgtgctggtgtctgccctggtgctgatggctatggtcaagcggaaggacagccggggacgcgccaagagaagcggatctggcgtgaagcagaccctgaatttcgacctgctgaagctggctggcgacgtggaatccaacccaggccctactagtatggactggatttggcgcatccttttccttgtcggcgctgctaccggcgcgcattccttcgaagaagtgcagcttgttgaatctggcggcggactggctaagcctggcggatctctgagactgtcttgtgccgccagcggcttccggttcaccttcaacaactactacatggactgggtccgacaggcccctggacaaggacttgaatgggtgtccagaatcagcagcagcggcgaccctacttggtacgccgattctgtgaagggcagattcaccatcagcagagagaacgccaagaacaccctgttcctccagatgaactccctgagagccgaggacaccgccgtgtactattgtgcctctctgaccaccggcagcgattcttggggacagggcgtgctggttaccgtgtcatctacgcgtgcctctacaaagggaccctccgtgtttcctctggctcccagcagcaagtctacaagcggaggaacagccgctctgggctgcctggtcaaggattactttcccgagcctgtgaccgtgtcctggaatagcggagcactgacaagcggcgtgcacacctttccagccgtgctgcaaagcagcggcctgtactctctgagcagcgtggtcacagtgcctagctctagcctgggcacccagacctacatctgcaatgtgaaccacaagcctagcaacaccaaggtggacaagagagtggaacccaagagctgtatccccgaggacacattcttcccaagccccgagagcagctgcgacgtgaagctggtggaaaagagcttcgagacagacaccaacctgaacttccagaacctgagcgtgatcggcttcagaatcctgctgctgaaagtggccggctttaacctgctgatgaccctgcggctgtggtccagc

SEQ ID NO: 3276 - DNA, 2283 bp, Artificial Sequence
  Synthetic Polynucloetide
atggccttaccagtgaccgccttgctcctgccgctggccttgctgctccacgccgccaggccggaagtgcagctggttgaatctggcggaggactggttcagcctggcggatctctgagactgtcttgtgccgccagcggcttcagcttcagcgacttttggatgagctgggtccgacaggcccctggcaaaggacttgaatgggtcgccacaatcagccaggccggcagcgagaaggactacgtggactctgtgaagggcagattcaccatcagccgggacaacgccaagaagtccctgtacctccagatgaacagcctgagagccgaggacaccgccgtgtactattgtgcctctggcgtgtacagcttcgactacagaggccagggcaccctggtcacagtctcttctggtaccggcggaggcggatctggcggcggaggtagcggtggcggaggatctgaattcgagatcgtgatgacacagagccccgccacactgagtgtgtctccaggcgaaagagccacactgtcctgtagagccagccagagcgtgtccagaaacctggcctggtatcagcagaagcctggacaggctccccggctgttgatctacggcgcttctacaagagccaccggcattcccgccagattttctggctctggcagcggcaccgagttcaccctgacaatcggaagcctccagagcgaggacttcgccgtgtactactgccagcagtacaagacctggcctcggacctttggacagggcaccaacgtggaaatcaaactcgagggacagcctaaggccaatcctaccgtgacactgttccctccaagcagcgaagaactccaggccaacaaggccacacttgtgtgcctgatctccgacttctaccctggggctgtgacagtggcttggaaggccgatggatctcctgtgaaagccggcgtggaaaccaccaagccatccaagcagagcaacaacaaatacgccgccagctcctacctgagcctgacacctgagcagtggaagtcccacagatcctacagctgccaagtgacccacgaaggcagcaccgtggaaaagacagtggcccctacagagtgcagcggcagagccgattgcggctttaccagcgagagctaccagcagggcgtgctgagcgccaccatcctgtacgagatcctgctgggcaaggccaccctgtacgccgtgctggtgtctgccctggtgctgatggctatggtcaagcggaaggacagccggggacgcgccaagagaagcggatctggcgtgaagcagaccctgaatttcgacctgctgaagctggctggcgacgtggaatccaacccaggccctactagtatggactggatttggcgcatccttttccttgtcggcgctgctaccggcgcgcattccttcgaacaagttcagctgcaacaatggggagccggcctgctgaagcctagcgaaacactgtctctgacctgcgccgtgttcggcggctctttcagcggctactactggtcctggatcagacagcctcctggcaaaggactggaatggatcggcgagatcaaccaccggggcaacaccaacgacaaccccagcctgaaaagcagagtgaccatcagcgtggacaccagcaagaaccagttcgccctgaagctgagcagcgtgacagccgctgataccgccgtgtattattgcgccagagagcggggctacacctacggcaatttcgatcactggggccagggcaccctggtcacagtttcttctacgcgtgcctctacaaagggaccctccgtgtttcctctggctcccagcagcaagtctacaagcggaggaacagccgctctgggctgcctggtcaaggattactttcccgagcctgtgaccgtgtcctggaatagcggagcactgacaagcggcgtgcacacctttccagccgtgctgcaaagcagcggcctgtactctctgagcagcgtggtcacagtgcctagctctagcctgggcacccagacctacatctgcaatgtgaaccacaagcctagcaacaccaaggtggacaagagagtggaacccaagagctgtatccccgaggacacattcttcccaagccccgagagcagctgcgacgtgaagctggtggaaaagagcttcgagacagacaccaacctgaacttccagaacctgagcgtgatcggcttcagaatcctgctgctgaaagtggccggctttaacctgctgatgaccctgcggctgtggtccagc

SEQ ID NO: 3277 - DNA, 2286 bp, Artificial Sequence
  Synthetic Polynucloetide
atggccttaccagtgaccgccttgctcctgccgctggccttgctgctccacgccgccaggccggaagtgcagctggttgaatctggcggaggactggttcagcctggcggatctctgagactgtcttgtgccgccagcggcttcagcttcagcgacttttggatgagctgggtccgacaggcccctggcaaaggacttgaatgggtcgccacaatcagccaggccggcagcgagaaggactacgtggactctgtgaagggcagattcaccatcagccgggacaacgccaagaagtccctgtacctccagatgaacagcctgagagccgaggacaccgccgtgtactattgtgcctctggcgtgtacagcttcgactacagaggccagggcaccctggtcacagtctcttctggtaccggcggaggcggatctggcggcggaggtagcggtggcggaggatctgaattcgagatcgtgatgacccctagcagcgccacactgagtgtgtctccaggcgaaagagccacactgtcctgtagagccagccagagcgtgtccagaaacctggcctggtatcagcagaagcctggacaggctccccggctgttgatctacggcgcttctacaagagccaccggcattcccgccagattttctggctctggcagcggcaccgagttcaccctgacaatctctagcctccagagcgaggacttcgccgtgtactactgccaccagtacagcaactggatgtgcagcttcggccagggcaccaagctggaaatcaaactcgagggacagcctaaggccaatcctaccgtgacactgttccctccaagcagcgaagaactccaggccaacaaggccacacttgtgtgcctgatctccgacttctaccctggggctgtgacagtggcttggaaggccgatggatctcctgtgaaagccggcgtggaaaccaccaagccatccaagcagagcaacaacaaatacgccgccagctcctacctgagcctgacacctgagcagtggaagtcccacagatcctacagctgccaagtgacccacgaaggcagcaccgtggaaaagacagtggcccctacagagtgcagcggcagagccgattgcggctttaccagcgagagctaccagcagggcgtgctgagcgccaccatcctgtacgagatcctgctgggcaaggccaccctgtacgccgtgctggtgtctgccctggtgctgatggctatggtcaagcggaaggacagccggggacgcgccaagagaagcggatctggcgtgaagcagaccctgaatttcgacctgctgaagctggctggcgacgtggaatccaacccaggccctactagtatggactggatttggcgcatccttttccttgtcggcgctgctaccggcgcgcattccttcgaagaagttcagctccttgagtcaggtggcggcctggttcaacctggcggatctctgagactgagctgtgccgccagcggcttcacctttagcagatacgccatgaactgggtccgacaggcccctggcaaaggactggaatgggtgtccggcatctctggaagcggcggcagaacctactacgccgattctgtgaagggcagattcaccatcagccgggacaacagcaagaacaccctgtacctccagatgaacagcctgagagccgaggacacagccgtgtattattgcgccaaggaccgggacttttggagcggcccttttgactattggggccagggaaccctggtcaccgttagctctacgcgtgcctctacaaagggaccctccgtgtttcctctggctcccagcagcaagtctacaagcggaggaacagccgctctgggctgcctggtcaaggattactttcccgagcctgtgaccgtgtcctggaatagcggagcactgacaagcggcgtgcacacctttccagccgtgctgcaaagcagcggcctgtactctctgagcagcgtggtcacagtgcctagctctagcctgggcacccagacctacatctgcaatgtgaaccacaagcctagcaacaccaaggtggacaagagagtggaacccaagagctgtatccccgaggacacattcttcccaagccccgagagcagctgcgacgtgaagctggtggaaaagagcttcgagacagacaccaacctgaacttccagaacctgagcgtgatcggcttcagaatcctgctgctgaaagtggccggctttaacctgctgatgaccctgcggctgtggtccagc

SEQ ID NO: 3278 - DNA, 2301 bp, Artificial Sequence
  Synthetic Polynucloetide
atggccttaccagtgaccgccttgctcctgccgctggccttgctgctccacgccgccaggccggaagtgcagctggttgaatctggcggaggactggttcagcctggcggatctctgagactgtcttgtgccgccagcggcttcagcttcagcgacttttggatgagctgggtccgacaggcccctggcaaaggacttgaatgggtcgccacaatcagccaggccggcagcgagaaggactacgtggactctgtgaagggcagattcaccatcagccgggacaacgccaagaagtccctgtacctccagatgaacagcctgagagccgaggacaccgccgtgtactattgtgcctctggcgtgtacagcttcgactacagaggccagggcaccctggtcacagtctcttctggtaccggcggaggcggatctggcggcggaggtagcggtggcggaggatctgaattcgacatccagatgacccagagccccagcagcctgtctgccagcgtgggcgacagagtgaccatcacatgcaaggccagcaagaacatcagaagctacctggcctggtatcagcagaagcccggcaaggcccccaagctgctgatctacagcggcagcacactgcacagcggcgtgcccagcagattttccggctctggcagcggcaccgacttcaccctgaccatctctagcctccagcccgaggacttcgccacctactactgccagcagcaccacgagtaccccctgacattcggccagggcaccaaggtggaaatcaagagactcgagggacagcctaaggccaatcctaccgtgacactgttccctccaagcagcgaagaactccaggccaacaaggccacacttgtgtgcctgatctccgacttctaccctggggctgtgacagtggcttggaaggccgatggatctcctgtgaaagccggcgtggaaaccaccaagccatccaagcagagcaacaacaaatacgccgccagctcctacctgagcctgacacctgagcagtggaagtcccacagatcctacagctgccaagtgacccacgaaggcagcaccgtggaaaagacagtggcccctacagagtgcagcggcagagccgattgcggctttaccagcgagagctaccagcagggcgtgctgagcgccaccatcctgtacgagatcctgctgggcaaggccaccctgtacgccgtgctggtgtctgccctggtgctgatggctatggtcaagcggaaggacagccggggacgcgccaagagaagcggatctggcgtgaagcagaccctgaatttcgacctgctgaagctggctggcgacgtggaatccaacccaggccctactagtatggactggatttggcgcatccttttccttgtcggcgctgctaccggcgcgcattccttcgaacaggtgcaactccaggaatctggccccggactcgtgaagcccagcgagacactgagcctgacctgtaccgtgtccggctacaccatcaccagcggctacgactggtcctggatcagacagcctcctggcaagggcctggaatggatcggctacatcaactacggcggctccaccaactacaagcccagcctgggaagccgcgtgacaatcagcgtggacacctccaagaaccagttcagcctgaagctgagcagcgtgacagccgccgataccgccgtgtactactgcgcccggtacaacgagtacaagagctacatctacgattggtacttcgacttctggggccagggaaccctcgtgaccgtgtctagtacgcgtgcctctacaaagggaccctccgtgtttcctctggctcccagcagcaagtctacaagcggaggaacagccgctctgggctgcctggtcaaggattactttcccgagcctgtgaccgtgtcctggaatagcggagcactgacaagcggcgtgcacacctttccagccgtgctgcaaagcagcggcctgtactctctgagcagcgtggtcacagtgcctagctctagcctgggcacccagacctacatctgcaatgtgaaccacaagcctagcaacaccaaggtggacaagagagtggaacccaagagctgtatccccgaggacacattcttcccaagccccgagagcagctgcgacgtgaagctggtggaaaagagcttcgagacagacaccaacctgaacttccagaacctgagcgtgatcggcttcagaatcctgctgctgaaagtggccggctttaacctgctgatgaccctgcggctgtggtccagc

SEQ ID NO: 3279 - DNA, 2307 bp, Artificial Sequence
  Synthetic Polynucloetide
atggccttaccagtgaccgccttgctcctgccgctggccttgctgctccacgccgccaggccggaagtgcagctggttgaatctggcggaggactggttcagcctggcggatctctgagactgtcttgtgccgccagcggcttcagcttcagcgacttttggatgagctgggtccgacaggcccctggcaaaggacttgaatgggtcgccacaatcagccaggccggcagcgagaaggactacgtggactctgtgaagggcagattcaccatcagccgggacaacgccaagaagtccctgtacctccagatgaacagcctgagagccgaggacaccgccgtgtactattgtgcctctggcgtgtacagcttcgactacagaggccagggcaccctggtcacagtctcttctggtaccggcggaggcggatctggcggcggaggtagcggtggcggaggatctgaattccagtctgtggtcacacagcctccatccgtgtctgctgcccctggacagaaagtgaccatctcctgtagcggcagcagcagcaacatcggcaacaactacgtgtcctggtatcagcagctccccggcacagctcccaaactgctgatctacgacaacaacaagcggcccagcggcatccccgatagattttctggcagcaagagcggcaccagcgccacactgggaattaccggacttcagacaggcgacgaggccgactactactgtggcacatgggatggcagcctgtacaccatgcttttcggcggaggcaccaagctgacagtgcttctcgagggacagcctaaggccaatcctaccgtgacactgttccctccaagcagcgaagaactccaggccaacaaggccacacttgtgtgcctgatctccgacttctaccctggggctgtgacagtggcttggaaggccgatggatctcctgtgaaagccggcgtggaaaccaccaagccatccaagcagagcaacaacaaatacgccgccagctcctacctgagcctgacacctgagcagtggaagtcccacagatcctacagctgccaagtgacccacgaaggcagcaccgtggaaaagacagtggcccctacagagtgcagcggcagagccgattgcggctttaccagcgagagctaccagcagggcgtgctgagcgccaccatcctgtacgagatcctgctgggcaaggccaccctgtacgccgtgctggtgtctgccctggtgctgatggctatggtcaagcggaaggacagccggggacgcgccaagagaagcggatctggcgtgaagcagaccctgaatttcgacctgctgaagctggctggcgacgtggaatccaacccaggccctactagtatggactggatttggcgcatccttttccttgtcggcgctgctaccggcgcgcattccttcgaagaagtgcaactggtggaatctggcggcggactggttaagcctggcggatctctgagactgtcttgtgccgccagcggcttcaccttcagcaatgcctggatgagctgggttcgacaggcccctggaaaaggactggaatgggtcggattcatccggtccaaagcctacggcggcaccacagaatatgccgcctctgtgaagggcagattcaccatcagccgggacgacagcaagtctatcgcctacctccagatgaacaacctgaaaaccgaggacaccgccgtgtactactgcgccagagatggcctgtacagcagctcttggtacgacagcgattactggggccagggcacactggtcacagtgtcatctacgcgtgcctctacaaagggaccctccgtgtttcctctggctcccagcagcaagtctacaagcggaggaacagccgctctgggctgcctggtcaaggattactttcccgagcctgtgaccgtgtcctggaatagcggagcactgacaagcggcgtgcacacctttccagccgtgctgcaaagcagcggcctgtactctctgagcagcgtggtcacagtgcctagctctagcctgggcacccagacctacatctgcaatgtgaaccacaagcctagcaacaccaaggtggacaagagagtggaacccaagagctgtatccccgaggacacattcttcccaagccccgagagcagctgcgacgtgaagctggtggaaaagagcttcgagacagacaccaacctgaacttccagaacctgagcgtgatcggcttcagaatcctgctgctgaaagtggccggctttaacctgctgatgaccctgcggctgtggtccagc

SEQ ID NO: 3280 - DNA, 2322 bp, Artificial Sequence
  Synthetic Polynucloetide
atggccttaccagtgaccgccttgctcctgccgctggccttgctgctccacgccgccaggccggaagtgcagctggttgaatctggcggaggactggttcagcctggcggatctctgagactgtcttgtgccgccagcggcttcagcttcagcgacttttggatgagctgggtccgacaggcccctggcaaaggacttgaatgggtcgccacaatcagccaggccggcagcgagaaggactacgtggactctgtgaagggcagattcaccatcagccgggacaacgccaagaagtccctgtacctccagatgaacagcctgagagccgaggacaccgccgtgtactattgtgcctctggcgtgtacagcttcgactacagaggccagggcaccctggtcacagtctcttctggtaccggcggaggcggatctggcggcggaggtagcggtggcggaggatctgaattccagtctgtgctgacacagcctcctagtgtgtctggcgctcctggacagagagtgaccatctcttgtaccggcagcagcagcaatatcggagccggctatgacgtgcactggtatcagcagctccctggcacagcccctaaactgctgatcttcggcaacagcaacagacccagcggcgtgcccgatagattcagcggctttaagagcggcacaagcgccagcctggctatcactggactgcaagccgaggacgaggccgactacttctgccagagctacgatagcagcctgagcggcagcggagtgtttggcacaggcaccaaagtgacagtgcttggcctcgagggacagcctaaggccaatcctaccgtgacactgttccctccaagcagcgaagaactccaggccaacaaggccacacttgtgtgcctgatctccgacttctaccctggggctgtgacagtggcttggaaggccgatggatctcctgtgaaagccggcgtggaaaccaccaagccatccaagcagagcaacaacaaatacgccgccagctcctacctgagcctgacacctgagcagtggaagtcccacagatcctacagctgccaagtgacccacgaaggcagcaccgtggaaaagacagtggcccctacagagtgcagcggcagagccgattgcggctttaccagcgagagctaccagcagggcgtgctgagcgccaccatcctgtacgagatcctgctgggcaaggccaccctgtacgccgtgctggtgtctgccctggtgctgatggctatggtcaagcggaaggacagccggggacgcgccaagagaagcggatctggcgtgaagcagaccctgaatttcgacctgctgaagctggctggcgacgtggaatccaacccaggccctactagtatggactggatttggcgcatccttttccttgtcggcgctgctaccggcgcgcattccttcgaacaaatgcaactggttcaaagcggcggtggcctggtgcaacctggaagaagtctgagactgagctgtgccgccagcggcttcaccttcgatgattacgccatgcactgggtccgacaggcccctggaaaaggactggaatgggtgtccggcatctcctggaatagcggctctatcggctacgccgacagcgtgaagggcagattcaccatcagccgggacaacgccaagaacagcctgtacctccagatgaactccctgagagccgaggatacagccctgtactactgcgccaaggacatccacagcggcagctactacggcctgctgtactacgctatggacgtgtggggccagggcacaaccgtgacagtttcttctacgcgtgcctctacaaagggaccctccgtgtttcctctggctcccagcagcaagtctacaagcggaggaacagccgctctgggctgcctggtcaaggattactttcccgagcctgtgaccgtgtcctggaatagcggagcactgacaagcggcgtgcacacctttccagccgtgctgcaaagcagcggcctgtactctctgagcagcgtggtcacagtgcctagctctagcctgggcacccagacctacatctgcaatgtgaaccacaagcctagcaacaccaaggtggacaagagagtggaacccaagagctgtatccccgaggacacattcttcccaagccccgagagcagctgcgacgtgaagctggtggaaaagagcttcgagacagacaccaacctgaacttccagaacctgagcgtgatcggcttcagaatcctgctgctgaaagtggccggctttaacctgctgatgaccctgcggctgtggtccagc

SEQ ID NO: 3281 - DNA, 2322 bp, Artificial Sequence
  Synthetic Polynucloetide
atggccttaccagtgaccgccttgctcctgccgctggccttgctgctccacgccgccaggccggaagtgcagctggttgaatctggcggaggactggttcagcctggcggatctctgagactgtcttgtgccgccagcggcttcagcttcagcgacttttggatgagctgggtccgacaggcccctggcaaaggacttgaatgggtcgccacaatcagccaggccggcagcgagaaggactacgtggactctgtgaagggcagattcaccatcagccgggacaacgccaagaagtccctgtacctccagatgaacagcctgagagccgaggacaccgccgtgtactattgtgcctctggcgtgtacagcttcgactacagaggccagggcaccctggtcacagtctcttctggtaccggcggaggcggatctggcggcggaggtagcggtggcggaggatctgaattcctgcctgttctgacacagcctccatctgcctctggcacacctggacagagagtgaccatcagctgtagcggcagaagcagcaacatcggcagcaacagcgtgaactggtacagacagcttcctggcgctgcccctaagctgctgatctacagcaacaaccagcggcctcctggcgtgccagtcagattttctggcagcaagagcggcacaagcgccagcctggctatttctggactccagtctgaggacgaggccacctactactgtgccacctgggacgacaacctgaacgtgcactacgtgttcggcaccggcaccaaagtgacagtgcttggaagtagactcgagggacagcctaaggccaatcctaccgtgacactgttccctccaagcagcgaagaactccaggccaacaaggccacacttgtgtgcctgatctccgacttctaccctggggctgtgacagtggcttggaaggccgatggatctcctgtgaaagccggcgtggaaaccaccaagccatccaagcagagcaacaacaaatacgccgccagctcctacctgagcctgacacctgagcagtggaagtcccacagatcctacagctgccaagtgacccacgaaggcagcaccgtggaaaagacagtggcccctacagagtgcagcggcagagccgattgcggctttaccagcgagagctaccagcagggcgtgctgagcgccaccatcctgtacgagatcctgctgggcaaggccaccctgtacgccgtgctggtgtctgccctggtgctgatggctatggtcaagcggaaggacagccggggacgcgccaagagaagcggatctggcgtgaagcagaccctgaatttcgacctgctgaagctggctggcgacgtggaatccaacccaggccctactagtatggactggatttggcgcatccttttccttgtcggcgctgctaccggcgcgcattccttcgaacttgaaatggctcaggtgcagctggtgcagagcggagccgaagtgaagaaacctggcagcagcgtgaaggtgtcctgcaaagcttctggcggcaccttcagcagctacgccatctcttgggttcgacaggcccctggacaaggactggaatggatgggcagaatcatccccatcctgggaatcgccaactacgcccagaaattccagggcagagtgacaatcaccgccgacaagagcaccagcaccgcctacatggaactgagcagcctgagaagcgaggacaccgccgtgtactattgtgcaagaggcggctactacagccacgacatgtggagcgaagattggggccagggcacactggtcacagtgtcatctacgcgtgcctctacaaagggaccctccgtgtttcctctggctcccagcagcaagtctacaagcggaggaacagccgctctgggctgcctggtcaaggattactttcccgagcctgtgaccgtgtcctggaatagcggagcactgacaagcggcgtgcacacctttccagccgtgctgcaaagcagcggcctgtactctctgagcagcgtggtcacagtgcctagctctagcctgggcacccagacctacatctgcaatgtgaaccacaagcctagcaacaccaaggtggacaagagagtggaacccaagagctgtatccccgaggacacattcttcccaagccccgagagcagctgcgacgtgaagctggtggaaaagagcttcgagacagacaccaacctgaacttccagaacctgagcgtgatcggcttcagaatcctgctgctgaaagtggccggctttaacctgctgatgaccctgcggctgtggtccagc

SEQ ID NO: 3282 - DNA, 2304 bp, Artificial Sequence
  Synthetic Polynucloetide
atggccttaccagtgaccgccttgctcctgccgctggccttgctgctccacgccgccaggccggaagtgcagctggttgaatctggcggaggactggttcagcctggcggatctctgagactgtcttgtgccgccagcggcttcagcttcagcgacttttggatgagctgggtccgacaggcccctggcaaaggacttgaatgggtcgccacaatcagccaggccggcagcgagaaggactacgtggactctgtgaagggcagattcaccatcagccgggacaacgccaagaagtccctgtacctccagatgaacagcctgagagccgaggacaccgccgtgtactattgtgcctctggcgtgtacagcttcgactacagaggccagggcaccctggtcacagtctcttctggtaccggcggaggcggatctggcggcggaggtagcggtggcggaggatctgaattcgacttcgtgatgacacagagccctgatagcctggccgtgtctctcggcgagcgagtgaccatgagctgcaagtctagccagagcctgctgaacagcggcaaccagaagaactacctgacctggtatcagcagaagcccggccagcctcctaagctgctgatctactgggccagcaccagagaaagcggcgtgcccgatagattttctggctctggcagcggcaccgacttcaccctgacaatttctagcctgcaagccgaggacgtggccgtgtactactgccagaacgactacagctacccctacaccttcggccagggcaccaagctggaaatcaaactcgagggacagcctaaggccaatcctaccgtgacactgttccctccaagcagcgaagaactccaggccaacaaggccacacttgtgtgcctgatctccgacttctaccctggggctgtgacagtggcttggaaggccgatggatctcctgtgaaagccggcgtggaaaccaccaagccatccaagcagagcaacaacaaatacgccgccagctcctacctgagcctgacacctgagcagtggaagtcccacagatcctacagctgccaagtgacccacgaaggcagcaccgtggaaaagacagtggcccctacagagtgcagcggcagagccgattgcggctttaccagcgagagctaccagcagggcgtgctgagcgccaccatcctgtacgagatcctgctgggcaaggccaccctgtacgccgtgctggtgtctgccctggtgctgatggctatggtcaagcggaaggacagccggggacgcgccaagagaagcggatctggcgtgaagcagaccctgaatttcgacctgctgaagctggctggcgacgtggaatccaacccaggccctactagtatggactggatttggcgcatccttttccttgtcggcgctgctaccggcgcgcattccttcgaagaagtgcaactggttcagagcggagccgagctgaagaaacctggggccagcgtgaaggtgtcctgtaaagccagcggctacacctttaccgactactacatgaaatgggtccgacaggccccaggccagggactcgaatggatcggcgatattatccccagcaacggggccaccttctacaaccagaaattcaagggccgcgtgaccatcaccgtggacaagagcacaagcaccgcctacatggaactgagcagcctgagaagcgaggacaccgccgtgtattattgcgccagaagccatctgctgcgggccagttggttcgcctattggggacagggaaccctggtcaccgttagctctacgcgtgcctctacaaagggaccctccgtgtttcctctggctcccagcagcaagtctacaagcggaggaacagccgctctgggctgcctggtcaaggattactttcccgagcctgtgaccgtgtcctggaatagcggagcactgacaagcggcgtgcacacctttccagccgtgctgcaaagcagcggcctgtactctctgagcagcgtggtcacagtgcctagctctagcctgggcacccagacctacatctgcaatgtgaaccacaagcctagcaacaccaaggtggacaagagagtggaacccaagagctgtatccccgaggacacattcttcccaagccccgagagcagctgcgacgtgaagctggtggaaaagagcttcgagacagacaccaacctgaacttccagaacctgagcgtgatcggcttcagaatcctgctgctgaaagtggccggctttaacctgctgatgaccctgcggctgtggtccagc

SEQ ID NO: 3283 - DNA, 2304 bp, Artificial Sequence
  Synthetic Polynucloetide
atggccttaccagtgaccgccttgctcctgccgctggccttgctgctccacgccgccaggccggaagtgcagctggttgaatctggcggaggactggttcagcctggcggatctctgagactgtcttgtgccgccagcggcttcagcttcagcgacttttggatgagctgggtccgacaggcccctggcaaaggacttgaatgggtcgccacaatcagccaggccggcagcgagaaggactacgtggactctgtgaagggcagattcaccatcagccgggacaacgccaagaagtccctgtacctccagatgaacagcctgagagccgaggacaccgccgtgtactattgtgcctctggcgtgtacagcttcgactacagaggccagggcaccctggtcacagtctcttctggtaccggcggaggcggatctggcggcggaggtagcggtggcggaggatctgaattcgacttcgtgatgacacagagccctgatagcctggccgtgtctctcggcgagcgagtgaccatgagctgcaagtctagccagagcctgctgaacagcggcaaccagaagaactacctgacctggtatcagcagaagcccggccagcctcctaagctgctgatctactgggccagcaccagagaaagcggcgtgcccgatagattttctggctctggcagcggcaccgacttcaccctgacaatttctagcctgcaagccgaggacgtggccgtgtactactgccagaacgactacagctacccctacaccttcggccagggcaccaagctggaaatcaaactcgagggacagcctaaggccaatcctaccgtgacactgttccctccaagcagcgaagaactccaggccaacaaggccacacttgtgtgcctgatctccgacttctaccctggggctgtgacagtggcttggaaggccgatggatctcctgtgaaagccggcgtggaaaccaccaagccatccaagcagagcaacaacaaatacgccgccagctcctacctgagcctgacacctgagcagtggaagtcccacagatcctacagctgccaagtgacccacgaaggcagcaccgtggaaaagacagtggcccctacagagtgcagcggcagagccgattgcggctttaccagcgagagctaccagcagggcgtgctgagcgccaccatcctgtacgagatcctgctgggcaaggccaccctgtacgccgtgctggtgtctgccctggtgctgatggctatggtcaagcggaaggacagccggggacgcgccaagagaagcggatctggcgtgaagcagaccctgaatttcgacctgctgaagctggctggcgacgtggaatccaacccaggccctactagtatggactggatttggcgcatccttttccttgtcggcgctgctaccggcgcgcattccttcgaacaagtgcaactggttcagagcggagccgagctgaagaaacctggggccagcgtgaaggtgtcctgtaaagccagcggctacacctttaccgactactacatgaaatgggtccgacaggccccaggccagggactcgaatggatcggcgatattatccccagcaacggggccaccttctacaaccagaaattcaagggccgcgtgaccatcaccgtggacaagagcacaagcaccgcctacatggaactgagcagcctgagaagcgaggacaccgccgtgtattattgcgccagaagccatctgctgcgggccagttggttcgcctattggggacagggaaccctggtcaccgttagctctacgcgtgcctctacaaagggaccctccgtgtttcctctggctcccagcagcaagtctacaagcggaggaacagccgctctgggctgcctggtcaaggattactttcccgagcctgtgaccgtgtcctggaatagcggagcactgacaagcggcgtgcacacctttccagccgtgctgcaaagcagcggcctgtactctctgagcagcgtggtcacagtgcctagctctagcctgggcacccagacctacatctgcaatgtgaaccacaagcctagcaacaccaaggtggacaagagagtggaacccaagagctgtatccccgaggacacattcttcccaagccccgagagcagctgcgacgtgaagctggtggaaaagagcttcgagacagacaccaacctgaacttccagaacctgagcgtgatcggcttcagaatcctgctgctgaaagtggccggctttaacctgctgatgaccctgcggctgtggtccagc

SEQ ID NO: 3284 - DNA, 2274 bp, Artificial Sequence
  Synthetic Polynucloetide
atggccttaccagtgaccgccttgctcctgccgctggccttgctgctccacgccgccaggccggaagtgcagctggttgaatctggcggaggactggttcagcctggcggatctctgagactgtcttgtgccgccagcggcttcagcttcagcgacttttggatgagctgggtccgacaggcccctggcaaaggacttgaatgggtcgccacaatcagccaggccggcagcgagaaggactacgtggactctgtgaagggcagattcaccatcagccgggacaacgccaagaagtccctgtacctccagatgaacagcctgagagccgaggacaccgccgtgtactattgtgcctctggcgtgtacagcttcgactacagaggccagggcaccctggtcacagtctcttctggtaccggcggaggcggatctggcggcggaggtagcggtggcggaggatctgaattcgacgtgcagatcacacagagccctagctacctggctgcctctcctggcgagacaatcaccatcaactgtcgggccagcaagagcatcagcaaggacctggcctggtatcaagagaagcccggcaagaccaacaagctgctgatctacagcggcagcacactccagtctggcatccccagcagattttccggctctggcagcggcaccgatttcaccctgaccataagcagcctggaacctgaggacttcgccatgtactactgccagcagcacaacaagtacccctacacctttggcggaggcaccaagctggaaatcaagagactcgagggacagcctaaggccaatcctaccgtgacactgttccctccaagcagcgaagaactccaggccaacaaggccacacttgtgtgcctgatctccgacttctaccctggggctgtgacagtggcttggaaggccgatggatctcctgtgaaagccggcgtggaaaccaccaagccatccaagcagagcaacaacaaatacgccgccagctcctacctgagcctgacacctgagcagtggaagtcccacagatcctacagctgccaagtgacccacgaaggcagcaccgtggaaaagacagtggcccctacagagtgcagcggcagagccgattgcggctttaccagcgagagctaccagcagggcgtgctgagcgccaccatcctgtacgagatcctgctgggcaaggccaccctgtacgccgtgctggtgtctgccctggtgctgatggctatggtcaagcggaaggacagccggggacgcgccaagagaagcggatctggcgtgaagcagaccctgaatttcgacctgctgaagctggctggcgacgtggaatccaacccaggccctactagtatggactggatttggcgcatccttttccttgtcggcgctgctaccggcgcgcattccttcgaacaagttcaactgcaacagcctggggccgagcttgttagacctggcgcttctgtgaagctgagctgcaaggccagcggctacaccttcaccagctactggatgaactgggtcaagcagcggcctgaccagggcctcgaatggatcggcagaatcgacccctacgacagcgagacacactacaaccagaagttcaaggacaaggccatcctgaccgtggacaagagcagctccaccgcctacatgcaactgagcagcctgacctctgaggatagcgccgtgtactattgcgccagaggcaactgggacgactattggggccagggcacaaccctgacagtgtctagtacgcgtgcctctacaaagggaccctccgtgtttcctctggctcccagcagcaagtctacaagcggaggaacagccgctctgggctgcctggtcaaggattactttcccgagcctgtgaccgtgtcctggaatagcggagcactgacaagcggcgtgcacacctttccagccgtgctgcaaagcagcggcctgtactctctgagcagcgtggtcacagtgcctagctctagcctgggcacccagacctacatctgcaatgtgaaccacaagcctagcaacaccaaggtggacaagagagtggaacccaagagctgtatccccgaggacacattcttcccaagccccgagagcagctgcgacgtgaagctggtggaaaagagcttcgagacagacaccaacctgaacttccagaacctgagcgtgatcggcttcagaatcctgctgctgaaagtggccggctttaacctgctgatgaccctgcggctgtggtccagc

SEQ ID NO: 3285 - DNA, 2280 bp, Artificial Sequence
  Synthetic Polynucloetide
atggccttaccagtgaccgccttgctcctgccgctggccttgctgctccacgccgccaggccggaagtgcagctggttgaatctggcggaggactggttcagcctggcggatctctgagactgtcttgtgccgccagcggcttcagcttcagcgacttttggatgagctgggtccgacaggcccctggcaaaggacttgaatgggtcgccacaatcagccaggccggcagcgagaaggactacgtggactctgtgaagggcagattcaccatcagccgggacaacgccaagaagtccctgtacctccagatgaacagcctgagagccgaggacaccgccgtgtactattgtgcctctggcgtgtacagcttcgactacagaggccagggcaccctggtcacagtctcttctggtaccggcggaggcggatctggcggcggaggtagcggtggcggaggatctgaattcgagatcgtgctgacacagagccctaccagcatgacagcctctccaggcgagcaagtgaccatcacctgtagagccagcagcagcatcaactacatgcactggtatcagcagaagcctggcgcaagccccagaccttggatctacgagacaagcaagctggcctccggcgtgcccgatagattttctggatctgccagcggcaccagctacagcctgaccatcaacaacatggaagccgaggacgccgccacctactactgccagcagtggaattacccctcctggacctttggcggaggcaccaagctggaacttaaactcgagggacagcctaaggccaatcctaccgtgacactgttccctccaagcagcgaagaactccaggccaacaaggccacacttgtgtgcctgatctccgacttctaccctggggctgtgacagtggcttggaaggccgatggatctcctgtgaaagccggcgtggaaaccaccaagccatccaagcagagcaacaacaaatacgccgccagctcctacctgagcctgacacctgagcagtggaagtcccacagatcctacagctgccaagtgacccacgaaggcagcaccgtggaaaagacagtggcccctacagagtgcagcggcagagccgattgcggctttaccagcgagagctaccagcagggcgtgctgagcgccaccatcctgtacgagatcctgctgggcaaggccaccctgtacgccgtgctggtgtctgccctggtgctgatggctatggtcaagcggaaggacagccggggacgcgccaagagaagcggatctggcgtgaagcagaccctgaatttcgacctgctgaagctggctggcgacgtggaatccaacccaggccctactagtatggactggatttggcgcatccttttccttgtcggcgctgctaccggcgcgcattccttcgaagaagtgcagctcgttgagtctggtggcggactggttcagcctggaagaagcctgaagctgagctgtgccgccagcggcttcaccttcagcgactacaatatggcctgggtccgacaggcccctaagaaaggactggaatgggtcgccaccatcctgtacgatggcggcagaacctactaccggggcagcgtgaagggcagattcaccatcagcagagacaacgccaagagcaccctgtacctgcggatggactctctgagaagcgaggataccgccacatattactgtgccacacacagccggggcaccgactactttgattattggggccagggcgtgatggttaccgtgtctagtacgcgtgcctctacaaagggaccctccgtgtttcctctggctcccagcagcaagtctacaagcggaggaacagccgctctgggctgcctggtcaaggattactttcccgagcctgtgaccgtgtcctggaatagcggagcactgacaagcggcgtgcacacctttccagccgtgctgcaaagcagcggcctgtactctctgagcagcgtggtcacagtgcctagctctagcctgggcacccagacctacatctgcaatgtgaaccacaagcctagcaacaccaaggtggacaagagagtggaacccaagagctgtatccccgaggacacattcttcccaagccccgagagcagctgcgacgtgaagctggtggaaaagagcttcgagacagacaccaacctgaacttccagaacctgagcgtgatcggcttcagaatcctgctgctgaaagtggccggctttaacctgctgatgaccctgcggctgtggtccagc

SEQ ID NO: 3286 - DNA, 2307 bp, Artificial Sequence
  Synthetic Polynucloetide
atggccttaccagtgaccgccttgctcctgccgctggccttgctgctccacgccgccaggccggaagtgcagctggttgaatctggcggaggactggttcagcctggcggatctctgagactgtcttgtgccgccagcggcttcagcttcagcgacttttggatgagctgggtccgacaggcccctggcaaaggacttgaatgggtcgccacaatcagccaggccggcagcgagaaggactacgtggactctgtgaagggcagattcaccatcagccgggacaacgccaagaagtccctgtacctccagatgaacagcctgagagccgaggacaccgccgtgtactattgtgcctctggcgtgtacagcttcgactacagaggccagggcaccctggtcacagtctcttctggtaccggcggaggcggatctggcggcggaggtagcggtggcggaggatctgaattcgacatcgtgatgacacagagcccttctagcctggccgtgtctgagggcgagacagtgaccatcaactgcaagagcagccagagcttcctgtctagcggcgacggcaagaattacgtggcctggtatcagtacaagcccggacagagccccaagctgctgatctactgggccagcacaagacagagcggcgtgcccgatagattcatcggctctggcagcggcaccgacttcaccctgacaatctctacagtgcaggccgaggacctggctatctactactgccagcagtattacgacacccctctgacctttggctccggcaccaagctggaaatcaaactcgagggacagcctaaggccaatcctaccgtgacactgttccctccaagcagcgaagaactccaggccaacaaggccacacttgtgtgcctgatctccgacttctaccctggggctgtgacagtggcttggaaggccgatggatctcctgtgaaagccggcgtggaaaccaccaagccatccaagcagagcaacaacaaatacgccgccagctcctacctgagcctgacacctgagcagtggaagtcccacagatcctacagctgccaagtgacccacgaaggcagcaccgtggaaaagacagtggcccctacagagtgcagcggcagagccgattgcggctttaccagcgagagctaccagcagggcgtgctgagcgccaccatcctgtacgagatcctgctgggcaaggccaccctgtacgccgtgctggtgtctgccctggtgctgatggctatggtcaagcggaaggacagccggggacgcgccaagagaagcggatctggcgtgaagcagaccctgaatttcgacctgctgaagctggctggcgacgtggaatccaacccaggccctactagtatggactggatttggcgcatccttttccttgtcggcgctgctaccggcgcgcattccttcgaagaagtgaagctgcaagagtctggccccagcctggtgcagagtagccaaacactgagcctgacctgtaccgtgtccggctttagcctgaccagctaccacatccactgggtccgacagacccctggcaaaggactggaatggatgggcgtgatgtggagcgacggcgacaccagctataacagcgccctgaagtcccggctgagcatcagcagagatacaagccagagccaggtgttcctgaagatgaacagcctccagaccgaggacaccgccacctactattgtgccagaggctactacagcagctacctgtacctttggttcgcctattggggccagggcaccctggttacagtcagctctacgcgtgcctctacaaagggaccctccgtgtttcctctggctcccagcagcaagtctacaagcggaggaacagccgctctgggctgcctggtcaaggattactttcccgagcctgtgaccgtgtcctggaatagcggagcactgacaagcggcgtgcacacctttccagccgtgctgcaaagcagcggcctgtactctctgagcagcgtggtcacagtgcctagctctagcctgggcacccagacctacatctgcaatgtgaaccacaagcctagcaacaccaaggtggacaagagagtggaacccaagagctgtatccccgaggacacattcttcccaagccccgagagcagctgcgacgtgaagctggtggaaaagagcttcgagacagacaccaacctgaacttccagaacctgagcgtgatcggcttcagaatcctgctgctgaaagtggccggctttaacctgctgatgaccctgcggctgtggtccagc

SEQ ID NO: 3287 - DNA, 2319 bp, Artificial Sequence
  Synthetic Polynucloetide
atggccttaccagtgaccgccttgctcctgccgctggccttgctgctccacgccgccaggccggaagtgcagctggttgaatctggcggaggactggttcagcctggcggatctctgagactgtcttgtgccgccagcggcttcagcttcagcgacttttggatgagctgggtccgacaggcccctggcaaaggacttgaatgggtcgccacaatcagccaggccggcagcgagaaggactacgtggactctgtgaagggcagattcaccatcagccgggacaacgccaagaagtccctgtacctccagatgaacagcctgagagccgaggacaccgccgtgtactattgtgcctctggcgtgtacagcttcgactacagaggccagggcaccctggtcacagtctcttctggtaccggcggaggcggatctggcggcggaggtagcggtggcggaggatctgaattcgacgtgctgatgacccagacacctgtgtctctgccagtgtctctcggaggccaggtgtccatctcctgtagaagcagccagagcctggtgcactccgacggcgatacctacctgcactggtatctccagaagcctggacagagccctcagctcctgatctaccgggtgtccaacagattcagcggcgtgcccgatagattttccggcagcggctctggcaccgacttcaccctgaagatcagcagagtggaacccgaggacctgggcctgtactactgtctccagaccacacacttcccaccttggacctttggcggaggcaccaagctggaaatgaaactcgagggacagcctaaggccaatcctaccgtgacactgttccctccaagcagcgaagaactccaggccaacaaggccacacttgtgtgcctgatctccgacttctaccctggggctgtgacagtggcttggaaggccgatggatctcctgtgaaagccggcgtggaaaccaccaagccatccaagcagagcaacaacaaatacgccgccagctcctacctgagcctgacacctgagcagtggaagtcccacagatcctacagctgccaagtgacccacgaaggcagcaccgtggaaaagacagtggcccctacagagtgcagcggcagagccgattgcggctttaccagcgagagctaccagcagggcgtgctgagcgccaccatcctgtacgagatcctgctgggcaaggccaccctgtacgccgtgctggtgtctgccctggtgctgatggctatggtcaagcggaaggacagccggggacgcgccaagagaagcggatctggcgtgaagcagaccctgaatttcgacctgctgaagctggctggcgacgtggaatccaacccaggccctactagtatggactggatttggcgcatccttttccttgtcggcgctgctaccggcgcgcattccttcgaacaggttcagctccagcagtctggacccgagcttagaaggccaggatctagcgtcagactgagctgcaaggccagcggctaccggatcaaggacttcctgatccactggattaagaacagacccgagcacggcctggaatggatcggatggattgaccctgaggacggcgagactaagtacgcccagaagttccagaccaaggccacactgaccgccgacacctctagcaacaccgcctacatgcaactgagcagcctgaccagcgaggacaccgccacctacttttgtgctagatggggcgacgtgtactacggcctgatgagaggccatgtgatggatgcctggggccagggaacaagcgtgacagtctcttctacgcgtgcctctacaaagggaccctccgtgtttcctctggctcccagcagcaagtctacaagcggaggaacagccgctctgggctgcctggtcaaggattactttcccgagcctgtgaccgtgtcctggaatagcggagcactgacaagcggcgtgcacacctttccagccgtgctgcaaagcagcggcctgtactctctgagcagcgtggtcacagtgcctagctctagcctgggcacccagacctacatctgcaatgtgaaccacaagcctagcaacaccaaggtggacaagagagtggaacccaagagctgtatccccgaggacacattcttcccaagccccgagagcagctgcgacgtgaagctggtggaaaagagcttcgagacagacaccaacctgaacttccagaacctgagcgtgatcggcttcagaatcctgctgctgaaagtggccggctttaacctgctgatgaccctgcggctgtggtccagc

SEQ ID NO: 3288 - DNA, 2304 bp, Artificial Sequence
  Synthetic Polynucloetide
atggccttaccagtgaccgccttgctcctgccgctggccttgctgctccacgccgccaggccggaagtgcagctggttgaatctggcggaggactggttcagcctggcggatctctgagactgtcttgtgccgccagcggcttcagcttcagcgacttttggatgagctgggtccgacaggcccctggcaaaggacttgaatgggtcgccacaatcagccaggccggcagcgagaaggactacgtggactctgtgaagggcagattcaccatcagccgggacaacgccaagaagtccctgtacctccagatgaacagcctgagagccgaggacaccgccgtgtactattgtgcctctggcgtgtacagcttcgactacagaggccagggcaccctggtcacagtctcttctggtaccggcggaggcggatctggcggcggaggtagcggtggcggaggatctgaattcgacatcgtgatgacacagagccccgccacactgtcactgtctccaggcgaaagagccacactgagctgtcggagcagcaagagcctccagaacgtgaacggcaacacctacctgtactggttccagcagaagcccggccagtctcctcagctcctgatctacagaatgagcaacctgaacagcggcgtgcccgacagattttctggcagcggaagcggcaccgagttcaccctgaccataagcagcctggaacctgaggacttcgccgtgtactactgtatgcagcacctggaataccccatcaccttcggagccggcaccaagctggaaatcaaactcgagggacagcctaaggccaatcctaccgtgacactgttccctccaagcagcgaagaactccaggccaacaaggccacacttgtgtgcctgatctccgacttctaccctggggctgtgacagtggcttggaaggccgatggatctcctgtgaaagccggcgtggaaaccaccaagccatccaagcagagcaacaacaaatacgccgccagctcctacctgagcctgacacctgagcagtggaagtcccacagatcctacagctgccaagtgacccacgaaggcagcaccgtggaaaagacagtggcccctacagagtgcagcggcagagccgattgcggctttaccagcgagagctaccagcagggcgtgctgagcgccaccatcctgtacgagatcctgctgggcaaggccaccctgtacgccgtgctggtgtctgccctggtgctgatggctatggtcaagcggaaggacagccggggacgcgccaagagaagcggatctggcgtgaagcagaccctgaatttcgacctgctgaagctggctggcgacgtggaatccaacccaggccctactagtatggactggatttggcgcatccttttccttgtcggcgctgctaccggcgcgcattccttcgaagaagtgcaactggttgaatctggcggcggactggttaagcctggcggatctctgaagctgagctgtgccgccagcggctacacctttaccagctacgtgatgcactgggtccgacaggcccctggcaaaggacttgagtggatcggctacatcaacccctacaacgatggcaccaagtacaacgagaagttccagggcagagtgaccatcagctccgacaagagcatcagcaccgcctacatggaactgagcagcctgagaagcgaggataccgccatgtactattgcgccagaggcacctactactacggcaccagagtgttcgactactggggccagggaaccctggtcacagtctcttctacgcgtgcctctacaaagggaccctccgtgtttcctctggctcccagcagcaagtctacaagcggaggaacagccgctctgggctgcctggtcaaggattactttcccgagcctgtgaccgtgtcctggaatagcggagcactgacaagcggcgtgcacacctttccagccgtgctgcaaagcagcggcctgtactctctgagcagcgtggtcacagtgcctagctctagcctgggcacccagacctacatctgcaatgtgaaccacaagcctagcaacaccaaggtggacaagagagtggaacccaagagctgtatccccgaggacacattcttcccaagccccgagagcagctgcgacgtgaagctggtggaaaagagcttcgagacagacaccaacctgaacttccagaacctgagcgtgatcggcttcagaatcctgctgctgaaagtggccggctttaacctgctgatgaccctgcggctgtggtccagc

SEQ ID NO: 3289 - DNA, 2292 bp, Artificial Sequence
  Synthetic Polynucloetide
atggccttaccagtgaccgccttgctcctgccgctggccttgctgctccacgccgccaggccggaagtgcagctggttgaatctggcggaggactggttcagcctggcggatctctgagactgtcttgtgccgccagcggcttcagcttcagcgacttttggatgagctgggtccgacaggcccctggcaaaggacttgaatgggtcgccacaatcagccaggccggcagcgagaaggactacgtggactctgtgaagggcagattcaccatcagccgggacaacgccaagaagtccctgtacctccagatgaacagcctgagagccgaggacaccgccgtgtactattgtgcctctggcgtgtacagcttcgactacagaggccagggcaccctggtcacagtctcttctggtaccggcggaggcggatctggcggcggaggtagcggtggcggaggatctgaattcgacatccagatgacacagagccctagcagcctgtctgccagcgtgggagacagagtgaccatcacatgcaaggccagcgaccacatcaacaactggctggcctggtatcagcagaagcctggacaggcccctaagctgctgatctacggcgctaccacactggaaacaggcgtgcccagcagattttctggcagcggctctggcaccgactacaccctgacaatatccagcctccagcctgaggacttcgccacctactactgtcagcagagctggaacaccccttggacattcggccagggcaccaagctggaaatcaagagactcgagggacagcctaaggccaatcctaccgtgacactgttccctccaagcagcgaagaactccaggccaacaaggccacacttgtgtgcctgatctccgacttctaccctggggctgtgacagtggcttggaaggccgatggatctcctgtgaaagccggcgtggaaaccaccaagccatccaagcagagcaacaacaaatacgccgccagctcctacctgagcctgacacctgagcagtggaagtcccacagatcctacagctgccaagtgacccacgaaggcagcaccgtggaaaagacagtggcccctacagagtgcagcggcagagccgattgcggctttaccagcgagagctaccagcagggcgtgctgagcgccaccatcctgtacgagatcctgctgggcaaggccaccctgtacgccgtgctggtgtctgccctggtgctgatggctatggtcaagcggaaggacagccggggacgcgccaagagaagcggatctggcgtgaagcagaccctgaatttcgacctgctgaagctggctggcgacgtggaatccaacccaggccctactagtatggactggatttggcgcatccttttccttgtcggcgctgctaccggcgcgcattccttcgaacaagttcagcttcaacagcctggcgctgagctggtcaaacctggcgcttctgtgaagatgagctgcaaagccagcggctacgccttcagcagctactggatcaactggatgaagcagaaacccggccagggactcgaatggatcggccaaatctatcccggcgacggcgacaccaactacaacggcaagttcaagggcagagccacactgaccgccgatacctctagcagcacagcctacatgcagctgagcagcctgaccagcgaagatagcgccgtgtacttctgtgcccggtccatcacaacagtcgtgggctgcgctatggactattggggccagggaacaagcgtgaccgtgtctagtacgcgtgcctctacaaagggaccctccgtgtttcctctggctcccagcagcaagtctacaagcggaggaacagccgctctgggctgcctggtcaaggattactttcccgagcctgtgaccgtgtcctggaatagcggagcactgacaagcggcgtgcacacctttccagccgtgctgcaaagcagcggcctgtactctctgagcagcgtggtcacagtgcctagctctagcctgggcacccagacctacatctgcaatgtgaaccacaagcctagcaacaccaaggtggacaagagagtggaacccaagagctgtatccccgaggacacattcttcccaagccccgagagcagctgcgacgtgaagctggtggaaaagagcttcgagacagacaccaacctgaacttccagaacctgagcgtgatcggcttcagaatcctgctgctgaaagtggccggctttaacctgctgatgaccctgcggctgtggtccagc

SEQ ID NO: 3290 - DNA, 2298 bp, Artificial Sequence
  Synthetic Polynucloetide
atggccttaccagtgaccgccttgctcctgccgctggccttgctgctccacgccgccaggccggaagtgcagctggttgaatctggcggaggactggttcagcctggcggatctctgagactgtcttgtgccgccagcggcttcagcttcagcgacttttggatgagctgggtccgacaggcccctggcaaaggacttgaatgggtcgccacaatcagccaggccggcagcgagaaggactacgtggactctgtgaagggcagattcaccatcagccgggacaacgccaagaagtccctgtacctccagatgaacagcctgagagccgaggacaccgccgtgtactattgtgcctctggcgtgtacagcttcgactacagaggccagggcaccctggtcacagtctcttctggtaccggcggaggcggatctggcggcggaggtagcggtggcggaggatctgaattccagatcgtgctgtctcagtctcctgccatcctgagcgcttccccaggcgagaaagtgaccatgacctgtagagccagcagcagcgtgtcctacatgcactggtatcagcagaagcccggcagcagccctaagccttggatctacgccaccagcaatctggcctctggcgtgccagccagattttctggctctggcagcggcaccagctacagcttcacaatcagcagagtggaagccgaggacgccgccacctactattgtcagcagtggaccttcaatcctcctaccttcggcggaggcacccggctggaaatcaaaagaacagtggctgctctcgagggacagcctaaggccaatcctaccgtgacactgttccctccaagcagcgaagaactccaggccaacaaggccacacttgtgtgcctgatctccgacttctaccctggggctgtgacagtggcttggaaggccgatggatctcctgtgaaagccggcgtggaaaccaccaagccatccaagcagagcaacaacaaatacgccgccagctcctacctgagcctgacacctgagcagtggaagtcccacagatcctacagctgccaagtgacccacgaaggcagcaccgtggaaaagacagtggcccctacagagtgcagcggcagagccgattgcggctttaccagcgagagctaccagcagggcgtgctgagcgccaccatcctgtacgagatcctgctgggcaaggccaccctgtacgccgtgctggtgtctgccctggtgctgatggctatggtcaagcggaaggacagccggggacgcgccaagagaagcggatctggcgtgaagcagaccctgaatttcgacctgctgaagctggctggcgacgtggaatccaacccaggccctactagtatggactggatttggcgcatccttttccttgtcggcgctgctaccggcgcgcattccttcgaacaggcttatctgcaacagagcggagccgaactcgtcagacctggcgcttctgtgaagatgagctgcaaggccagcggctacaccttcaccagctataatatgcactgggtcaagcagacccctcggcagggactcgaatggatcggcggaatctatcccggcaacggcgacacctcctacaaccagaagttcaagggcaaagccacactgaccgtgggcaagagcagcagcaccgcctatatgcagctcagcagcctgaccagcgaggacagcgccgtgtacttctgcgccagatacgactacaactacgctatggactactggggccagggcaccagcgtgacagttagctctgccagcacgcgtgcctctacaaagggaccctccgtgtttcctctggctcccagcagcaagtctacaagcggaggaacagccgctctgggctgcctggtcaaggattactttcccgagcctgtgaccgtgtcctggaatagcggagcactgacaagcggcgtgcacacctttccagccgtgctgcaaagcagcggcctgtactctctgagcagcgtggtcacagtgcctagctctagcctgggcacccagacctacatctgcaatgtgaaccacaagcctagcaacaccaaggtggacaagagagtggaacccaagagctgtatccccgaggacacattcttcccaagccccgagagcagctgcgacgtgaagctggtggaaaagagcttcgagacagacaccaacctgaacttccagaacctgagcgtgatcggcttcagaatcctgctgctgaaagtggccggctttaacctgctgatgaccctgcggctgtggtccagc

SEQ ID NO: 3291 - DNA, 2292 bp, Artificial Sequence
  Synthetic Polynucloetide
atggccttaccagtgaccgccttgctcctgccgctggccttgctgctccacgccgccaggccggaagtgcagctggttgaatctggcggaggactggttcagcctggcggatctctgagactgtcttgtgccgccagcggcttcagcttcagcgacttttggatgagctgggtccgacaggcccctggcaaaggacttgaatgggtcgccacaatcagccaggccggcagcgagaaggactacgtggactctgtgaagggcagattcaccatcagccgggacaacgccaagaagtccctgtacctccagatgaacagcctgagagccgaggacaccgccgtgtactattgtgcctctggcgtgtacagcttcgactacagaggccagggcaccctggtcacagtctcttctggtaccggcggaggcggatctggcggcggaggtagcggtggcggaggatctgaattcgagatcgtgctgacacagagccctgccaccctgtctctgagccctggcgaaagagccaccctgagctgtagagccagccagagcgtgtccagctacctggcctggtatcagcagaagcccggccaggctccccggctgctgatctacgatgccagcaatagagccaccggcatccccgccagattttccggctctggcagcggcaccgacttcaccctgaccatcagctccctggaacccgaggacttcgccgtgtactactgccagcagcggagcaactggcccatcacattcggccagggcacccggctggaaatcaaactcgagggacagcctaaggccaatcctaccgtgacactgttccctccaagcagcgaagaactccaggccaacaaggccacacttgtgtgcctgatctccgacttctaccctggggctgtgacagtggcttggaaggccgatggatctcctgtgaaagccggcgtggaaaccaccaagccatccaagcagagcaacaacaaatacgccgccagctcctacctgagcctgacacctgagcagtggaagtcccacagatcctacagctgccaagtgacccacgaaggcagcaccgtggaaaagacagtggcccctacagagtgcagcggcagagccgattgcggctttaccagcgagagctaccagcagggcgtgctgagcgccaccatcctgtacgagatcctgctgggcaaggccaccctgtacgccgtgctggtgtctgccctggtgctgatggctatggtcaagcggaaggacagccggggacgcgccaagagaagcggatctggcgtgaagcagaccctgaatttcgacctgctgaagctggctggcgacgtggaatccaacccaggccctactagtatggactggatttggcgcatccttttccttgtcggcgctgctaccggcgcgcattccttcgaagaggtgcagcttgttgagtctggcggaggactggtgcagcccgatagaagcctgagactgtcttgtgccgccagcggcttcaccttccacgattatgccatgcactgggtccgacaggcccctggcaaaggacttgaatgggtgtccaccatctcttggaacagcggcacaatcggctacgccgactctgtgaagggcagattcaccatcagccgggacaacgccaagaacagcctgtacctccagatgaactccctgagagccgaggacacagccctgtactactgcgccaaggacatccagtacggcaactactactacggcatggacgtgtggggccagggcacaacagtgacagtctcttctacgcgtgcctctacaaagggaccctccgtgtttcctctggctcccagcagcaagtctacaagcggaggaacagccgctctgggctgcctggtcaaggattactttcccgagcctgtgaccgtgtcctggaatagcggagcactgacaagcggcgtgcacacctttccagccgtgctgcaaagcagcggcctgtactctctgagcagcgtggtcacagtgcctagctctagcctgggcacccagacctacatctgcaatgtgaaccacaagcctagcaacaccaaggtggacaagagagtggaacccaagagctgtatccccgaggacacattcttcccaagccccgagagcagctgcgacgtgaagctggtggaaaagagcttcgagacagacaccaacctgaacttccagaacctgagcgtgatcggcttcagaatcctgctgctgaaagtggccggctttaacctgctgatgaccctgcggctgtggtccagc

SEQ ID NO: 3292 - DNA, 2277 bp, Artificial Sequence
  Synthetic Polynucloetide
atggccttaccagtgaccgccttgctcctgccgctggccttgctgctccacgccgccaggccggaagtgcagctggttgaatctggcggaggactggttcagcctggcggatctctgagactgtcttgtgccgccagcggcttcagcttcagcgacttttggatgagctgggtccgacaggcccctggcaaaggacttgaatgggtcgccacaatcagccaggccggcagcgagaaggactacgtggactctgtgaagggcagattcaccatcagccgggacaacgccaagaagtccctgtacctccagatgaacagcctgagagccgaggacaccgccgtgtactattgtgcctctggcgtgtacagcttcgactacagaggccagggcaccctggtcacagtctcttctggtaccggcggaggcggatctggcggcggaggtagcggtggcggaggatctgaattcgacatccagatgacacagagccctagcagcctgtctgccagcgtgggagatagagtgaccatcaactgcaaggccagccaggacatcaacagctacctgagctggttccagcagaagcctggcaaggcccctaagacactgatctaccgggccaacagactggtggatggcgtgccaagcagattttctggcagcggcagcggccaggattacaccctgacaatatccagcctccagcctgaggacttcgccacctactactgcctccagtacgacgagttccctctgacctttggcggaggcaccaaggtggaaatcaaactcgagggacagcctaaggccaatcctaccgtgacactgttccctccaagcagcgaagaactccaggccaacaaggccacacttgtgtgcctgatctccgacttctaccctggggctgtgacagtggcttggaaggccgatggatctcctgtgaaagccggcgtggaaaccaccaagccatccaagcagagcaacaacaaatacgccgccagctcctacctgagcctgacacctgagcagtggaagtcccacagatcctacagctgccaagtgacccacgaaggcagcaccgtggaaaagacagtggcccctacagagtgcagcggcagagccgattgcggctttaccagcgagagctaccagcagggcgtgctgagcgccaccatcctgtacgagatcctgctgggcaaggccaccctgtacgccgtgctggtgtctgccctggtgctgatggctatggtcaagcggaaggacagccggggacgcgccaagagaagcggatctggcgtgaagcagaccctgaatttcgacctgctgaagctggctggcgacgtggaatccaacccaggccctactagtatggactggatttggcgcatccttttccttgtcggcgctgctaccggcgcgcattccttcgaacaggtgcaactggtgcagtctggggccgaagtgaagaaacctggggcctctgtgaaggtgtcctgcaaagccagcggctacacctttaccaactacgacatcaactgggtccgacaggctccaggccaaggactggaatggatcggctggatctatcctggcgacggcagcaccaagtacaacgagaagttcaaggccaaggccacactgaccgccgataccagcacaagcaccgcctacatggaactgcggagcctgagaagcgacgacaccgccgtgtactattgtgcctccggctacgaggacgctatggactattggggccagggcaccaccgtgacagtgtctagtacgcgtgcctctacaaagggaccctccgtgtttcctctggctcccagcagcaagtctacaagcggaggaacagccgctctgggctgcctggtcaaggattactttcccgagcctgtgaccgtgtcctggaatagcggagcactgacaagcggcgtgcacacctttccagccgtgctgcaaagcagcggcctgtactctctgagcagcgtggtcacagtgcctagctctagcctgggcacccagacctacatctgcaatgtgaaccacaagcctagcaacaccaaggtggacaagagagtggaacccaagagctgtatccccgaggacacattcttcccaagccccgagagcagctgcgacgtgaagctggtggaaaagagcttcgagacagacaccaacctgaacttccagaacctgagcgtgatcggcttcagaatcctgctgctgaaagtggccggctttaacctgctgatgaccctgcggctgtggtccagc

SEQ ID NO: 3293 - DNA, 2283 bp, Artificial Sequence
  Synthetic Polynucloetide
atggccttaccagtgaccgccttgctcctgccgctggccttgctgctccacgccgccaggccggaagtgcagctggttgaatctggcggaggactggttcagcctggcggatctctgagactgtcttgtgccgccagcggcttcagcttcagcgacttttggatgagctgggtccgacaggcccctggcaaaggacttgaatgggtcgccacaatcagccaggccggcagcgagaaggactacgtggactctgtgaagggcagattcaccatcagccgggacaacgccaagaagtccctgtacctccagatgaacagcctgagagccgaggacaccgccgtgtactattgtgcctctggcgtgtacagcttcgactacagaggccagggcaccctggtcacagtctcttctggtaccggcggaggcggatctggcggcggaggtagcggtggcggaggatctgaattcgacatcgtgatgacccagacacctctgagcctgagcgtgacacctggacagcctgccagcattagctgcaagagcagccagtctctgctggacggcgacggcaagacctacctgaattggctgctccagaagcctggacagagccctcagcggctgatctacctggtgtccaagctggatagcggcgtgcccgatagattttctggcagcggctctggcaccgacttcaccctgaagatcagcagagtggaagccgaggacgtgggcgtgtactactgttggcagggcacacacttccccagaacattcggccagggcacaaagctggaaatcaaactcgagggacagcctaaggccaatcctaccgtgacactgttccctccaagcagcgaagaactccaggccaacaaggccacacttgtgtgcctgatctccgacttctaccctggggctgtgacagtggcttggaaggccgatggatctcctgtgaaagccggcgtggaaaccaccaagccatccaagcagagcaacaacaaatacgccgccagctcctacctgagcctgacacctgagcagtggaagtcccacagatcctacagctgccaagtgacccacgaaggcagcaccgtggaaaagacagtggcccctacagagtgcagcggcagagccgattgcggctttaccagcgagagctaccagcagggcgtgctgagcgccaccatcctgtacgagatcctgctgggcaaggccaccctgtacgccgtgctggtgtctgccctggtgctgatggctatggtcaagcggaaggacagccggggacgcgccaagagaagcggatctggcgtgaagcagaccctgaatttcgacctgctgaagctggctggcgacgtggaatccaacccaggccctactagtatggactggatttggcgcatccttttccttgtcggcgctgctaccggcgcgcattccttcgaacaagtgcaactggttcagagcggagccgaagtgaagaaacctggggcctctgtgaaggtgtcctgcaaggccagcggctacaccttcaaggacacctacatccactgggtccgacaggcccctggacaaggacttgagtggatgggcagaatcgaccccgccaacggcaacaccaaatacgaccccaagttccagggcagagtgaccatgaccagagacaccagcatcagcaccgcctacatggaactgagccggctgagatccgatgacaccgccgtgtactattgcgctagaagaggcggagtggattggggccagggaacactggttaccgtgtctagtacgcgtgcctctacaaagggaccctccgtgtttcctctggctcccagcagcaagtctacaagcggaggaacagccgctctgggctgcctggtcaaggattactttcccgagcctgtgaccgtgtcctggaatagcggagcactgacaagcggcgtgcacacctttccagccgtgctgcaaagcagcggcctgtactctctgagcagcgtggtcacagtgcctagctctagcctgggcacccagacctacatctgcaatgtgaaccacaagcctagcaacaccaaggtggacaagagagtggaacccaagagctgtatccccgaggacacattcttcccaagccccgagagcagctgcgacgtgaagctggtggaaaagagcttcgagacagacaccaacctgaacttccagaacctgagcgtgatcggcttcagaatcctgctgctgaaagtggccggctttaacctgctgatgaccctgcggctgtggtccagc

SEQ ID NO: 3294 - DNA, 2286 bp, Artificial Sequence
  Synthetic Polynucloetide
atggccttaccagtgaccgccttgctcctgccgctggccttgctgctccacgccgccaggccggaagtgcagctggttgaatctggcggaggactggttcagcctggcggatctctgagactgtcttgtgccgccagcggcttcagcttcagcgacttttggatgagctgggtccgacaggcccctggcaaaggacttgaatgggtcgccacaatcagccaggccggcagcgagaaggactacgtggactctgtgaagggcagattcaccatcagccgggacaacgccaagaagtccctgtacctccagatgaacagcctgagagccgaggacaccgccgtgtactattgtgcctctggcgtgtacagcttcgactacagaggccagggcaccctggtcacagtctcttctggtaccggcggaggcggatctggcggcggaggtagcggtggcggaggatctgaattcgacatccagatgacacagagccctagcagcctgtctgccagcgtgggagacagagtgaccatcacatgcaaggccagccaggatgtgtctacagccgtggcctggttccagcagaagcctggaaaagcccctaagctgctgatctacagccccagctacagatacaccggcgtgcccagcagattttctggcagcggctctggcaccgacttcaccctgacaatatccagcctccagcctgaggacttcacctactactgccagcagctctacagcaccccttacacattcggccagggcaccaaggtggaaatcaaactcgagggacagcctaaggccaatcctaccgtgacactgttccctccaagcagcgaagaactccaggccaacaaggccacacttgtgtgcctgatctccgacttctaccctggggctgtgacagtggcttggaaggccgatggatctcctgtgaaagccggcgtggaaaccaccaagccatccaagcagagcaacaacaaatacgccgccagctcctacctgagcctgacacctgagcagtggaagtcccacagatcctacagctgccaagtgacccacgaaggcagcaccgtggaaaagacagtggcccctacagagtgcagcggcagagccgattgcggctttaccagcgagagctaccagcagggcgtgctgagcgccaccatcctgtacgagatcctgctgggcaaggccaccctgtacgccgtgctggtgtctgccctggtgctgatggctatggtcaagcggaaggacagccggggacgcgccaagagaagcggatctggcgtgaagcagaccctgaatttcgacctgctgaagctggctggcgacgtggaatccaacccaggccctactagtatggactggatttggcgcatccttttccttgtcggcgctgctaccggcgcgcattccttcgaagaagtgcaactggttcagagcggagccgaagtgaagaaacctggggcctctgtgaaggtgtcctgcaaagccagcggctacacctttaccgactactacctggacgtggtcgtgcggcaagctcctggacaaggactggaatggatcggcagagtgaacccctacaacggcggcaccatctacaaccagaaattcaagggaagagtgaccctgaccagagacaccagcacctccacagcctacctggaactgagcagcctgagaagcgaagataccgccgtgtactactgcgccagggaccactacagatatgaccctctgctggactactggggccagggaaccctggttacagtgtctagtacgcgtgcctctacaaagggaccctccgtgtttcctctggctcccagcagcaagtctacaagcggaggaacagccgctctgggctgcctggtcaaggattactttcccgagcctgtgaccgtgtcctggaatagcggagcactgacaagcggcgtgcacacctttccagccgtgctgcaaagcagcggcctgtactctctgagcagcgtggtcacagtgcctagctctagcctgggcacccagacctacatctgcaatgtgaaccacaagcctagcaacaccaaggtggacaagagagtggaacccaagagctgtatccccgaggacacattcttcccaagccccgagagcagctgcgacgtgaagctggtggaaaagagcttcgagacagacaccaacctgaacttccagaacctgagcgtgatcggcttcagaatcctgctgctgaaagtggccggctttaacctgctgatgaccctgcggctgtggtccagc

SEQ ID NO: 3295 - DNA, 2304 bp, Artificial Sequence
  Synthetic Polynucloetide
atggccttaccagtgaccgccttgctcctgccgctggccttgctgctccacgccgccaggccggaagtgcagctggttgaatctggcggaggactggttcagcctggcggatctctgagactgtcttgtgccgccagcggcttcagcttcagcgacttttggatgagctgggtccgacaggcccctggcaaaggacttgaatgggtcgccacaatcagccaggccggcagcgagaaggactacgtggactctgtgaagggcagattcaccatcagccgggacaacgccaagaagtccctgtacctccagatgaacagcctgagagccgaggacaccgccgtgtactattgtgcctctggcgtgtacagcttcgactacagaggccagggcaccctggtcacagtctcttctggtaccggcggaggcggatctggcggcggaggtagcggtggcggaggatctgaattcgacatccagatgacacagagccctagcagcctgtctgccagcgtgggagacagagtgaccatcacctgtagagccagccagagcgtgtccaccagcagctacaactacatgcactggtatcagcagaagcccggcaagcctcctaagctgctgattaagtacgccagcaacctggaaagcggcgtgcccagcagattttctggcagcggctctggcaccgacttcaccctgacaatatccagcctccagcctgaggacttcgccacctactactgtcagcactcctgggagatccctctgacattcggccagggcaccaaggtggaaatcaaactcgagggacagcctaaggccaatcctaccgtgacactgttccctccaagcagcgaagaactccaggccaacaaggccacacttgtgtgcctgatctccgacttctaccctggggctgtgacagtggcttggaaggccgatggatctcctgtgaaagccggcgtggaaaccaccaagccatccaagcagagcaacaacaaatacgccgccagctcctacctgagcctgacacctgagcagtggaagtcccacagatcctacagctgccaagtgacccacgaaggcagcaccgtggaaaagacagtggcccctacagagtgcagcggcagagccgattgcggctttaccagcgagagctaccagcagggcgtgctgagcgccaccatcctgtacgagatcctgctgggcaaggccaccctgtacgccgtgctggtgtctgccctggtgctgatggctatggtcaagcggaaggacagccggggacgcgccaagagaagcggatctggcgtgaagcagaccctgaatttcgacctgctgaagctggctggcgacgtggaatccaacccaggccctactagtatggactggatttggcgcatccttttccttgtcggcgctgctaccggcgcgcattccttcgaagaagtgcaactggttcagagcggagccgaagtgaagaaacctggggcctctgtgaaggtgtcctgcaaggccagcggctacagcttcaccgactattatatgcactgggtccgacaggctccaggccagggacttgagtggatcggcagaatcaacccctacaacggcgctgccttctacagccagaacttcaaggatagagtgaccctgaccgtggacaccagcaccagcacagcctacctggaactgagcagcctgagaagcgaggacaccgccgtgtactactgcgccattgagagaggcgctgacctggaaggctacgctatggattattggggccagggaaccctggtcaccgtgtcatctacgcgtgcctctacaaagggaccctccgtgtttcctctggctcccagcagcaagtctacaagcggaggaacagccgctctgggctgcctggtcaaggattactttcccgagcctgtgaccgtgtcctggaatagcggagcactgacaagcggcgtgcacacctttccagccgtgctgcaaagcagcggcctgtactctctgagcagcgtggtcacagtgcctagctctagcctgggcacccagacctacatctgcaatgtgaaccacaagcctagcaacaccaaggtggacaagagagtggaacccaagagctgtatccccgaggacacattcttcccaagccccgagagcagctgcgacgtgaagctggtggaaaagagcttcgagacagacaccaacctgaacttccagaacctgagcgtgatcggcttcagaatcctgctgctgaaagtggccggctttaacctgctgatgaccctgcggctgtggtccagc

SEQ ID NO: 3296 - DNA, 2298 bp, Artificial Sequence
  Synthetic Polynucloetide
atggccttaccagtgaccgccttgctcctgccgctggccttgctgctccacgccgccaggccggaagtgcagctggttgaatctggcggaggactggttcagcctggcggatctctgagactgtcttgtgccgccagcggcttcagcttcagcgacttttggatgagctgggtccgacaggcccctggcaaaggacttgaatgggtcgccacaatcagccaggccggcagcgagaaggactacgtggactctgtgaagggcagattcaccatcagccgggacaacgccaagaagtccctgtacctccagatgaacagcctgagagccgaggacaccgccgtgtactattgtgcctctggcgtgtacagcttcgactacagaggccagggcaccctggtcacagtctcttctggtaccggcggaggcggatctggcggcggaggtagcggtggcggaggatctgaattcgagatcgtgctgacacagtctccagccacactgagcgcttctccaggcgagagagtgaccctgacctgtagagccagcagcaacgtgatctccagctacgtgcactggtatcagcagaagcctggcagcagccccagactgtttctgtacagcaccagcaatctggcctccggcgtgccaagcagattttctggctctggcagcggcaccgacttcacctttaccatctctagcctggaagccgaggacgccgccacctactactgtcagcagtacagcggctaccctctgaccttcggccagggcacaagactggaaatcaaactcgagggacagcctaaggccaatcctaccgtgacactgttccctccaagcagcgaagaactccaggccaacaaggccacacttgtgtgcctgatctccgacttctaccctggggctgtgacagtggcttggaaggccgatggatctcctgtgaaagccggcgtggaaaccaccaagccatccaagcagagcaacaacaaatacgccgccagctcctacctgagcctgacacctgagcagtggaagtcccacagatcctacagctgccaagtgacccacgaaggcagcaccgtggaaaagacagtggcccctacagagtgcagcggcagagccgattgcggctttaccagcgagagctaccagcagggcgtgctgagcgccaccatcctgtacgagatcctgctgggcaaggccaccctgtacgccgtgctggtgtctgccctggtgctgatggctatggtcaagcggaaggacagccggggacgcgccaagagaagcggatctggcgtgaagcagaccctgaatttcgacctgctgaagctggctggcgacgtggaatccaacccaggccctactagtatggactggatttggcgcatccttttccttgtcggcgctgctaccggcgcgcattccttcgaacaagttcagctgcaagagtctggccctggcctggtcaagcctagcgaaacactgagcctgacctgcgccgtgtctggctactctatcaccagcgcctactattggaactggatcagacagcctcctggcaaaggactggaatggatcggctacatcagctacgacggcagaaacaactacaaccccagcctgaagaaccggatcaccatcaatcccgacaccagcaagaaccagttcagcctccagctgaacagcgtgacccctgaggataccgccgtgtactactgtgccagagaaggcgactacgacgtgggcaactactacgctatggactactggggccagggaaccctggtcacagtctcttctacgcgtgcctctacaaagggaccctccgtgtttcctctggctcccagcagcaagtctacaagcggaggaacagccgctctgggctgcctggtcaaggattactttcccgagcctgtgaccgtgtcctggaatagcggagcactgacaagcggcgtgcacacctttccagccgtgctgcaaagcagcggcctgtactctctgagcagcgtggtcacagtgcctagctctagcctgggcacccagacctacatctgcaatgtgaaccacaagcctagcaacaccaaggtggacaagagagtggaacccaagagctgtatccccgaggacacattcttcccaagccccgagagcagctgcgacgtgaagctggtggaaaagagcttcgagacagacaccaacctgaacttccagaacctgagcgtgatcggcttcagaatcctgctgctgaaagtggccggctttaacctgctgatgaccctgcggctgtggtccagc

SEQ ID NO: 3297 - DNA, 2298 bp, Artificial Sequence
  Synthetic Polynucloetide
atggccttaccagtgaccgccttgctcctgccgctggccttgctgctccacgccgccaggccggaagtgcagctggttgaatctggcggaggactggttcagcctggcggatctctgagactgtcttgtgccgccagcggcttcagcttcagcgacttttggatgagctgggtccgacaggcccctggcaaaggacttgaatgggtcgccacaatcagccaggccggcagcgagaaggactacgtggactctgtgaagggcagattcaccatcagccgggacaacgccaagaagtccctgtacctccagatgaacagcctgagagccgaggacaccgccgtgtactattgtgcctctggcgtgtacagcttcgactacagaggccagggcaccctggtcacagtctcttctggtaccggcggaggcggatctggcggcggaggtagcggtggcggaggatctgaattcgagatcgtgctgacacagtctcccgccacactgtcactgtctccaggcgaaagagccacactgagctgtagagccagcagcaacgtgatctccagctacgtgcactggtatcagcagaagcctggacaggcccctcggctgctgatctacagcacaagcaatctggcctctggcatccccgccagattttctggctctggaagcggcaccgacttcaccctgaccataagcagcctggaacctgaggacttcgccgtgtactactgccagcagtatagcggctaccctctgaccttcggccagggcacaagactggaaatcaaactcgagggacagcctaaggccaatcctaccgtgacactgttccctccaagcagcgaagaactccaggccaacaaggccacacttgtgtgcctgatctccgacttctaccctggggctgtgacagtggcttggaaggccgatggatctcctgtgaaagccggcgtggaaaccaccaagccatccaagcagagcaacaacaaatacgccgccagctcctacctgagcctgacacctgagcagtggaagtcccacagatcctacagctgccaagtgacccacgaaggcagcaccgtggaaaagacagtggcccctacagagtgcagcggcagagccgattgcggctttaccagcgagagctaccagcagggcgtgctgagcgccaccatcctgtacgagatcctgctgggcaaggccaccctgtacgccgtgctggtgtctgccctggtgctgatggctatggtcaagcggaaggacagccggggacgcgccaagagaagcggatctggcgtgaagcagaccctgaatttcgacctgctgaagctggctggcgacgtggaatccaacccaggccctactagtatggactggatttggcgcatccttttccttgtcggcgctgctaccggcgcgcattccttcgaagaagtgcaactggtggaaagtggcggcggactggtgcaacctggaagaagcctgagactgtcctgtgccgccagcggctactctatcacaagcgcctactactggaactgggtccgacaggctcctggcaaaggactggaatgggtgtcctacatcagctacgacggcagaaacaactacaaccccagcctgaagaaccgcttcaccatcagccgggacaacgccaagaagtccctgtacctccagatgaacagcctgagagccgaggacacagccctgtactattgcgccaaagagggcgactacgacgtcggcaactactacgctatggactactggggccagggaaccaccgtgactgtctcttctacgcgtgcctctacaaagggaccctccgtgtttcctctggctcccagcagcaagtctacaagcggaggaacagccgctctgggctgcctggtcaaggattactttcccgagcctgtgaccgtgtcctggaatagcggagcactgacaagcggcgtgcacacctttccagccgtgctgcaaagcagcggcctgtactctctgagcagcgtggtcacagtgcctagctctagcctgggcacccagacctacatctgcaatgtgaaccacaagcctagcaacaccaaggtggacaagagagtggaacccaagagctgtatccccgaggacacattcttcccaagccccgagagcagctgcgacgtgaagctggtggaaaagagcttcgagacagacaccaacctgaacttccagaacctgagcgtgatcggcttcagaatcctgctgctgaaagtggccggctttaacctgctgatgaccctgcggctgtggtccagc

SEQ ID NO: 3298 - DNA, 2295 bp, Artificial Sequence
  Synthetic Polynucloetide
atggccttaccagtgaccgccttgctcctgccgctggccttgctgctccacgccgccaggccggaagtgcagctggttgaatctggcggaggactggttcagcctggcggatctctgagactgtcttgtgccgccagcggcttcagcttcagcgacttttggatgagctgggtccgacaggcccctggcaaaggacttgaatgggtcgccacaatcagccaggccggcagcgagaaggactacgtggactctgtgaagggcagattcaccatcagccgggacaacgccaagaagtccctgtacctccagatgaacagcctgagagccgaggacaccgccgtgtactattgtgcctctggcgtgtacagcttcgactacagaggccagggcaccctggtcacagtctcttctggtaccggcggaggcggatctggcggcggaggtagcggtggcggaggatctgaattcgacgtggtcatgacacagaccccactgagcctgcctgtgtctctgggagatcaggccagcatctcctgtagaagcagccagagcctggtgcacagcaacggcaacacctacctgcggtggtatctccagaagcctggacagagccccaaggtgctgatctacaaggtgtccaacagagtgtccggcgtgcccgatagattttctggcagcggctctggcaccgacttcaccctgaagatcaatagagtggaagccgaggacctgggcgtgtacttctgtagccagagcacccatgtgccttggacctttggcggaggcaccaagctggaaatcaagctcgagggacagcctaaggccaatcctaccgtgacactgttccctccaagcagcgaagaactccaggccaacaaggccacacttgtgtgcctgatctccgacttctaccctggggctgtgacagtggcttggaaggccgatggatctcctgtgaaagccggcgtggaaaccaccaagccatccaagcagagcaacaacaaatacgccgccagctcctacctgagcctgacacctgagcagtggaagtcccacagatcctacagctgccaagtgacccacgaaggcagcaccgtggaaaagacagtggcccctacagagtgcagcggcagagccgattgcggctttaccagcgagagctaccagcagggcgtgctgagcgccaccatcctgtacgagatcctgctgggcaaggccaccctgtacgccgtgctggtgtctgccctggtgctgatggctatggtcaagcggaaggacagccggggacgcgccaagagaagcggatctggcgtgaagcagaccctgaatttcgacctgctgaagctggctggcgacgtggaatccaacccaggccctactagtatggactggatttggcgcatccttttccttgtcggcgctgctaccggcgcgcattccttcgaaggcgtgaagctggacgagacaggcggaggacttgttcaacctggcggagccatgaagctgagctgtgtgaccagcggctttaccttcggccactactggatgaactgggtccgacagtcccctgagaaaggactggaatgggtcgcccagttcagaaacaagccctacaactacgaaacctactacagcgacagcgtgaagggcagattcaccatcagccgggacgacagcaagtccagcgtgtacctccagatgaacaacctgcgcgtggaagataccggcatctactactgtaccggggccagctacggcatggaatatctcggccagggcaccagcgtgaccgtgtctacaacgcgtgcctctacaaagggaccctccgtgtttcctctggctcccagcagcaagtctacaagcggaggaacagccgctctgggctgcctggtcaaggattactttcccgagcctgtgaccgtgtcctggaatagcggagcactgacaagcggcgtgcacacctttccagccgtgctgcaaagcagcggcctgtactctctgagcagcgtggtcacagtgcctagctctagcctgggcacccagacctacatctgcaatgtgaaccacaagcctagcaacaccaaggtggacaagagagtggaacccaagagctgtatccccgaggacacattcttcccaagccccgagagcagctgcgacgtgaagctggtggaaaagagcttcgagacagacaccaacctgaacttccagaacctgagcgtgatcggcttcagaatcctgctgctgaaagtggccggctttaacctgctgatgaccctgcggctgtggtccagc

SEQ ID NO: 3299 - DNA, 2313 bp, Artificial Sequence
  Synthetic Polynucloetide
atggccttaccagtgaccgccttgctcctgccgctggccttgctgctccacgccgccaggccggaagtgcagctggttgaatctggcggaggactggttcagcctggcggatctctgagactgtcttgtgccgccagcggcttcagcttcagcgacttttggatgagctgggtccgacaggcccctggcaaaggacttgaatgggtcgccacaatcagccaggccggcagcgagaaggactacgtggactctgtgaagggcagattcaccatcagccgggacaacgccaagaagtccctgtacctccagatgaacagcctgagagccgaggacaccgccgtgtactattgtgcctctggcgtgtacagcttcgactacagaggccagggcaccctggtcacagtctcttctggtaccggcggaggcggatctggcggcggaggtagcggtggcggaggatctgaattccaggtgcaactggtggaatctggcggcaatctggttcagcctggcggctctctgagactgtcttgtgccgccagcggcttcaccttcggcagcttttctatgagctgggtccgacaagctcctggcggaggacttgaatgggtggcaggactgtctgccagaagcagcctgacacactacgccgactctgtgaagggcagattcaccatcagccgggacaacgccaagaacagcgtgtacctccagatgaacagcctgagagtggaagataccgccgtgtactactgcgccagaagaagctacgacagcagcggctactggggccacttctacagctacatggatgtgtggggccagggcaccctggttacagtttctctcgagggacagcctaaggccaatcctaccgtgacactgttccctccaagcagcgaagaactccaggccaacaaggccacacttgtgtgcctgatctccgacttctaccctggggctgtgacagtggcttggaaggccgatggatctcctgtgaaagccggcgtggaaaccaccaagccatccaagcagagcaacaacaaatacgccgccagctcctacctgagcctgacacctgagcagtggaagtcccacagatcctacagctgccaagtgacccacgaaggcagcaccgtggaaaagacagtggcccctacagagtgcagcggcagagccgattgcggctttaccagcgagagctaccagcagggcgtgctgagcgccaccatcctgtacgagatcctgctgggcaaggccaccctgtacgccgtgctggtgtctgccctggtgctgatggctatggtcaagcggaaggacagccggggacgcgccaagagaagcggatctggcgtgaagcagaccctgaatttcgacctgctgaagctggctggcgacgtggaatccaacccaggccctactagtatggactggatttggcgcatccttttccttgtcggcgctgctaccggcgcgcattccttcgaatctgtgctgacccagcctagctccgtgtctgctgctcctggacagaaagtgaccatctcctgtagcggcagcaccagcaacatcggcaacaactacgtgtcctggtatcagcagcaccccggcaaggcccctaagctgatgatctacgacgtgtccaagaggcccagcggcgtgccagatagattttccggcagcaagagcggcaacagcgccagcctggatattagcggactccagtctgaggacgaggccgactactattgcgccgcctgggatgatagcctgagcgagtttctgtttggcaccggcaccaagctgacagtgcttggaacgcgtgcctctacaaagggaccctccgtgtttcctctggctcccagcagcaagtctacaagcggaggaacagccgctctgggctgcctggtcaaggattactttcccgagcctgtgaccgtgtcctggaatagcggagcactgacaagcggcgtgcacacctttccagccgtgctgcaaagcagcggcctgtactctctgagcagcgtggtcacagtgcctagctctagcctgggcacccagacctacatctgcaatgtgaaccacaagcctagcaacaccaaggtggacaagagagtggaacccaagagctgtatccccgaggacacattcttcccaagccccgagagcagctgcgacgtgaagctggtggaaaagagcttcgagacagacaccaacctgaacttccagaacctgagcgtgatcggcttcagaatcctgctgctgaaagtggccggctttaacctgctgatgaccctgcggctgtggtccagc

SEQ ID NO: 3300 - DNA, 2298 bp, Artificial Sequence
  Synthetic Polynucloetide
atggccttaccagtgaccgccttgctcctgccgctggccttgctgctccacgccgccaggccggaagtgcagctggttgaatctggcggaggactggttcagcctggcggatctctgagactgtcttgtgccgccagcggcttcagcttcagcgacttttggatgagctgggtccgacaggcccctggcaaaggacttgaatgggtcgccacaatcagccaggccggcagcgagaaggactacgtggactctgtgaagggcagattcaccatcagccgggacaacgccaagaagtccctgtacctccagatgaacagcctgagagccgaggacaccgccgtgtactattgtgcctctggcgtgtacagcttcgactacagaggccagggcaccctggtcacagtctcttctggtaccggcggaggcggatctggcggcggaggtagcggtggcggaggatctgaattcgacgtggtcatgacacagagcccttctagcctgtctgccagcgtgggcgacagagtgacaatcacctgtcagagcagcctggacatcagccactacctgaactggtatcagcagaagcccggcaaggcccctaagctgctgatctacgacgccagcaatctggaaaccggcgtgcccagcagattttctggcagcggaagcggcacccacttcaccttcacaatatccagcctccagcctgaggacttcgccacctactactgccagcagtacgacaacctgcctctgacctttggcggaggcaccaagctggaaatcaagagactcgagggacagcctaaggccaatcctaccgtgacactgttccctccaagcagcgaagaactccaggccaacaaggccacacttgtgtgcctgatctccgacttctaccctggggctgtgacagtggcttggaaggccgatggatctcctgtgaaagccggcgtggaaaccaccaagccatccaagcagagcaacaacaaatacgccgccagctcctacctgagcctgacacctgagcagtggaagtcccacagatcctacagctgccaagtgacccacgaaggcagcaccgtggaaaagacagtggcccctacagagtgcagcggcagagccgattgcggctttaccagcgagagctaccagcagggcgtgctgagcgccaccatcctgtacgagatcctgctgggcaaggccaccctgtacgccgtgctggtgtctgccctggtgctgatggctatggtcaagcggaaggacagccggggacgcgccaagagaagcggatctggcgtgaagcagaccctgaatttcgacctgctgaagctggctggcgacgtggaatccaacccaggccctactagtatggactggatttggcgcatccttttccttgtcggcgctgctaccggcgcgcattccttcgaacaagttcaactggttcaatcaggcggaggcgtggtgcaacctggtggctctctgagagtgtcttgtgctgcctctggcgtgaccctgagcgactatggaatgcactgggtccgacaggcccctggcaaaggacttgagtgggtcgccttcatcagaaacgacggcagcgacaagtattacgccgacagcgtgaagggcagattcaccatcagccgggacaacagcgagaaaaccgtgtctctccagatgtctagcctgagagccgaggacaccgccgtgtactactgtgccaagaatggcgagagcggccctctggactactggtatctggatctgtggggcagaggcaccctggtcacagtctcttctacgcgtgcctctacaaagggaccctccgtgtttcctctggctcccagcagcaagtctacaagcggaggaacagccgctctgggctgcctggtcaaggattactttcccgagcctgtgaccgtgtcctggaatagcggagcactgacaagcggcgtgcacacctttccagccgtgctgcaaagcagcggcctgtactctctgagcagcgtggtcacagtgcctagctctagcctgggcacccagacctacatctgcaatgtgaaccacaagcctagcaacaccaaggtggacaagagagtggaacccaagagctgtatccccgaggacacattcttcccaagccccgagagcagctgcgacgtgaagctggtggaaaagagcttcgagacagacaccaacctgaacttccagaacctgagcgtgatcggcttcagaatcctgctgctgaaagtggccggctttaacctgctgatgaccctgcggctgtggtccagc

SEQ ID NO: 3301 - DNA, 2310 bp, Artificial Sequence
  Synthetic Polynucloetide
atggccttaccagtgaccgccttgctcctgccgctggccttgctgctccacgccgccaggccggaagtgcagctggttgaatctggcggaggactggttcagcctggcggatctctgagactgtcttgtgccgccagcggcttcagcttcagcgacttttggatgagctgggtccgacaggcccctggcaaaggacttgaatgggtcgccacaatcagccaggccggcagcgagaaggactacgtggactctgtgaagggcagattcaccatcagccgggacaacgccaagaagtccctgtacctccagatgaacagcctgagagccgaggacaccgccgtgtactattgtgcctctggcgtgtacagcttcgactacagaggccagggcaccctggtcacagtctcttctggtaccggcggaggcggatctggcggcggaggtagcggtggcggaggatctgaattcagctacgagctgacacagcctccatccgtgtctggcacacctggacagagagtggctatctcctgtagcggcagcagcagcaacatcggcaccagaatggtcacctggtatcagcacgtgccaggcacagcccctaagctgctgatcttcaacaacaaccagcggcctagcggcgtgcccgatagattttctgccagcaagagcggcacaagcgccagcctggctatcatcggactccagtctgacgacgaggccgactactactgtgccacctgggacgacaacgtgaagtcctacgtgttcggcaccggcaccaaagtgacagtgcttggaagtagactcgagggacagcctaaggccaatcctaccgtgacactgttccctccaagcagcgaagaactccaggccaacaaggccacacttgtgtgcctgatctccgacttctaccctggggctgtgacagtggcttggaaggccgatggatctcctgtgaaagccggcgtggaaaccaccaagccatccaagcagagcaacaacaaatacgccgccagctcctacctgagcctgacacctgagcagtggaagtcccacagatcctacagctgccaagtgacccacgaaggcagcaccgtggaaaagacagtggcccctacagagtgcagcggcagagccgattgcggctttaccagcgagagctaccagcagggcgtgctgagcgccaccatcctgtacgagatcctgctgggcaaggccaccctgtacgccgtgctggtgtctgccctggtgctgatggctatggtcaagcggaaggacagccggggacgcgccaagagaagcggatctggcgtgaagcagaccctgaatttcgacctgctgaagctggctggcgacgtggaatccaacccaggccctactagtatggactggatttggcgcatccttttccttgtcggcgctgctaccggcgcgcattccttcgaacttgaaatggcccaggttcagctccagcagtggggagctggactgctgaagcctagcgagacactgagcctgacctgtgctgtgtacggcggcagcttcagcggctactactggtcctggatcagacagcctcctggcaaaggactggaatggatcggcgagatcaaccacagcggctccaccaactacaaccccagcctgaagtccagagtgaccatcagcgtggacaccagcaagaaccagttctccctgaagctgagcagcgtgacagccgctgataccgccgtgtactattgcgctagagcccctcagtcttggtacgtgggagatgtgtggggccagggcacactggttacagtgtcatctacgcgtgcctctacaaagggaccctccgtgtttcctctggctcccagcagcaagtctacaagcggaggaacagccgctctgggctgcctggtcaaggattactttcccgagcctgtgaccgtgtcctggaatagcggagcactgacaagcggcgtgcacacctttccagccgtgctgcaaagcagcggcctgtactctctgagcagcgtggtcacagtgcctagctctagcctgggcacccagacctacatctgcaatgtgaaccacaagcctagcaacaccaaggtggacaagagagtggaacccaagagctgtatccccgaggacacattcttcccaagccccgagagcagctgcgacgtgaagctggtggaaaagagcttcgagacagacaccaacctgaacttccagaacctgagcgtgatcggcttcagaatcctgctgctgaaagtggccggctttaacctgctgatgaccctgcggctgtggtccagc

SEQ ID NO: 3302 - DNA, 2301 bp, Artificial Sequence
  Synthetic Polynucloetide
atggccttaccagtgaccgccttgctcctgccgctggccttgctgctccacgccgccaggccggaagtgcagctggttgaatctggcggaggactggttcagcctggcggatctctgagactgtcttgtgccgccagcggcttcagcttcagcgacttttggatgagctgggtccgacaggcccctggcaaaggacttgaatgggtcgccacaatcagccaggccggcagcgagaaggactacgtggactctgtgaagggcagattcaccatcagccgggacaacgccaagaagtccctgtacctccagatgaacagcctgagagccgaggacaccgccgtgtactattgtgcctctggcgtgtacagcttcgactacagaggccagggcaccctggtcacagtctcttctggtaccggcggaggcggatctggcggcggaggtagcggtggcggaggatctgaattccagtctgtgctgacacagcctcctagcctgtctgtggcccctggaaagacagccagcatcacatgcggcggcaacaacatcggcatgaagtccgtgcactggtatcagcagaggccaggacaggctcctgtgctggtcatctactacgacagcgacagaccctctggcatccccggcagattttccggcagcaactctggcaataccgccacactgaccatctccagagtggaagctggcgacgaggccgactactactgccaagtgtgggataccaccggcgatcaccctggctatgtgtttggcaccggcaccaaagtgacagtgcttctcgagggacagcctaaggccaatcctaccgtgacactgttccctccaagcagcgaagaactccaggccaacaaggccacacttgtgtgcctgatctccgacttctaccctggggctgtgacagtggcttggaaggccgatggatctcctgtgaaagccggcgtggaaaccaccaagccatccaagcagagcaacaacaaatacgccgccagctcctacctgagcctgacacctgagcagtggaagtcccacagatcctacagctgccaagtgacccacgaaggcagcaccgtggaaaagacagtggcccctacagagtgcagcggcagagccgattgcggctttaccagcgagagctaccagcagggcgtgctgagcgccaccatcctgtacgagatcctgctgggcaaggccaccctgtacgccgtgctggtgtctgccctggtgctgatggctatggtcaagcggaaggacagccggggacgcgccaagagaagcggatctggcgtgaagcagaccctgaatttcgacctgctgaagctggctggcgacgtggaatccaacccaggccctactagtatggactggatttggcgcatccttttccttgtcggcgctgctaccggcgcgcattccttcgaacaagttcaactggttcagagcggagccgaagtgaagaaacctggcagcagcgtgaaggtgtcctgcaaagcaagcggcggcacctttagcagctacgccatctcttgggtccgacaggcacctggacaaggactggaatggatgggcggcatcatccccatcttcggcacagccaattacgcccagaaattccagggcagagtgaccatcaccgccgacgagtctacaagcaccgcctacatggaactgagcagcctgagaagcgaggacaccgccgtgtactattgtgccagaggcgtgtacggctacagcggctctgccccttatgatgagtggggccagggaaccctggtcaccgtttcttctacgcgtgcctctacaaagggaccctccgtgtttcctctggctcccagcagcaagtctacaagcggaggaacagccgctctgggctgcctggtcaaggattactttcccgagcctgtgaccgtgtcctggaatagcggagcactgacaagcggcgtgcacacctttccagccgtgctgcaaagcagcggcctgtactctctgagcagcgtggtcacagtgcctagctctagcctgggcacccagacctacatctgcaatgtgaaccacaagcctagcaacaccaaggtggacaagagagtggaacccaagagctgtatccccgaggacacattcttcccaagccccgagagcagctgcgacgtgaagctggtggaaaagagcttcgagacagacaccaacctgaacttccagaacctgagcgtgatcggcttcagaatcctgctgctgaaagtggccggctttaacctgctgatgaccctgcggctgtggtccagc

SEQ ID NO: 3303 - DNA, 2295 bp, Artificial Sequence
  Synthetic Polynucloetide
atggccttaccagtgaccgccttgctcctgccgctggccttgctgctccacgccgccaggccggaagtgcagctggttgaatctggcggaggactggttcagcctggcggatctctgagactgtcttgtgccgccagcggcttcagcttcagcgacttttggatgagctgggtccgacaggcccctggcaaaggacttgaatgggtcgccacaatcagccaggccggcagcgagaaggactacgtggactctgtgaagggcagattcaccatcagccgggacaacgccaagaagtccctgtacctccagatgaacagcctgagagccgaggacaccgccgtgtactattgtgcctctggcgtgtacagcttcgactacagaggccagggcaccctggtcacagtctcttctggtaccggcggaggcggatctggcggcggaggtagcggtggcggaggatctgaattcgaggtgcaactggttgagtctggcggaggactggtgcagcctggaagaagcctgagactgtcttgtgccgccagcggcttcaccttcgacgattatgccatgcactgggtccgacaggcccctggcaaaggacttgaatgggtgtccggcatctcctggaacagcggctctatcggctacgccgattccgtgaagggcagattcaccatcagccgggacaacgccaagaacagcctgtacctccagatgaactccctgagagccgaggacacagccctgtactactgcgccaaagacaaaggcggaggctactacgacttttggagcggcagcgattattggggccagggcacactggtcacagtgtctagcctcgagggacagcctaaggccaatcctaccgtgacactgttccctccaagcagcgaagaactccaggccaacaaggccacacttgtgtgcctgatctccgacttctaccctggggctgtgacagtggcttggaaggccgatggatctcctgtgaaagccggcgtggaaaccaccaagccatccaagcagagcaacaacaaatacgccgccagctcctacctgagcctgacacctgagcagtggaagtcccacagatcctacagctgccaagtgacccacgaaggcagcaccgtggaaaagacagtggcccctacagagtgcagcggcagagccgattgcggctttaccagcgagagctaccagcagggcgtgctgagcgccaccatcctgtacgagatcctgctgggcaaggccaccctgtacgccgtgctggtgtctgccctggtgctgatggctatggtcaagcggaaggacagccggggacgcgccaagagaagcggatctggcgtgaagcagaccctgaatttcgacctgctgaagctggctggcgacgtggaatccaacccaggccctactagtatggactggatttggcgcatccttttccttgtcggcgctgctaccggcgcgcattccttcgaatcttctgagctgacacaggaccctgccgtgtctgttgctctgggccagacagtgcggattacctgtcagggcgatagcctgagaagctactacgcctcctggtatcagcagaagccaggccaggctcctgtgctggtcatctacggcaagaacaacagacccagcggcatccccgatagattcagcggaagcagctctggcaataccgccagcctgacaattactggcgctcaggccgaggacgaggccgactactactgcaacagcagagatagcagcggctgggttttcggcggaggcacaaaactgacagtgctgacgcgtgcctctacaaagggaccctccgtgtttcctctggctcccagcagcaagtctacaagcggaggaacagccgctctgggctgcctggtcaaggattactttcccgagcctgtgaccgtgtcctggaatagcggagcactgacaagcggcgtgcacacctttccagccgtgctgcaaagcagcggcctgtactctctgagcagcgtggtcacagtgcctagctctagcctgggcacccagacctacatctgcaatgtgaaccacaagcctagcaacaccaaggtggacaagagagtggaacccaagagctgtatccccgaggacacattcttcccaagccccgagagcagctgcgacgtgaagctggtggaaaagagcttcgagacagacaccaacctgaacttccagaacctgagcgtgatcggcttcagaatcctgctgctgaaagtggccggctttaacctgctgatgaccctgcggctgtggtccagc

SEQ ID NO: 3304 - DNA, 2322 bp, Artificial Sequence
  Synthetic Polynucloetide
atggccttaccagtgaccgccttgctcctgccgctggccttgctgctccacgccgccaggccggaagtgcagctggttgaatctggcggaggactggttcagcctggcggatctctgagactgtcttgtgccgccagcggcttcagcttcagcgacttttggatgagctgggtccgacaggcccctggcaaaggacttgaatgggtcgccacaatcagccaggccggcagcgagaaggactacgtggactctgtgaagggcagattcaccatcagccgggacaacgccaagaagtccctgtacctccagatgaacagcctgagagccgaggacaccgccgtgtactattgtgcctctggcgtgtacagcttcgactacagaggccagggcaccctggtcacagtctcttctggtaccggcggaggcggatctggcggcggaggtagcggtggcggaggatctgaattcgaagtgcagctccagcagtctggacctggcctggttaagcctagccagacactgagcctgacctgtgccatcagcggcgatagcgtgctgagcaacagcgacacctggaactggatcagacagagccctagcagaggactggaatggctgggcagaacctaccacagaagcacttggtacgacgactacgccagctctgtgcggggcagagtgtccatcaatgtggacaccagcaagaaccagtacagcctgcaactgaacgccgtgacacctgaggataccggcgtgtactactgcgccagagacagactccaggacggcaactcttggagcgacgcctttgatgtgtggggccagggcacaatggtcaccgtttctagcctcgagggacagcctaaggccaatcctaccgtgacactgttccctccaagcagcgaagaactccaggccaacaaggccacacttgtgtgcctgatctccgacttctaccctggggctgtgacagtggcttggaaggccgatggatctcctgtgaaagccggcgtggaaaccaccaagccatccaagcagagcaacaacaaatacgccgccagctcctacctgagcctgacacctgagcagtggaagtcccacagatcctacagctgccaagtgacccacgaaggcagcaccgtggaaaagacagtggcccctacagagtgcagcggcagagccgattgcggctttaccagcgagagctaccagcagggcgtgctgagcgccaccatcctgtacgagatcctgctgggcaaggccaccctgtacgccgtgctggtgtctgccctggtgctgatggctatggtcaagcggaaggacagccggggacgcgccaagagaagcggatctggcgtgaagcagaccctgaatttcgacctgctgaagctggctggcgacgtggaatccaacccaggccctactagtatggactggatttggcgcatccttttccttgtcggcgctgctaccggcgcgcattccttcgaacaatctgctctgacacagcctgccagcgtgtcaggatctcctggacagagcatcaccatctcttgcaccggcaccagctctgatgtcggcggctacaattacgtgtcctggtatcagcagcaccccggcaaggcccctaagctgatgatctacgacgtgtccaacagacccagcggcgtgtccaatagattctccggcagcaagagcggcaacaccgccagcctgacaatttctggactgcaagccgaggacgaggccgactactactgtagcagctacaccagcagcagcacactggtgtacgtgttcggcacaggcaccaaagtgaccgtgcttacgcgtgcctctacaaagggaccctccgtgtttcctctggctcccagcagcaagtctacaagcggaggaacagccgctctgggctgcctggtcaaggattactttcccgagcctgtgaccgtgtcctggaatagcggagcactgacaagcggcgtgcacacctttccagccgtgctgcaaagcagcggcctgtactctctgagcagcgtggtcacagtgcctagctctagcctgggcacccagacctacatctgcaatgtgaaccacaagcctagcaacaccaaggtggacaagagagtggaacccaagagctgtatccccgaggacacattcttcccaagccccgagagcagctgcgacgtgaagctggtggaaaagagcttcgagacagacaccaacctgaacttccagaacctgagcgtgatcggcttcagaatcctgctgctgaaagtggccggctttaacctgctgatgaccctgcggctgtggtccagc

SEQ ID NO: 3305 - DNA, 2256 bp, Artificial Sequence
  Synthetic Polynucloetide
atggccttaccagtgaccgccttgctcctgccgctggccttgctgctccacgccgccaggccggaagtgcagctggttgaatctggcggaggactggttcagcctggcggatctctgagactgtcttgtgccgccagcggcttcagcttcagcgacttttggatgagctgggtccgacaggcccctggcaaaggacttgaatgggtcgccacaatcagccaggccggcagcgagaaggactacgtggactctgtgaagggcagattcaccatcagccgggacaacgccaagaagtccctgtacctccagatgaacagcctgagagccgaggacaccgccgtgtactattgtgcctctggcgtgtacagcttcgactacagaggccagggcaccctggtcacagtctcttctggtaccggcggaggcggatctggcggcggaggtagcggtggcggaggatctgaattccaggtgcaactggttcagtctggggccgaagtgaagaaacctggggcctctgtgaaggtgtcctgcaaggcttccggctacacctttaccagctacgacatcaactgggtccgacaggccacaggccaaggactggaatggatgggctggatgaaccccaacagcggcaataccggctacgcccagaaattccagggcagagtgaccatgaccagaaacaccagcatcagcaccgcctacatggaactgagcagcctgagaagcgaggacaccgccgtgtactattgcgccagaggcgacagcaccaaggtggaaatcaaactcgagggacagcctaaggccaatcctaccgtgacactgttccctccaagcagcgaagaactccaggccaacaaggccacacttgtgtgcctgatctccgacttctaccctggggctgtgacagtggcttggaaggccgatggatctcctgtgaaagccggcgtggaaaccaccaagccatccaagcagagcaacaacaaatacgccgccagctcctacctgagcctgacacctgagcagtggaagtcccacagatcctacagctgccaagtgacccacgaaggcagcaccgtggaaaagacagtggcccctacagagtgcagcggcagagccgattgcggctttaccagcgagagctaccagcagggcgtgctgagcgccaccatcctgtacgagatcctgctgggcaaggccaccctgtacgccgtgctggtgtctgccctggtgctgatggctatggtcaagcggaaggacagccggggacgcgccaagagaagcggatctggcgtgaagcagaccctgaatttcgacctgctgaagctggctggcgacgtggaatccaacccaggccctactagtatggactggatttggcgcatccttttccttgtcggcgctgctaccggcgcgcattccttcgaacaatctgtgctgacccagcctagatccgtgtctggctctcctggacagagcgtgaccatctcttgtaccggcaccagctctgatgtcggcggctacaattacgtgtcctggtatcagcagcaccccggcgaagcccctaagctgattatctacgacgccgacaagcggcccagcggcatcagcaatagattcagctctggcaagagcggcaacaccgccagcctgacaatcagcggactccaggtggaagatgaggccgactactactgctgctcctatgccggcggaagcacctgggttttcggaggcggtacaaaagtgaccgtgctgacgcgtgcctctacaaagggaccctccgtgtttcctctggctcccagcagcaagtctacaagcggaggaacagccgctctgggctgcctggtcaaggattactttcccgagcctgtgaccgtgtcctggaatagcggagcactgacaagcggcgtgcacacctttccagccgtgctgcaaagcagcggcctgtactctctgagcagcgtggtcacagtgcctagctctagcctgggcacccagacctacatctgcaatgtgaaccacaagcctagcaacaccaaggtggacaagagagtggaacccaagagctgtatccccgaggacacattcttcccaagccccgagagcagctgcgacgtgaagctggtggaaaagagcttcgagacagacaccaacctgaacttccagaacctgagcgtgatcggcttcagaatcctgctgctgaaagtggccggctttaacctgctgatgaccctgcggctgtggtccagc

SEQ ID NO: 3306 - DNA, 2322 bp, Artificial Sequence
  Synthetic Polynucloetide
atggccttaccagtgaccgccttgctcctgccgctggccttgctgctccacgccgccaggccggaagtgcagctggttgaatctggcggaggactggttcagcctggcggatctctgagactgtcttgtgccgccagcggcttcagcttcagcgacttttggatgagctgggtccgacaggcccctggcaaaggacttgaatgggtcgccacaatcagccaggccggcagcgagaaggactacgtggactctgtgaagggcagattcaccatcagccgggacaacgccaagaagtccctgtacctccagatgaacagcctgagagccgaggacaccgccgtgtactattgtgcctctggcgtgtacagcttcgactacagaggccagggcaccctggtcacagtctcttctggtaccggcggaggcggatctggcggcggaggtagcggtggcggaggatctgaattcgaagtgcagctccagcagtctggacctggcctggttaagcctagccagacactgagcctgacctgtgccatcagcggcgatagcgtgtcctctaatagcgccgcctggaactggatcagacagagccctagcagaggactggaatggctgggcagaacctactaccgcagcaagtggtacagcgactacgccgtgtccgtgaagtcccggatcaccatcaatcccgacaccagcaagaaccagttcagcctgcaactgaacagcgtgacccctgaggataccgccgtgtactactgcgccagagatccctacgacttttggagcggctaccccgacgcctttgacatctggggacagggcacaatggtcaccgtttctagcctcgagggacagcctaaggccaatcctaccgtgacactgttccctccaagcagcgaagaactccaggccaacaaggccacacttgtgtgcctgatctccgacttctaccctggggctgtgacagtggcttggaaggccgatggatctcctgtgaaagccggcgtggaaaccaccaagccatccaagcagagcaacaacaaatacgccgccagctcctacctgagcctgacacctgagcagtggaagtcccacagatcctacagctgccaagtgacccacgaaggcagcaccgtggaaaagacagtggcccctacagagtgcagcggcagagccgattgcggctttaccagcgagagctaccagcagggcgtgctgagcgccaccatcctgtacgagatcctgctgggcaaggccaccctgtacgccgtgctggtgtctgccctggtgctgatggctatggtcaagcggaaggacagccggggacgcgccaagagaagcggatctggcgtgaagcagaccctgaatttcgacctgctgaagctggctggcgacgtggaatccaacccaggccctactagtatggactggatttggcgcatccttttccttgtcggcgctgctaccggcgcgcattccttcgaacaatctgctctgacacagcctgccagcgtgtcaggatctcctggacagagcatcaccatctcttgcaccggcaccagctctgatgtcggcggctacaattacgtgtcctggtatcagcagcaccccggcaaggcccctaaagtgattatcagcgaagtgaacaacagacccagcggcgtgtcccacagattcagcggctctaagtctggcaacaccgccagcctgacaatctctggactgcaagccgaggacgaggccgactacttctgtagcagctacaccagcggcagaaccctgtacgtgttcggcacaggcagcaaagtgacagtgctgggaacgcgtgcctctacaaagggaccctccgtgtttcctctggctcccagcagcaagtctacaagcggaggaacagccgctctgggctgcctggtcaaggattactttcccgagcctgtgaccgtgtcctggaatagcggagcactgacaagcggcgtgcacacctttccagccgtgctgcaaagcagcggcctgtactctctgagcagcgtggtcacagtgcctagctctagcctgggcacccagacctacatctgcaatgtgaaccacaagcctagcaacaccaaggtggacaagagagtggaacccaagagctgtatccccgaggacacattcttcccaagccccgagagcagctgcgacgtgaagctggtggaaaagagcttcgagacagacaccaacctgaacttccagaacctgagcgtgatcggcttcagaatcctgctgctgaaagtggccggctttaacctgctgatgaccctgcggctgtggtccagc

SEQ ID NO: 3307 - DNA, 2319 bp, Artificial Sequence
  Synthetic Polynucloetide
atggccttaccagtgaccgccttgctcctgccgctggccttgctgctccacgccgccaggccggaagtgcagctggttgaatctggcggaggactggttcagcctggcggatctctgagactgtcttgtgccgccagcggcttcagcttcagcgacttttggatgagctgggtccgacaggcccctggcaaaggacttgaatgggtcgccacaatcagccaggccggcagcgagaaggactacgtggactctgtgaagggcagattcaccatcagccgggacaacgccaagaagtccctgtacctccagatgaacagcctgagagccgaggacaccgccgtgtactattgtgcctctggcgtgtacagcttcgactacagaggccagggcaccctggtcacagtctcttctggtaccggcggaggcggatctggcggcggaggtagcggtggcggaggatctgaattccaatctgctctgacacagcctgccagcgcctctggatctcctggacagagcgtgaccatctcctgtaccggcacctcttctgatgtcggcggctacaactacgtgtcctggtatcagcagcaccccggcaaggcccctaagctgatgatctacgacgtgtccaacagacccagcggcgtgtccaatagattctccggcagcaagagcggcaacaccgccagcctgacaatttctggactgcaagccgaggacgaggccgactactactgtagcagctacaccagcagcagcacactgtacgtgttcggcacaggcacccagctcacagttcttctcgagggacagcctaaggccaatcctaccgtgacactgttccctccaagcagcgaagaactccaggccaacaaggccacacttgtgtgcctgatctccgacttctaccctggggctgtgacagtggcttggaaggccgatggatctcctgtgaaagccggcgtggaaaccaccaagccatccaagcagagcaacaacaaatacgccgccagctcctacctgagcctgacacctgagcagtggaagtcccacagatcctacagctgccaagtgacccacgaaggcagcaccgtggaaaagacagtggcccctacagagtgcagcggcagagccgattgcggctttaccagcgagagctaccagcagggcgtgctgagcgccaccatcctgtacgagatcctgctgggcaaggccaccctgtacgccgtgctggtgtctgccctggtgctgatggctatggtcaagcggaaggacagccggggacgcgccaagagaagcggatctggcgtgaagcagaccctgaatttcgacctgctgaagctggctggcgacgtggaatccaacccaggccctactagtatggactggatttggcgcatccttttccttgtcggcgctgctaccggcgcgcattccttcgaagaagtgcagctccagcagtctggacctggcctggttaagcctagccagacactgagcctgacctgtgccatcagcggcgattccatgctgagcaacagcgacacctggaactggatcagacagagccccagcagaggcctggaatggctgggcagaacataccacagaagcacttggtacgacgactacgccagctctgtgcggggcagagtgtccatcaatgtggacaccagcaagaaccagtacagcctgcaactgaacgccgtgacacctgaggataccggcgtgtactactgtgccagagtgcggctccaggacggcaattcttggagcgacgcctttgatgtgtggggccagggcacaatggtcaccgtttctagcacgcgtgcctctacaaagggaccctccgtgtttcctctggctcccagcagcaagtctacaagcggaggaacagccgctctgggctgcctggtcaaggattactttcccgagcctgtgaccgtgtcctggaatagcggagcactgacaagcggcgtgcacacctttccagccgtgctgcaaagcagcggcctgtactctctgagcagcgtggtcacagtgcctagctctagcctgggcacccagacctacatctgcaatgtgaaccacaagcctagcaacaccaaggtggacaagagagtggaacccaagagctgtatccccgaggacacattcttcccaagccccgagagcagctgcgacgtgaagctggtggaaaagagcttcgagacagacaccaacctgaacttccagaacctgagcgtgatcggcttcagaatcctgctgctgaaagtggccggctttaacctgctgatgaccctgcggctgtggtccagc

SEQ ID NO: 3308 - DNA, 2319 bp, Artificial Sequence
  Synthetic Polynucloetide
atggccttaccagtgaccgccttgctcctgccgctggccttgctgctccacgccgccaggccggaagtgcagctggttgaatctggcggaggactggttcagcctggcggatctctgagactgtcttgtgccgccagcggcttcagcttcagcgacttttggatgagctgggtccgacaggcccctggcaaaggacttgaatgggtcgccacaatcagccaggccggcagcgagaaggactacgtggactctgtgaagggcagattcaccatcagccgggacaacgccaagaagtccctgtacctccagatgaacagcctgagagccgaggacaccgccgtgtactattgtgcctctggcgtgtacagcttcgactacagaggccagggcaccctggtcacagtctcttctggtaccggcggaggcggatctggcggcggaggtagcggtggcggaggatctgaattcgacgtgatgctgacccagacaccactgagcctgcctgtgtctctgggcgatcaggccagcatctcctgtagaagcagccagagcatcctgcacagcaccggcgatacctacctggaatggtatctccagaagcctggacagagccccaagctgctgattaacaaggtgtccaaccggctgagcggcgtgcccgatagattttctggcagcggctctggcaccgacttcaccctgaagatcagcagagtggaagccgaggacctgggcgtgtactactgcttccaaggcagccatgttccttggacctttggcggaggcaccaagctggaaatcaagagagctgacgccgctcctaccgtgtccatctttcctctcgagggacagcctaaggccaatcctaccgtgacactgttccctccaagcagcgaagaactccaggccaacaaggccacacttgtgtgcctgatctccgacttctaccctggggctgtgacagtggcttggaaggccgatggatctcctgtgaaagccggcgtggaaaccaccaagccatccaagcagagcaacaacaaatacgccgccagctcctacctgagcctgacacctgagcagtggaagtcccacagatcctacagctgccaagtgacccacgaaggcagcaccgtggaaaagacagtggcccctacagagtgcagcggcagagccgattgcggctttaccagcgagagctaccagcagggcgtgctgagcgccaccatcctgtacgagatcctgctgggcaaggccaccctgtacgccgtgctggtgtctgccctggtgctgatggctatggtcaagcggaaggacagccggggacgcgccaagagaagcggatctggcgtgaagcagaccctgaatttcgacctgctgaagctggctggcgacgtggaatccaacccaggccctactagtatggactggatttggcgcatccttttccttgtcggcgctgctaccggcgcgcattccttcgaacaagtgaagctccagcagagcggccctagccttgtgaaacctggcgcttccgtgaagatgagctgcaaggccagcggctacaccttcaccgatttctacatgaaatgggtcaagcagagccacggcaagtctctggaatggatcggcgacatcaaccccaacatcggagacaccttctacaaccagaagttcaagggcaaagccacactgaccgtggacaagagcagcagcaccgcctacatgcagctcaacagcctgaccagcgaggacagcgccgtgtacttttgttccgtgggctacttcgacgtgtggggagccggaacaaccgtgacagtctcttctacgcgtgcctctacaaagggaccctccgtgtttcctctggctcccagcagcaagtctacaagcggaggaacagccgctctgggctgcctggtcaaggattactttcccgagcctgtgaccgtgtcctggaatagcggagcactgacaagcggcgtgcacacctttccagccgtgctgcaaagcagcggcctgtactctctgagcagcgtggtcacagtgcctagctctagcctgggcacccagacctacatctgcaatgtgaaccacaagcctagcaacaccaaggtggacaagagagtggaacccaagagctgtatccccgaggacacattcttcccaagccccgagagcagctgcgacgtgaagctggtggaaaagagcttcgagacagacaccaacctgaacttccagaacctgagcgtgatcggcttcagaatcctgctgctgaaagtggccggctttaacctgctgatgaccctgcggctgtggtccagc

SEQ ID NO: 3309 - DNA, 2307 bp, Artificial Sequence
  Synthetic Polynucloetide
atggccttaccagtgaccgccttgctcctgccgctggccttgctgctccacgccgccaggccggaagtgcagctggttgaatctggcggaggactggttcagcctggcggatctctgagactgtcttgtgccgccagcggcttcagcttcagcgacttttggatgagctgggtccgacaggcccctggcaaaggacttgaatgggtcgccacaatcagccaggccggcagcgagaaggactacgtggactctgtgaagggcagattcaccatcagccgggacaacgccaagaagtccctgtacctccagatgaacagcctgagagccgaggacaccgccgtgtactattgtgcctctggcgtgtacagcttcgactacagaggccagggcaccctggtcacagtctcttctggtaccggcggaggcggatctggcggcggaggtagcggtggcggaggatctgaattcgagatcgtgctgacacagtctcccgccacactgtcactgtctccaggcgaaagagccacactgagctgtagagccagccagagcgtgtccatctacctggcctggtatcagcagaagcctggacaggctccccggctgctgatctacgatgccagcaatagagccacaggcatccccgccagattttctggctctggcagcggcaccgatttcaccctgaccataagcagcctggaacctgaggacttcgccgtgtactactgccagcagagaagcaactggcctcctttcacattcggccctggcaccaaggtggacatcaaactcgagggacagcctaaggccaatcctaccgtgacactgttccctccaagcagcgaagaactccaggccaacaaggccacacttgtgtgcctgatctccgacttctaccctggggctgtgacagtggcttggaaggccgatggatctcctgtgaaagccggcgtggaaaccaccaagccatccaagcagagcaacaacaaatacgccgccagctcctacctgagcctgacacctgagcagtggaagtcccacagatcctacagctgccaagtgacccacgaaggcagcaccgtggaaaagacagtggcccctacagagtgcagcggcagagccgattgcggctttaccagcgagagctaccagcagggcgtgctgagcgccaccatcctgtacgagatcctgctgggcaaggccaccctgtacgccgtgctggtgtctgccctggtgctgatggctatggtcaagcggaaggacagccggggacgcgccaagagaagcggatctggcgtgaagcagaccctgaatttcgacctgctgaagctggctggcgacgtggaatccaacccaggccctactagtatggactggatttggcgcatccttttccttgtcggcgctgctaccggcgcgcattccttcgaacaggtgcagcttgttgaaagcggaggcggagttgtgcagcctggcagaagtctgagactgtcttgtgccgccagcggcttcaccttcagcagctatggaatgcactgggtccgacaggcccctggcaaaggacttgaatgggttgccgtgatctgggacgacggcagcaacaagtattacgtggacagcgtgaagggcagattcaccatcagccgggacaacagcaagaacaccctgtacctccagatgaacagcctgagagccgaggacacagccgtgtattattgcgccagagatgactactacggcagcggctccttcaacagctactatggcacagacgtgtggggccagggcacaacagttaccgttagctctacgcgtgcctctacaaagggaccctccgtgtttcctctggctcccagcagcaagtctacaagcggaggaacagccgctctgggctgcctggtcaaggattactttcccgagcctgtgaccgtgtcctggaatagcggagcactgacaagcggcgtgcacacctttccagccgtgctgcaaagcagcggcctgtactctctgagcagcgtggtcacagtgcctagctctagcctgggcacccagacctacatctgcaatgtgaaccacaagcctagcaacaccaaggtggacaagagagtggaacccaagagctgtatccccgaggacacattcttcccaagccccgagagcagctgcgacgtgaagctggtggaaaagagcttcgagacagacaccaacctgaacttccagaacctgagcgtgatcggcttcagaatcctgctgctgaaagtggccggctttaacctgctgatgaccctgcggctgtggtccagc

SEQ ID NO: 3310 - DNA, 2262 bp, Artificial Sequence
  Synthetic Polynucloetide
atggccttaccagtgaccgccttgctcctgccgctggccttgctgctccacgccgccaggccggaagtgcagctggttgaatctggcggaggactggttcagcctggcggatctctgagactgtcttgtgccgccagcggcttcagcttcagcgacttttggatgagctgggtccgacaggcccctggcaaaggacttgaatgggtcgccacaatcagccaggccggcagcgagaaggactacgtggactctgtgaagggcagattcaccatcagccgggacaacgccaagaagtccctgtacctccagatgaacagcctgagagccgaggacaccgccgtgtactattgtgcctctggcgtgtacagcttcgactacagaggccagggcaccctggtcacagtctcttctggtaccggcggaggcggatctggcggcggaggtagcggtggcggaggatctgaattcgacatccagatgacacagagccctagcagcctgtctgccagcgtgggagacagagtgaccatcacctgtagagccagccagggcatctcttcttggctggcctggtatcagcagaagcccgagaaggcccctaagagcctgatctatgccgccagctctctccagagcggagtgcctagcagattttctggcagcggctccggcaccgatttcaccctgacaatatccagcctccagcctgaggacttcgccacctactactgccagcagtacaacagctacccctacaccttcggccagggcaccaagctggaaatcaaactcgagggacagcctaaggccaatcctaccgtgacactgttccctccaagcagcgaagaactccaggccaacaaggccacacttgtgtgcctgatctccgacttctaccctggggctgtgacagtggcttggaaggccgatggatctcctgtgaaagccggcgtggaaaccaccaagccatccaagcagagcaacaacaaatacgccgccagctcctacctgagcctgacacctgagcagtggaagtcccacagatcctacagctgccaagtgacccacgaaggcagcaccgtggaaaagacagtggcccctacagagtgcagcggcagagccgattgcggctttaccagcgagagctaccagcagggcgtgctgagcgccaccatcctgtacgagatcctgctgggcaaggccaccctgtacgccgtgctggtgtctgccctggtgctgatggctatggtcaagcggaaggacagccggggacgcgccaagagaagcggatctggcgtgaagcagaccctgaatttcgacctgctgaagctggctggcgacgtggaatccaacccaggccctactagtatggactggatttggcgcatccttttccttgtcggcgctgctaccggcgcgcattccttcgaagaagtgcaactggttcaatctggcggcggactggttcatccaggcggttctctgagactgagctgtgccggctctggcttcaccttcagcacctacctgatgtactgggtccgacaggcccctggcaagacactggaatgggtgtccgctattggcagcggaggcgatacctactacgccgactctgtgaagggcagattcaccatcagccgggacaacgccaagaacagcctgtacctccagatgaactccctgagagccgaggacatggccgtgtactactgtgccagaggactcggctattggggccagggaacactggtcacagtgtcctctacgcgtgcctctacaaagggaccctccgtgtttcctctggctcccagcagcaagtctacaagcggaggaacagccgctctgggctgcctggtcaaggattactttcccgagcctgtgaccgtgtcctggaatagcggagcactgacaagcggcgtgcacacctttccagccgtgctgcaaagcagcggcctgtactctctgagcagcgtggtcacagtgcctagctctagcctgggcacccagacctacatctgcaatgtgaaccacaagcctagcaacaccaaggtggacaagagagtggaacccaagagctgtatccccgaggacacattcttcccaagccccgagagcagctgcgacgtgaagctggtggaaaagagcttcgagacagacaccaacctgaacttccagaacctgagcgtgatcggcttcagaatcctgctgctgaaagtggccggctttaacctgctgatgaccctgcggctgtggtccagc

SEQ ID NO: 3311 - DNA, 2319 bp, Artificial Sequence
  Synthetic Polynucloetide
atggccttaccagtgaccgccttgctcctgccgctggccttgctgctccacgccgccaggccggaagtgcagctggttgaatctggcggaggactggttcagcctggcggatctctgagactgtcttgtgccgccagcggcttcagcttcagcgacttttggatgagctgggtccgacaggcccctggcaaaggacttgaatgggtcgccacaatcagccaggccggcagcgagaaggactacgtggactctgtgaagggcagattcaccatcagccgggacaacgccaagaagtccctgtacctccagatgaacagcctgagagccgaggacaccgccgtgtactattgtgcctctggcgtgtacagcttcgactacagaggccagggcaccctggtcacagtctcttctggtaccggcggaggcggatctggcggcggaggtagcggtggcggaggatctgaattcctgcctgttctgacacagcctccatccgtgtctgtggcccctggaaagaccgccagaatcacatgcggcggcaacaacatcggcagcaagagcgtgcactggtatcagcagaagcctggacaggctcctgtgctggtggtgtacgacgacagcgatagacctagcggcatccccgagagattcagcggcagcaattccggcaataccgccacactgaccatcagcagagtggaagctggcgacgaggccgactactactgccaagtgtgggacagcagcagcgactacgtggtgtttggcggcggaacaaagctgacagtgcttctcgagggacagcctaaggccaatcctaccgtgacactgttccctccaagcagcgaagaactccaggccaacaaggccacacttgtgtgcctgatctccgacttctaccctggggctgtgacagtggcttggaaggccgatggatctcctgtgaaagccggcgtggaaaccaccaagccatccaagcagagcaacaacaaatacgccgccagctcctacctgagcctgacacctgagcagtggaagtcccacagatcctacagctgccaagtgacccacgaaggcagcaccgtggaaaagacagtggcccctacagagtgcagcggcagagccgattgcggctttaccagcgagagctaccagcagggcgtgctgagcgccaccatcctgtacgagatcctgctgggcaaggccaccctgtacgccgtgctggtgtctgccctggtgctgatggctatggtcaagcggaaggacagccggggacgcgccaagagaagcggatctggcgtgaagcagaccctgaatttcgacctgctgaagctggctggcgacgtggaatccaacccaggccctactagtatggactggatttggcgcatccttttccttgtcggcgctgctaccggcgcgcattccttcgaagaagttcaactggtgcagagcggagccgaagtgaagaagccaggcgagagcctgaagattagctgcaaaggcagcggctacagcttcaccagctactggatcggctgggtccgacagatgcctggcaaaggactggaatggatgggcatcatctaccccggcgacagcgacaccagatacagccctagctttcagggccaagtgaccatctccgccgacaagagcatcagcacagcctacctccagtggtcctctctgaaggccagcgataccgccatgtactactgcgccagacaagtctggggatggcaaggcggcatgtaccccaggtctaactggtggtacaacctggactcttggggccagggcacactggtcacagtctcttctacgcgtgcctctacaaagggaccctccgtgtttcctctggctcccagcagcaagtctacaagcggaggaacagccgctctgggctgcctggtcaaggattactttcccgagcctgtgaccgtgtcctggaatagcggagcactgacaagcggcgtgcacacctttccagccgtgctgcaaagcagcggcctgtactctctgagcagcgtggtcacagtgcctagctctagcctgggcacccagacctacatctgcaatgtgaaccacaagcctagcaacaccaaggtggacaagagagtggaacccaagagctgtatccccgaggacacattcttcccaagccccgagagcagctgcgacgtgaagctggtggaaaagagcttcgagacagacaccaacctgaacttccagaacctgagcgtgatcggcttcagaatcctgctgctgaaagtggccggctttaacctgctgatgaccctgcggctgtggtccagc

SEQ ID NO: 3312 - DNA, 2298 bp, Artificial Sequence
  Synthetic Polynucloetide
atggccttaccagtgaccgccttgctcctgccgctggccttgctgctccacgccgccaggccggaagtgcagctggttgaatctggcggaggactggttcagcctggcggatctctgagactgtcttgtgccgccagcggcttcagcttcagcgacttttggatgagctgggtccgacaggcccctggcaaaggacttgaatgggtcgccacaatcagccaggccggcagcgagaaggactacgtggactctgtgaagggcagattcaccatcagccgggacaacgccaagaagtccctgtacctccagatgaacagcctgagagccgaggacaccgccgtgtactattgtgcctctggcgtgtacagcttcgactacagaggccagggcaccctggtcacagtctcttctggtaccggcggaggcggatctggcggcggaggtagcggtggcggaggatctgaattcgagctggtcatgacacagagccctgcttctctggccgtgtcactgggacagagagccaccatctcttgcagagccagcgagagcgtggacagctacggcaagagcttcatgcactggtatcagctcaagcccggccagcctcctaagctgctgatctacagagcctccaacctggaaagcggcgtgccagccagattttctggcagcggcagcagaaccgacttcaccctgaccattgatcccgtggaagccgatgatgccgccacctactactgccagcagaacaacgaggacccctggacatttggcggaggcaccaagctggaaatcaaactcgagggacagcctaaggccaatcctaccgtgacactgttccctccaagcagcgaagaactccaggccaacaaggccacacttgtgtgcctgatctccgacttctaccctggggctgtgacagtggcttggaaggccgatggatctcctgtgaaagccggcgtggaaaccaccaagccatccaagcagagcaacaacaaatacgccgccagctcctacctgagcctgacacctgagcagtggaagtcccacagatcctacagctgccaagtgacccacgaaggcagcaccgtggaaaagacagtggcccctacagagtgcagcggcagagccgattgcggctttaccagcgagagctaccagcagggcgtgctgagcgccaccatcctgtacgagatcctgctgggcaaggccaccctgtacgccgtgctggtgtctgccctggtgctgatggctatggtcaagcggaaggacagccggggacgcgccaagagaagcggatctggcgtgaagcagaccctgaatttcgacctgctgaagctggctggcgacgtggaatccaacccaggccctactagtatggactggatttggcgcatccttttccttgtcggcgctgctaccggcgcgcattccttcgaagaagtgcagctcgaacagtctggccccgagcttgtgaaacctggcgcttccgtgaagatgagctgcaaggccagcggctacaccttcaccaactactacatgaaatgggtcaagcagagccacggcaagtccctggaatggatcggcgatctgaaccccaacaacggcgacaccttctacaaccagaagttcaagggcaaagccacactgaccgtggacaagagcagcaacaccgcctacatgcagctcaactccctgaccagcgaggacagcgccgtgtactactgtgccagaaccggcagatacgaagagaacgctatggactactggggccagggcacaagcgtgacagtctcttctacgcgtgcctctacaaagggaccctccgtgtttcctctggctcccagcagcaagtctacaagcggaggaacagccgctctgggctgcctggtcaaggattactttcccgagcctgtgaccgtgtcctggaatagcggagcactgacaagcggcgtgcacacctttccagccgtgctgcaaagcagcggcctgtactctctgagcagcgtggtcacagtgcctagctctagcctgggcacccagacctacatctgcaatgtgaaccacaagcctagcaacaccaaggtggacaagagagtggaacccaagagctgtatccccgaggacacattcttcccaagccccgagagcagctgcgacgtgaagctggtggaaaagagcttcgagacagacaccaacctgaacttccagaacctgagcgtgatcggcttcagaatcctgctgctgaaagtggccggctttaacctgctgatgaccctgcggctgtggtccagc

SEQ ID NO: 3313 - DNA, 2280 bp, Artificial Sequence
  Synthetic Polynucloetide
atggccttaccagtgaccgccttgctcctgccgctggccttgctgctccacgccgccaggccggaagtgcagctggttgaatctggcggaggactggttcagcctggcggatctctgagactgtcttgtgccgccagcggcttcagcttcagcgacttttggatgagctgggtccgacaggcccctggcaaaggacttgaatgggtcgccacaatcagccaggccggcagcgagaaggactacgtggactctgtgaagggcagattcaccatcagccgggacaacgccaagaagtccctgtacctccagatgaacagcctgagagccgaggacaccgccgtgtactattgtgcctctggcgtgtacagcttcgactacagaggccagggcaccctggtcacagtctcttctggtaccggcggaggcggatctggcggcggaggtagcggtggcggaggatctgaattcgacgtggtcatgacacagagcccttctagcctgtctgccagcgtgggcgacagagtgaccatcacctgtatggcctccgaggacatctacatccggctggcctggtatcagcagaagcctggaaacgcccctaagctgctgatctacgccgccacctctctggaaacaggcgtgccaagcagattttccggcagcggctctggcaccgatttcaccctgacaatatccagcctccagcctgaggacttcgccacctactactgccagcagtattggagcagcccctggacatttggcggaggcaccaaggtggaaatcaaactcgagggacagcctaaggccaatcctaccgtgacactgttccctccaagcagcgaagaactccaggccaacaaggccacacttgtgtgcctgatctccgacttctaccctggggctgtgacagtggcttggaaggccgatggatctcctgtgaaagccggcgtggaaaccaccaagccatccaagcagagcaacaacaaatacgccgccagctcctacctgagcctgacacctgagcagtggaagtcccacagatcctacagctgccaagtgacccacgaaggcagcaccgtggaaaagacagtggcccctacagagtgcagcggcagagccgattgcggctttaccagcgagagctaccagcagggcgtgctgagcgccaccatcctgtacgagatcctgctgggcaaggccaccctgtacgccgtgctggtgtctgccctggtgctgatggctatggtcaagcggaaggacagccggggacgcgccaagagaagcggatctggcgtgaagcagaccctgaatttcgacctgctgaagctggctggcgacgtggaatccaacccaggccctactagtatggactggatttggcgcatccttttccttgtcggcgctgctaccggcgcgcattccttcgaacaggttcagctgcaagagtctggccccggactggtcaagcctagccaaacactgagcctgacctgtaccgtgtccggctacagcatcaccagcgactacacctggaactggatcagacagcctcctggcaacggactggaatggatcggctacatcacctacagcggcagcaccagctacaaccccagcctgaaaagccgggtgctgatctccgtggacaccagcaagaatcaggtgtccctgaagctgagcagcgtgacagccgctgataccgccgtgtactactgtgccagactggggagaagatacacaatggactactggggccagggcaccaccgtgacagtttcttctacgcgtgcctctacaaagggaccctccgtgtttcctctggctcccagcagcaagtctacaagcggaggaacagccgctctgggctgcctggtcaaggattactttcccgagcctgtgaccgtgtcctggaatagcggagcactgacaagcggcgtgcacacctttccagccgtgctgcaaagcagcggcctgtactctctgagcagcgtggtcacagtgcctagctctagcctgggcacccagacctacatctgcaatgtgaaccacaagcctagcaacaccaaggtggacaagagagtggaacccaagagctgtatccccgaggacacattcttcccaagccccgagagcagctgcgacgtgaagctggtggaaaagagcttcgagacagacaccaacctgaacttccagaacctgagcgtgatcggcttcagaatcctgctgctgaaagtggccggctttaacctgctgatgaccctgcggctgtggtccagc

SEQ ID NO: 3314 - DNA, 2292 bp, Artificial Sequence
  Synthetic Polynucloetide
atggccttaccagtgaccgccttgctcctgccgctggccttgctgctccacgccgccaggccggaagtgcagctggttgaatctggcggaggactggttcagcctggcggatctctgagactgtcttgtgccgccagcggcttcagcttcagcgacttttggatgagctgggtccgacaggcccctggcaaaggacttgaatgggtcgccacaatcagccaggccggcagcgagaaggactacgtggactctgtgaagggcagattcaccatcagccgggacaacgccaagaagtccctgtacctccagatgaacagcctgagagccgaggacaccgccgtgtactattgtgcctctggcgtgtacagcttcgactacagaggccagggcaccctggtcacagtctcttctggtaccggcggaggcggatctggcggcggaggtagcggtggcggaggatctgaattcgatattgtgctgactcagagccctgccactctgagccttagtccaggcgacagagctaccatctcctgtagggcctctgaatccgtgaccattctgggctctcatctcatatattggtatcaacaaaagccgggccagcctccacggctgctcattcaactggcctctaacgtgcagaccggcgtgccagctagattttctggctctggctcccggaccgactttacactgacaatcagctccgtggaacccgaagattttgccgtctattattgcctccagtccaggaccattcctcggacattcggccagggaacaaaactcgaaatcaagcggctcgagggacagcctaaggccaatcctaccgtgacactgttccctccaagcagcgaagaactccaggccaacaaggccacacttgtgtgcctgatctccgacttctaccctggggctgtgacagtggcttggaaggccgatggatctcctgtgaaagccggcgtggaaaccaccaagccatccaagcagagcaacaacaaatacgccgccagctcctacctgagcctgacacctgagcagtggaagtcccacagatcctacagctgccaagtgacccacgaaggcagcaccgtggaaaagacagtggcccctacagagtgcagcggcagagccgattgcggctttaccagcgagagctaccagcagggcgtgctgagcgccaccatcctgtacgagatcctgctgggcaaggccaccctgtacgccgtgctggtgtctgccctggtgctgatggctatggtcaagcggaaggacagccggggacgcgccaagagaagcggatctggcgtgaagcagaccctgaatttcgacctgctgaagctggctggcgacgtggaatccaacccaggccctactagtatggactggatttggcgcatccttttccttgtcggcgctgctaccggcgcgcattccttcgaacaggtgcagctcgttcagagtggccccgaagtgaaaaagccaggcgagtccgtgaagatttcctgcaaagcctccggctacacattccggcactactctatgaattgggtcaagcaggccccaggccagggccttaagtggatgggacgcatcaataccgagtccggcgtgccaatctacgccgatgacttcaaaggccggttcagcttcaccgtggatacctctgcctccaccgcctacctggaaatcagcagcctgaccagcgaggatacagctgtgtacttctgtagcaacgattacctctacagcctggatttctggggacagggaaccacactgaccgtgtctagcacgcgtgcctctacaaagggaccctccgtgtttcctctggctcccagcagcaagtctacaagcggaggaacagccgctctgggctgcctggtcaaggattactttcccgagcctgtgaccgtgtcctggaatagcggagcactgacaagcggcgtgcacacctttccagccgtgctgcaaagcagcggcctgtactctctgagcagcgtggtcacagtgcctagctctagcctgggcacccagacctacatctgcaatgtgaaccacaagcctagcaacaccaaggtggacaagagagtggaacccaagagctgtatccccgaggacacattcttcccaagccccgagagcagctgcgacgtgaagctggtggaaaagagcttcgagacagacaccaacctgaacttccagaacctgagcgtgatcggcttcagaatcctgctgctgaaagtggccggctttaacctgctgatgaccctgcggctgtggtccagc

SEQ ID NO: 3315 - DNA, 2292 bp, Artificial Sequence
  Synthetic Polynucloetide
atggccttaccagtgaccgccttgctcctgccgctggccttgctgctccacgccgccaggccggaagtgcagctggttgaatctggcggaggactggttcagcctggcggatctctgagactgtcttgtgccgccagcggcttcagcttcagcgacttttggatgagctgggtccgacaggcccctggcaaaggacttgaatgggtcgccacaatcagccaggccggcagcgagaaggactacgtggactctgtgaagggcagattcaccatcagccgggacaacgccaagaagtccctgtacctccagatgaacagcctgagagccgaggacaccgccgtgtactattgtgcctctggcgtgtacagcttcgactacagaggccagggcaccctggtcacagtctcttctggtaccggcggaggcggatctggcggcggaggtagcggtggcggaggatctgaattcgacatcgtgctgacacagtctcccgccacactgtcactgagccctggcgatagagccacactgagctgtagagccagcgagagcgtgacaatcctgggcagccacctgatctactggtatcagcagaagcccggacaggcccctagactgctgattcagctcgccagcaatgtgcagacaggcatccctgccagattttccggcagcggcagcagaaccgatttcaccctgaccataagcagcctggaacctgaggacttcgccgtgtactactgcctccagagccggacaatccccagaacctttggacagggcaccaagctggaaatcaagagactcgagggacagcctaaggccaatcctaccgtgacactgttccctccaagcagcgaagaactccaggccaacaaggccacacttgtgtgcctgatctccgacttctaccctggggctgtgacagtggcttggaaggccgatggatctcctgtgaaagccggcgtggaaaccaccaagccatccaagcagagcaacaacaaatacgccgccagctcctacctgagcctgacacctgagcagtggaagtcccacagatcctacagctgccaagtgacccacgaaggcagcaccgtggaaaagacagtggcccctacagagtgcagcggcagagccgattgcggctttaccagcgagagctaccagcagggcgtgctgagcgccaccatcctgtacgagatcctgctgggcaaggccaccctgtacgccgtgctggtgtctgccctggtgctgatggctatggtcaagcggaaggacagccggggacgcgccaagagaagcggatctggcgtgaagcagaccctgaatttcgacctgctgaagctggctggcgacgtggaatccaacccaggccctactagtatggactggatttggcgcatccttttccttgtcggcgctgctaccggcgcgcattccttcgaacaggttcagctggtgcagtctggcagcgagctgaagaaacctggcgagagcgtgaagatcagctgcaaggccagcggctacaccttcacacactacagcatgaactgggtccgacaggcccctggacaaggactggaatggatgggcagaatcaacaccgagacaggcgagcccctgtacgccgacgatttcaagggcagattcgtgttcagcctggacaccagcgccagcacagcctatctccagatcagctctctgaaggccgaggacaccgccgtgtactactgctccaacgactacctgtactccctggactattggggccagggcacactggtcacagtgtctagtacgcgtgcctctacaaagggaccctccgtgtttcctctggctcccagcagcaagtctacaagcggaggaacagccgctctgggctgcctggtcaaggattactttcccgagcctgtgaccgtgtcctggaatagcggagcactgacaagcggcgtgcacacctttccagccgtgctgcaaagcagcggcctgtactctctgagcagcgtggtcacagtgcctagctctagcctgggcacccagacctacatctgcaatgtgaaccacaagcctagcaacaccaaggtggacaagagagtggaacccaagagctgtatccccgaggacacattcttcccaagccccgagagcagctgcgacgtgaagctggtggaaaagagcttcgagacagacaccaacctgaacttccagaacctgagcgtgatcggcttcagaatcctgctgctgaaagtggccggctttaacctgctgatgaccctgcggctgtggtccagc

SEQ ID NO: 3316 - DNA, 2295 bp, Artificial Sequence
  Synthetic Polynucloetide
atggccttaccagtgaccgccttgctcctgccgctggccttgctgctccacgccgccaggccggaagtgcagctggttgaatctggcggaggactggttcagcctggcggatctctgagactgtcttgtgccgccagcggcttcagcttcagcgacttttggatgagctgggtccgacaggcccctggcaaaggacttgaatgggtcgccacaatcagccaggccggcagcgagaaggactacgtggactctgtgaagggcagattcaccatcagccgggacaacgccaagaagtccctgtacctccagatgaacagcctgagagccgaggacaccgccgtgtactattgtgcctctggcgtgtacagcttcgactacagaggccagggcaccctggtcacagtctcttctggtaccggcggaggcggatctggcggcggaggtagcggtggcggaggatctgaattcgacatccagctgactcagagccctagctttctgagcgccagcgtgggcgacagagtgaccattacatgtagagccagccagggcatcagcaccgacctgaactggtatcagcagaagcctggcaaggcccctaagctgctgatctacgccgccagcaatctggaaagcggcgtgccaagcagattttccggctctggcagcggcaccgagttcaccctgacaatatctagcctccagcctgaggacttcgccacctactactgccagcagagctacaactggccctacacctttggcggaggcaccaaggtggaaatcaagagactcgagggacagcctaaggccaatcctaccgtgacactgttccctccaagcagcgaagaactccaggccaacaaggccacacttgtgtgcctgatctccgacttctaccctggggctgtgacagtggcttggaaggccgatggatctcctgtgaaagccggcgtggaaaccaccaagccatccaagcagagcaacaacaaatacgccgccagctcctacctgagcctgacacctgagcagtggaagtcccacagatcctacagctgccaagtgacccacgaaggcagcaccgtggaaaagacagtggcccctacagagtgcagcggcagagccgattgcggctttaccagcgagagctaccagcagggcgtgctgagcgccaccatcctgtacgagatcctgctgggcaaggccaccctgtacgccgtgctggtgtctgccctggtgctgatggctatggtcaagcggaaggacagccggggacgcgccaagagaagcggatctggcgtgaagcagaccctgaatttcgacctgctgaagctggctggcgacgtggaatccaacccaggccctactagtatggactggatttggcgcatccttttccttgtcggcgctgctaccggcgcgcattccttcgaagaagttcagctggttgaatcaggcggaggactcgtgaaacctggcggctctctgagactgtcttgtgccgccagcggcttcaccttcagcaacttcgagatgaactgggtccgacaggccccaggcaaaggactggaatgggtgtccggcatcagctccaatggccggtacatcaactacgccgacagcgtgaagggcagattcaccatcagccgggacaacgccaagaacagcctgtacctccagatgaactccctgagagccgaggacaccgccgtgtactattgtgccagagtggtggacttcgaccaggactacaacggcttcgactattggggccagggcaccctggttaccgttagctctacgcgtgcctctacaaagggaccctccgtgtttcctctggctcccagcagcaagtctacaagcggaggaacagccgctctgggctgcctggtcaaggattactttcccgagcctgtgaccgtgtcctggaatagcggagcactgacaagcggcgtgcacacctttccagccgtgctgcaaagcagcggcctgtactctctgagcagcgtggtcacagtgcctagctctagcctgggcacccagacctacatctgcaatgtgaaccacaagcctagcaacaccaaggtggacaagagagtggaacccaagagctgtatccccgaggacacattcttcccaagccccgagagcagctgcgacgtgaagctggtggaaaagagcttcgagacagacaccaacctgaacttccagaacctgagcgtgatcggcttcagaatcctgctgctgaaagtggccggctttaacctgctgatgaccctgcggctgtggtccagc

SEQ ID NO: 3317 - DNA, 2289 bp, Artificial Sequence
  Synthetic Polynucloetide
atggccttaccagtgaccgccttgctcctgccgctggccttgctgctccacgccgccaggccggaagtgcagctggttgaatctggcggaggactggttcagcctggcggatctctgagactgtcttgtgccgccagcggcttcagcttcagcgacttttggatgagctgggtccgacaggcccctggcaaaggacttgaatgggtcgccacaatcagccaggccggcagcgagaaggactacgtggactctgtgaagggcagattcaccatcagccgggacaacgccaagaagtccctgtacctccagatgaacagcctgagagccgaggacaccgccgtgtactattgtgcctctggcgtgtacagcttcgactacagaggccagggcaccctggtcacagtctcttctggtaccggcggaggcggatctggcggcggaggtagcggtggcggaggatctgaattcgacatccaactgactcagagccccagctttctgagcgcctctgtgggcgacagagtgaccatcacatgtagtctcagcctgggcatcagcacatggcgggattggtttccgccgaggcttggcaggggccttgagccgctgacctacgccgccagcacactgcaaagcggagtgcctagcagattttccggcagcggctctggcaccgagttcaccctgacaatatccagcctccagcctgaggacttcgccacctactactgccagcagctcaacagctaccctctgacctttggcggaggcaccaaggtggaaatcaagagactcgagggacagcctaaggccaatcctaccgtgacactgttccctccaagcagcgaagaactccaggccaacaaggccacacttgtgtgcctgatctccgacttctaccctggggctgtgacagtggcttggaaggccgatggatctcctgtgaaagccggcgtggaaaccaccaagccatccaagcagagcaacaacaaatacgccgccagctcctacctgagcctgacacctgagcagtggaagtcccacagatcctacagctgccaagtgacccacgaaggcagcaccgtggaaaagacagtggcccctacagagtgcagcggcagagccgattgcggctttaccagcgagagctaccagcagggcgtgctgagcgccaccatcctgtacgagatcctgctgggcaaggccaccctgtacgccgtgctggtgtctgccctggtgctgatggctatggtcaagcggaaggacagccggggacgcgccaagagaagcggatctggcgtgaagcagaccctgaatttcgacctgctgaagctggctggcgacgtggaatccaacccaggccctactagtatggactggatttggcgcatccttttccttgtcggcgctgctaccggcgcgcattccttcgaagaagttcaactggttgagtctggtggcggcctggttaagcctggcggatctctgagactgagctgtgccgccagcggcttcacctttagcacatacggcatgagctgggtccgacaggcccctggaaaaggacttgagtgggtcgcctacatcaacaacggctccggctacatctactacgccgacagcgtgaagggcagattcaccatcagccgggacaacgccaagaacagcctgtacctccagatgaactccctgagagccgaggacaccgccgtgtactattgtgccagaggacagtggtggagcggcggagactttgattattggggccagggcaccctggtcaccgtttcttctacgcgtgcctctacaaagggaccctccgtgtttcctctggctcccagcagcaagtctacaagcggaggaacagccgctctgggctgcctggtcaaggattactttcccgagcctgtgaccgtgtcctggaatagcggagcactgacaagcggcgtgcacacctttccagccgtgctgcaaagcagcggcctgtactctctgagcagcgtggtcacagtgcctagctctagcctgggcacccagacctacatctgcaatgtgaaccacaagcctagcaacaccaaggtggacaagagagtggaacccaagagctgtatccccgaggacacattcttcccaagccccgagagcagctgcgacgtgaagctggtggaaaagagcttcgagacagacaccaacctgaacttccagaacctgagcgtgatcggcttcagaatcctgctgctgaaagtggccggctttaacctgctgatgaccctgcggctgtggtccagc

SEQ ID NO: 3318 - DNA, 2292 bp, Artificial Sequence
  Synthetic Polynucloetide
atggccttaccagtgaccgccttgctcctgccgctggccttgctgctccacgccgccaggccggaagtgcagctggttgaatctggcggaggactggttcagcctggcggatctctgagactgtcttgtgccgccagcggcttcagcttcagcgacttttggatgagctgggtccgacaggcccctggcaaaggacttgaatgggtcgccacaatcagccaggccggcagcgagaaggactacgtggactctgtgaagggcagattcaccatcagccgggacaacgccaagaagtccctgtacctccagatgaacagcctgagagccgaggacaccgccgtgtactattgtgcctctggcgtgtacagcttcgactacagaggccagggcaccctggtcacagtctcttctggtaccggcggaggcggatctggcggcggaggtagcggtggcggaggatctgaattcgagatcgtgctgacacagtctcccgccacactgtcactgtctccaggcgaaagagccacactgagctgtagcgccagcagcagcgtgtcctacatgtactggtatcagcagaagcccggacaggcccctagactgctgatctacagaaccagcaacctggcctctggcatccccgccagattttctggctctggcagcggcaccgatttcaccctgaccataagcagcctggaacctgaggacttcgccgtgtactactgccagcagtaccacagctaccccaccacctttggacagggcaccaaggtggaaatcaagcggacagttctcgagggacagcctaaggccaatcctaccgtgacactgttccctccaagcagcgaagaactccaggccaacaaggccacacttgtgtgcctgatctccgacttctaccctggggctgtgacagtggcttggaaggccgatggatctcctgtgaaagccggcgtggaaaccaccaagccatccaagcagagcaacaacaaatacgccgccagctcctacctgagcctgacacctgagcagtggaagtcccacagatcctacagctgccaagtgacccacgaaggcagcaccgtggaaaagacagtggcccctacagagtgcagcggcagagccgattgcggctttaccagcgagagctaccagcagggcgtgctgagcgccaccatcctgtacgagatcctgctgggcaaggccaccctgtacgccgtgctggtgtctgccctggtgctgatggctatggtcaagcggaaggacagccggggacgcgccaagagaagcggatctggcgtgaagcagaccctgaatttcgacctgctgaagctggctggcgacgtggaatccaacccaggccctactagtatggactggatttggcgcatccttttccttgtcggcgctgctaccggcgcgcattccttcgaagaagtgcagctggttgaatcaggtggcggcctggttcaacctggcggatctctgagactgtcttgtgccgccagcggcttcagcttcaacacctacgccatgaactgggtccgacaggctcctggcaaaggactggaatgggtgtcccacatcagaagcaagagcaacaacttcgccacctactacgccgacagcgtgaaggacagattcaccatcagccgggacaacgccaagaacagcctgtacctccagatgaactccctgagagccgaggacaccgccgtgtattattgcgccagacaaggcggcgacttccctatggattattggggccagggcaccctggtcaccgtttcttctacgcgtgcctctacaaagggaccctccgtgtttcctctggctcccagcagcaagtctacaagcggaggaacagccgctctgggctgcctggtcaaggattactttcccgagcctgtgaccgtgtcctggaatagcggagcactgacaagcggcgtgcacacctttccagccgtgctgcaaagcagcggcctgtactctctgagcagcgtggtcacagtgcctagctctagcctgggcacccagacctacatctgcaatgtgaaccacaagcctagcaacaccaaggtggacaagagagtggaacccaagagctgtatccccgaggacacattcttcccaagccccgagagcagctgcgacgtgaagctggtggaaaagagcttcgagacagacaccaacctgaacttccagaacctgagcgtgatcggcttcagaatcctgctgctgaaagtggccggctttaacctgctgatgaccctgcggctgtggtccagc

SEQ ID NO: 3319 - DNA, 2280 bp, Artificial Sequence
  Synthetic Polynucloetide
atggccttaccagtgaccgccttgctcctgccgctggccttgctgctccacgccgccaggccggaagtgcagctggttgaatctggcggaggactggttcagcctggcggatctctgagactgtcttgtgccgccagcggcttcagcttcagcgacttttggatgagctgggtccgacaggcccctggcaaaggacttgaatgggtcgccacaatcagccaggccggcagcgagaaggactacgtggactctgtgaagggcagattcaccatcagccgggacaacgccaagaagtccctgtacctccagatgaacagcctgagagccgaggacaccgccgtgtactattgtgcctctggcgtgtacagcttcgactacagaggccagggcaccctggtcacagtctcttctggtaccggcggaggcggatctggcggcggaggtagcggtggcggaggatctgaattcgacgtggtcatgacacagagcccttctagcctgtctgccagcgtgggcgacagagtgaccatcacctgtaaagccagcgaggacatctacatccggctggcctggtatcagcagaagcctggaaaggcccctaagctgctgatctacgccgccacctctctggaaacaggcgtgccaagcagattttccggcagcggctctggcaccgatttcaccctgacaatatccagcctccagcctgaggacttcgccacctactactgccagcagtattggaccacaccttggacctttggcggaggcaccaaggtggaaatcaaactcgagggacagcctaaggccaatcctaccgtgacactgttccctccaagcagcgaagaactccaggccaacaaggccacacttgtgtgcctgatctccgacttctaccctggggctgtgacagtggcttggaaggccgatggatctcctgtgaaagccggcgtggaaaccaccaagccatccaagcagagcaacaacaaatacgccgccagctcctacctgagcctgacacctgagcagtggaagtcccacagatcctacagctgccaagtgacccacgaaggcagcaccgtggaaaagacagtggcccctacagagtgcagcggcagagccgattgcggctttaccagcgagagctaccagcagggcgtgctgagcgccaccatcctgtacgagatcctgctgggcaaggccaccctgtacgccgtgctggtgtctgccctggtgctgatggctatggtcaagcggaaggacagccggggacgcgccaagagaagcggatctggcgtgaagcagaccctgaatttcgacctgctgaagctggctggcgacgtggaatccaacccaggccctactagtatggactggatttggcgcatccttttccttgtcggcgctgctaccggcgcgcattccttcgaacaggtgcagctccaagagtctggccctggactggtcaagcctagccagacactgagcctgacctgtaccgtgtccggctacagcatcaccatcgactacacctggaactggatcagacagcctcctggcaaaggactggaatggatcggctacatcacctacagcggcagcaccgactacaaccccagcctgaaaagccgggtgctgatctccgtggacaccagcaagaatcaggtgtccctgaagctgagcagcgtgacagccgctgataccgccgtgtactactgtgccagactgggcagaagatacgccctggattattggggccagggcaccaccgtgacagtgtcatctacgcgtgcctctacaaagggaccctccgtgtttcctctggctcccagcagcaagtctacaagcggaggaacagccgctctgggctgcctggtcaaggattactttcccgagcctgtgaccgtgtcctggaatagcggagcactgacaagcggcgtgcacacctttccagccgtgctgcaaagcagcggcctgtactctctgagcagcgtggtcacagtgcctagctctagcctgggcacccagacctacatctgcaatgtgaaccacaagcctagcaacaccaaggtggacaagagagtggaacccaagagctgtatccccgaggacacattcttcccaagccccgagagcagctgcgacgtgaagctggtggaaaagagcttcgagacagacaccaacctgaacttccagaacctgagcgtgatcggcttcagaatcctgctgctgaaagtggccggctttaacctgctgatgaccctgcggctgtggtccagc

SEQ ID NO: 3320 - DNA, 2292 bp, Artificial Sequence
  Synthetic Polynucloetide
atggccttaccagtgaccgccttgctcctgccgctggccttgctgctccacgccgccaggccggaagtgcagctggttgaatctggcggaggactggttcagcctggcggatctctgagactgtcttgtgccgccagcggcttcagcttcagcgacttttggatgagctgggtccgacaggcccctggcaaaggacttgaatgggtcgccacaatcagccaggccggcagcgagaaggactacgtggactctgtgaagggcagattcaccatcagccgggacaacgccaagaagtccctgtacctccagatgaacagcctgagagccgaggacaccgccgtgtactattgtgcctctggcgtgtacagcttcgactacagaggccagggcaccctggtcacagtctcttctggtaccggcggaggcggatctggcggcggaggtagcggtggcggaggatctgaattcgacatccagatgacccagaccacaagcagcctgtctgccagcctgggcgacagagtgaccatctcttgtagagccagccaggacatcagcaactacctgaactggtatcagcagaaacccgacggcaccgtgaagctgctgatctactacaccagcatcctgcacagcggcgtgcccagcagattttctggctctggcagcggcaccgactacagcctgaccatcagcaatctggaacaagaggacttcgctacctacttctgccagcaaggcaacaccctgccttggacatttggcggaggcaccaagctggaaatcaaagctctcgagggacagcctaaggccaatcctaccgtgacactgttccctccaagcagcgaagaactccaggccaacaaggccacacttgtgtgcctgatctccgacttctaccctggggctgtgacagtggcttggaaggccgatggatctcctgtgaaagccggcgtggaaaccaccaagccatccaagcagagcaacaacaaatacgccgccagctcctacctgagcctgacacctgagcagtggaagtcccacagatcctacagctgccaagtgacccacgaaggcagcaccgtggaaaagacagtggcccctacagagtgcagcggcagagccgattgcggctttaccagcgagagctaccagcagggcgtgctgagcgccaccatcctgtacgagatcctgctgggcaaggccaccctgtacgccgtgctggtgtctgccctggtgctgatggctatggtcaagcggaaggacagccggggacgcgccaagagaagcggatctggcgtgaagcagaccctgaatttcgacctgctgaagctggctggcgacgtggaatccaacccaggccctactagtatggactggatttggcgcatccttttccttgtcggcgctgctaccggcgcgcattccttcgaagtgcaactggttgaatctggcggcggactggttaagcctggcggatctctgaagctgagctgtgccgcctctggcttcgccttcagcatctacgatatgagctgggtccgacagacccctgagaagagactggaatgggtcgcctacatctctagcggcggagggacctactatcccgacacagtgaagggcagattcaccatctccagagacaacgccaagaacaccctgtacctccagatgagcagcctgaagtccgaggacaccgccatgtactactgcgccagacacagcggctatggcacacattggggagtgctgtttgcctactggggccagggaacactggtcacagtttctgctacgcgtgcctctacaaagggaccctccgtgtttcctctggctcccagcagcaagtctacaagcggaggaacagccgctctgggctgcctggtcaaggattactttcccgagcctgtgaccgtgtcctggaatagcggagcactgacaagcggcgtgcacacctttccagccgtgctgcaaagcagcggcctgtactctctgagcagcgtggtcacagtgcctagctctagcctgggcacccagacctacatctgcaatgtgaaccacaagcctagcaacaccaaggtggacaagagagtggaacccaagagctgtatccccgaggacacattcttcccaagccccgagagcagctgcgacgtgaagctggtggaaaagagcttcgagacagacaccaacctgaacttccagaacctgagcgtgatcggcttcagaatcctgctgctgaaagtggccggctttaacctgctgatgaccctgcggctgtggtccagc

SEQ ID NO: 3321 - DNA, 2325 bp, Artificial Sequence
  Synthetic Polynucloetide
atggccttaccagtgaccgccttgctcctgccgctggccttgctgctccacgccgccaggccggaagtgcagctggttgaatctggcggaggactggttcagcctggcggatctctgagactgtcttgtgccgccagcggcttcagcttcagcgacttttggatgagctgggtccgacaggcccctggcaaaggacttgaatgggtcgccacaatcagccaggccggcagcgagaaggactacgtggactctgtgaagggcagattcaccatcagccgggacaacgccaagaagtccctgtacctccagatgaacagcctgagagccgaggacaccgccgtgtactattgtgcctctggcgtgtacagcttcgactacagaggccagggcaccctggtcacagtctcttctggtaccggcggaggcggatctggcggcggaggtagcggtggcggaggatctgaattcgacatcgtgatgacacagagccctgatagcctggccgtgtctctgggagagagagccaccatcaactgcaagagcagccagagcctgctgtacagaagcaaccagaagaactacctggcctggtatcagcagaagcccggccagcctcctaagctgctgatctactgggccagcaccagagaaagcggcgtgcccgatagattttctggctctggcagcggcaccgacttcaccctgacaatttctagcctgcaagccgaggacgtggccgtgtactactgccagcagtattacaactaccccagaaccttcggccagggcaccaaggtggaaatcaagagaacagttctcgagggacagcctaaggccaatcctaccgtgacactgttccctccaagcagcgaagaactccaggccaacaaggccacacttgtgtgcctgatctccgacttctaccctggggctgtgacagtggcttggaaggccgatggatctcctgtgaaagccggcgtggaaaccaccaagccatccaagcagagcaacaacaaatacgccgccagctcctacctgagcctgacacctgagcagtggaagtcccacagatcctacagctgccaagtgacccacgaaggcagcaccgtggaaaagacagtggcccctacagagtgcagcggcagagccgattgcggctttaccagcgagagctaccagcagggcgtgctgagcgccaccatcctgtacgagatcctgctgggcaaggccaccctgtacgccgtgctggtgtctgccctggtgctgatggctatggtcaagcggaaggacagccggggacgcgccaagagaagcggatctggcgtgaagcagaccctgaatttcgacctgctgaagctggctggcgacgtggaatccaacccaggccctactagtatggactggatttggcgcatccttttccttgtcggcgctgctaccggcgcgcattccttcgaagaagttcagctgcttgaatcaggcggcggactggttcaacctggcggatctctgagactgagctgtgccgccagcggctacagcatcacaagcgactatgcctggaactgggtccgacaggcccctggcaaaggactggaatgggtgtcctacatcagcaacagcggcagcaccagctacaaccccagcctgaagtcccggttcaccatcagcagagacaacagcaagaacaccctgtacctccagatgaacagcctgagagctgaggacaccgccgtgtattattgcgccaaagagcggaactacgactacgacgattactactacgctatggactactggggccagggaaccctggtcacagtctcttctacgcgtgcctctacaaagggaccctccgtgtttcctctggctcccagcagcaagtctacaagcggaggaacagccgctctgggctgcctggtcaaggattactttcccgagcctgtgaccgtgtcctggaatagcggagcactgacaagcggcgtgcacacctttccagccgtgctgcaaagcagcggcctgtactctctgagcagcgtggtcacagtgcctagctctagcctgggcacccagacctacatctgcaatgtgaaccacaagcctagcaacaccaaggtggacaagagagtggaacccaagagctgtatccccgaggacacattcttcccaagccccgagagcagctgcgacgtgaagctggtggaaaagagcttcgagacagacaccaacctgaacttccagaacctgagcgtgatcggcttcagaatcctgctgctgaaagtggccggctttaacctgctgatgaccctgcggctgtggtccagc

SEQ ID NO: 3322 - DNA, 2304 bp, Artificial Sequence
  Synthetic Polynucloetide
atggccttaccagtgaccgccttgctcctgccgctggccttgctgctccacgccgccaggccggaagtgcagctggttgaatctggcggaggactggttcagcctggcggatctctgagactgtcttgtgccgccagcggcttcagcttcagcgacttttggatgagctgggtccgacaggcccctggcaaaggacttgaatgggtcgccacaatcagccaggccggcagcgagaaggactacgtggactctgtgaagggcagattcaccatcagccgggacaacgccaagaagtccctgtacctccagatgaacagcctgagagccgaggacaccgccgtgtactattgtgcctctggcgtgtacagcttcgactacagaggccagggcaccctggtcacagtctcttctggtaccggcggaggcggatctggcggcggaggtagcggtggcggaggatctgaattcgacgtggtcatgacacagagccctctgagcctgcctgtgacacttggacagcctgccagcatcagctgtagaagcagccagagcctgctgcacagcagcggcaatacctacctggaatggtatcagcagaggcccggacagagccccagacctctgatctacaagatcagcacccggttcagcggcgtgcccgatagattttctggctctggcagcggcaccgacttcaccctgaagattagcagagtggaagccgaggacgtgggcgtgtactactgcttccaaggcagccacgtgccatacacctttggcggcggaacaaaggtggaaatcaagagactcgagggacagcctaaggccaatcctaccgtgacactgttccctccaagcagcgaagaactccaggccaacaaggccacacttgtgtgcctgatctccgacttctaccctggggctgtgacagtggcttggaaggccgatggatctcctgtgaaagccggcgtggaaaccaccaagccatccaagcagagcaacaacaaatacgccgccagctcctacctgagcctgacacctgagcagtggaagtcccacagatcctacagctgccaagtgacccacgaaggcagcaccgtggaaaagacagtggcccctacagagtgcagcggcagagccgattgcggctttaccagcgagagctaccagcagggcgtgctgagcgccaccatcctgtacgagatcctgctgggcaaggccaccctgtacgccgtgctggtgtctgccctggtgctgatggctatggtcaagcggaaggacagccggggacgcgccaagagaagcggatctggcgtgaagcagaccctgaatttcgacctgctgaagctggctggcgacgtggaatccaacccaggccctactagtatggactggatttggcgcatccttttccttgtcggcgctgctaccggcgcgcattccttcgaacaagttcagctggttcagagcggagccgaagtgaagaaacctggggcctctgtgaaggtgtcctgcaaagcctctggcctgaccatcgaggactactacatgcactgggtccgacaggcccctggacaaggacttgaatggatgggctggatcgaccccgagaacggcgatacagagtacggccctaagttccagggcagagtgaccatgaccagagacaccagcatcaacaccgcctacatggaactgagccggctgagatccgatgacaccgccgtgtactattgcgccgtgcacaatgcccactacggcacttggtttgcctattggggccagggcacactggtcaccgttagctctacgcgtgcctctacaaagggaccctccgtgtttcctctggctcccagcagcaagtctacaagcggaggaacagccgctctgggctgcctggtcaaggattactttcccgagcctgtgaccgtgtcctggaatagcggagcactgacaagcggcgtgcacacctttccagccgtgctgcaaagcagcggcctgtactctctgagcagcgtggtcacagtgcctagctctagcctgggcacccagacctacatctgcaatgtgaaccacaagcctagcaacaccaaggtggacaagagagtggaacccaagagctgtatccccgaggacacattcttcccaagccccgagagcagctgcgacgtgaagctggtggaaaagagcttcgagacagacaccaacctgaacttccagaacctgagcgtgatcggcttcagaatcctgctgctgaaagtggccggctttaacctgctgatgaccctgcggctgtggtccagc

SEQ ID NO: 3323 - DNA, 2280 bp, Artificial Sequence
  Synthetic Polynucloetide
atggccttaccagtgaccgccttgctcctgccgctggccttgctgctccacgccgccaggccggaagtgcagctggttgaatctggcggaggactggttcagcctggcggatctctgagactgtcttgtgccgccagcggcttcagcttcagcgacttttggatgagctgggtccgacaggcccctggcaaaggacttgaatgggtcgccacaatcagccaggccggcagcgagaaggactacgtggactctgtgaagggcagattcaccatcagccgggacaacgccaagaagtccctgtacctccagatgaacagcctgagagccgaggacaccgccgtgtactattgtgcctctggcgtgtacagcttcgactacagaggccagggcaccctggtcacagtctcttctggtaccggcggaggcggatctggcggcggaggtagcggtggcggaggatctgaattcgacatccagatgacacagagccctagcagcctgtctgccagcgtgggagacagagtgaccatcacctgtagagccagcgagaacatctacagcaacctggcctggtatcagcagaagcctggcaaggcccctaagctgctgatctacgccgccaccaatctggctgatggcgtgccaagcagattttccggctctggcagcggcaccgatttcaccctgacaatatccagcctccagcctgaggacttcgccacctactactgccagcacttttggggcacccctacattcggccagggcaccaaggtggaaatcaagagaacagttctcgagggacagcctaaggccaatcctaccgtgacactgttccctccaagcagcgaagaactccaggccaacaaggccacacttgtgtgcctgatctccgacttctaccctggggctgtgacagtggcttggaaggccgatggatctcctgtgaaagccggcgtggaaaccaccaagccatccaagcagagcaacaacaaatacgccgccagctcctacctgagcctgacacctgagcagtggaagtcccacagatcctacagctgccaagtgacccacgaaggcagcaccgtggaaaagacagtggcccctacagagtgcagcggcagagccgattgcggctttaccagcgagagctaccagcagggcgtgctgagcgccaccatcctgtacgagatcctgctgggcaaggccaccctgtacgccgtgctggtgtctgccctggtgctgatggctatggtcaagcggaaggacagccggggacgcgccaagagaagcggatctggcgtgaagcagaccctgaatttcgacctgctgaagctggctggcgacgtggaatccaacccaggccctactagtatggactggatttggcgcatccttttccttgtcggcgctgctaccggcgcgcattccttcgaagaagtgcagctggttgaatcaggtggcggcctggttcaacctggcggatctctgagactgagctgtgccgcctctggcttcagcctgacaaattacggcgtgcactgggtccgacaggcccctggaaaaggactggaatgggtgtccgtgatttggagcggcggcagcaccgattacaacgccgccttcatcagccggttcaccatcagcgccgacaccagcaagaataccgcctacctccagatgaactccctgagagccgaggacaccgccgtgtactattgcgccagagaactgatccacgctatggacaactggggccagggaaccctggtcacagtctcttctacgcgtgcctctacaaagggaccctccgtgtttcctctggctcccagcagcaagtctacaagcggaggaacagccgctctgggctgcctggtcaaggattactttcccgagcctgtgaccgtgtcctggaatagcggagcactgacaagcggcgtgcacacctttccagccgtgctgcaaagcagcggcctgtactctctgagcagcgtggtcacagtgcctagctctagcctgggcacccagacctacatctgcaatgtgaaccacaagcctagcaacaccaaggtggacaagagagtggaacccaagagctgtatccccgaggacacattcttcccaagccccgagagcagctgcgacgtgaagctggtggaaaagagcttcgagacagacaccaacctgaacttccagaacctgagcgtgatcggcttcagaatcctgctgctgaaagtggccggctttaacctgctgatgaccctgcggctgtggtccagc

SEQ ID NO: 3324 - DNA, 2301 bp, Artificial Sequence
  Synthetic Polynucloetide
atggccttaccagtgaccgccttgctcctgccgctggccttgctgctccacgccgccaggccggaagtgcagctggttgaatctggcggaggactggttcagcctggcggatctctgagactgtcttgtgccgccagcggcttcagcttcagcgacttttggatgagctgggtccgacaggcccctggcaaaggacttgaatgggtcgccacaatcagccaggccggcagcgagaaggactacgtggactctgtgaagggcagattcaccatcagccgggacaacgccaagaagtccctgtacctccagatgaacagcctgagagccgaggacaccgccgtgtactattgtgcctctggcgtgtacagcttcgactacagaggccagggcaccctggtcacagtctcttctggtaccggcggaggcggatctggcggcggaggtagcggtggcggaggatctgaattcgacttcgtgatgacacagagccctctgagcctgcctgtgacacctggcgaacctgccagcatcagctgtagaagcagccagagcatcgtgcacagcaacggcaacacctacctggaatggtatctccagaagcctggacagagcccacagctgctgatctacaaggtgtccaacagattcagcggcgtgcccgacagattttctggcagcggctctggcaccgacttcaccctgaagattagcagagtggaagccgaggacgtgggcgtgtactactgcttccaaggctctcacgtgcccctgacctttggacagggcaccaagctggaaatcaagagactcgagggacagcctaaggccaatcctaccgtgacactgttccctccaagcagcgaagaactccaggccaacaaggccacacttgtgtgcctgatctccgacttctaccctggggctgtgacagtggcttggaaggccgatggatctcctgtgaaagccggcgtggaaaccaccaagccatccaagcagagcaacaacaaatacgccgccagctcctacctgagcctgacacctgagcagtggaagtcccacagatcctacagctgccaagtgacccacgaaggcagcaccgtggaaaagacagtggcccctacagagtgcagcggcagagccgattgcggctttaccagcgagagctaccagcagggcgtgctgagcgccaccatcctgtacgagatcctgctgggcaaggccaccctgtacgccgtgctggtgtctgccctggtgctgatggctatggtcaagcggaaggacagccggggacgcgccaagagaagcggatctggcgtgaagcagaccctgaatttcgacctgctgaagctggctggcgacgtggaatccaacccaggccctactagtatggactggatttggcgcatccttttccttgtcggcgctgctaccggcgcgcattccttcgaagaagtgcagctggttgaaagcggagccgaagtgaagaaacctggggcctctgtgaaggtgtcctgcaaggccagcggctacacctttaccagctactggattcactgggtccgacaggcccctggacaaggacttgagtggatgggcgagaacgacccctccaacggcaggaccaactacaacgagaagttcaagaaccgcgtgaccctgaccgtggacaccagcatctctaccgcctacatggaactgagccggctgagatccgatgacaccgccgtgtactattgcgccagaggacccaactacttttacagcatggactactggggccagggcacaatggtcaccgttagctctacgcgtgcctctacaaagggaccctccgtgtttcctctggctcccagcagcaagtctacaagcggaggaacagccgctctgggctgcctggtcaaggattactttcccgagcctgtgaccgtgtcctggaatagcggagcactgacaagcggcgtgcacacctttccagccgtgctgcaaagcagcggcctgtactctctgagcagcgtggtcacagtgcctagctctagcctgggcacccagacctacatctgcaatgtgaaccacaagcctagcaacaccaaggtggacaagagagtggaacccaagagctgtatccccgaggacacattcttcccaagccccgagagcagctgcgacgtgaagctggtggaaaagagcttcgagacagacaccaacctgaacttccagaacctgagcgtgatcggcttcagaatcctgctgctgaaagtggccggctttaacctgctgatgaccctgcggctgtggtccagc

SEQ ID NO: 3325 - DNA, 2280 bp, Artificial Sequence
  Synthetic Polynucloetide
atggccttaccagtgaccgccttgctcctgccgctggccttgctgctccacgccgccaggccggaagtgcagctggttgaatctggcggaggactggttcagcctggcggatctctgagactgtcttgtgccgccagcggcttcagcttcagcgacttttggatgagctgggtccgacaggcccctggcaaaggacttgaatgggtcgccacaatcagccaggccggcagcgagaaggactacgtggactctgtgaagggcagattcaccatcagccgggacaacgccaagaagtccctgtacctccagatgaacagcctgagagccgaggacaccgccgtgtactattgtgcctctggcgtgtacagcttcgactacagaggccagggcaccctggtcacagtctcttctggtaccggcggaggcggatctggcggcggaggtagcggtggcggaggatctgaattcgacatccagctgactcagagccctagctttctgagcgccagcgtgggcgacagagtgaccatcacatgtagcgccagatccagcatcagcttcatgtactggtatcagcagaagcccggcaaggcccctaagctgctgatctacgacaccagcaatctggcctctggcgtgcccagcagattttctggaagcggcagcggcaccgagttcaccctgacaatctctagcctggaagccgaggatgccgccacctactattgccagcagtggtccagctatcccctgacatttggacagggcaccaagctggaaatcaaactcgagggacagcctaaggccaatcctaccgtgacactgttccctccaagcagcgaagaactccaggccaacaaggccacacttgtgtgcctgatctccgacttctaccctggggctgtgacagtggcttggaaggccgatggatctcctgtgaaagccggcgtggaaaccaccaagccatccaagcagagcaacaacaaatacgccgccagctcctacctgagcctgacacctgagcagtggaagtcccacagatcctacagctgccaagtgacccacgaaggcagcaccgtggaaaagacagtggcccctacagagtgcagcggcagagccgattgcggctttaccagcgagagctaccagcagggcgtgctgagcgccaccatcctgtacgagatcctgctgggcaaggccaccctgtacgccgtgctggtgtctgccctggtgctgatggctatggtcaagcggaaggacagccggggacgcgccaagagaagcggatctggcgtgaagcagaccctgaatttcgacctgctgaagctggctggcgacgtggaatccaacccaggccctactagtatggactggatttggcgcatccttttccttgtcggcgctgctaccggcgcgcattccttcgaacaggttcagctggttcagtctggggccgaagtgaagaaacctggggcctctgtgaaggtgtcctgcaaggcttccggctacacctttaccggctcttggatgaactgggtccgacaggctcctggacagggactcgaatggatcggcagaatctatcctggcgacggcgagacaaactacaacggcaagttcaaggaccgcgtgacaatcaccgccgacaagagcacaagcaccgcctacatggaactgagcagcctgcggagcgaagataccgccgtgtactactgcgcccggatctacggcaacaacgtgtacttcgatgtgtggggccagggcacaaccgtgacagtctcttctacgcgtgcctctacaaagggaccctccgtgtttcctctggctcccagcagcaagtctacaagcggaggaacagccgctctgggctgcctggtcaaggattactttcccgagcctgtgaccgtgtcctggaatagcggagcactgacaagcggcgtgcacacctttccagccgtgctgcaaagcagcggcctgtactctctgagcagcgtggtcacagtgcctagctctagcctgggcacccagacctacatctgcaatgtgaaccacaagcctagcaacaccaaggtggacaagagagtggaacccaagagctgtatccccgaggacacattcttcccaagccccgagagcagctgcgacgtgaagctggtggaaaagagcttcgagacagacaccaacctgaacttccagaacctgagcgtgatcggcttcagaatcctgctgctgaaagtggccggctttaacctgctgatgaccctgcggctgtggtccagc

SEQ ID NO: 3326 - DNA, 2304 bp, Artificial Sequence
  Synthetic Polynucloetide
atggccttaccagtgaccgccttgctcctgccgctggccttgctgctccacgccgccaggccggaagtgcagctggttgaatctggcggaggactggttcagcctggcggatctctgagactgtcttgtgccgccagcggcttcagcttcagcgacttttggatgagctgggtccgacaggcccctggcaaaggacttgaatgggtcgccacaatcagccaggccggcagcgagaaggactacgtggactctgtgaagggcagattcaccatcagccgggacaacgccaagaagtccctgtacctccagatgaacagcctgagagccgaggacaccgccgtgtactattgtgcctctggcgtgtacagcttcgactacagaggccagggcaccctggtcacagtctcttctggtaccggcggaggcggatctggcggcggaggtagcggtggcggaggatctgaattccagctggtgctgacacagtctccaagcgcctctgccagcctgggatctagcgtgaagctgacctgtacactgagcagcggccacaagaccgacaccatcgactggtatcagcagcagcctggcaaggcccctagatacctgatgaagctggaaggcagcggcagctacaacaaaggctctggcgtgcccgatagattcagcggcagttcttctggcgctgattggtatctgaccatcagcagcctccagagcgaggacgaggccgattactactgcggcacagactaccccggcaactacctgtttggcggcggaacacagctgacagtgcttggcctcgagggacagcctaaggccaatcctaccgtgacactgttccctccaagcagcgaagaactccaggccaacaaggccacacttgtgtgcctgatctccgacttctaccctggggctgtgacagtggcttggaaggccgatggatctcctgtgaaagccggcgtggaaaccaccaagccatccaagcagagcaacaacaaatacgccgccagctcctacctgagcctgacacctgagcagtggaagtcccacagatcctacagctgccaagtgacccacgaaggcagcaccgtggaaaagacagtggcccctacagagtgcagcggcagagccgattgcggctttaccagcgagagctaccagcagggcgtgctgagcgccaccatcctgtacgagatcctgctgggcaaggccaccctgtacgccgtgctggtgtctgccctggtgctgatggctatggtcaagcggaaggacagccggggacgcgccaagagaagcggatctggcgtgaagcagaccctgaatttcgacctgctgaagctggctggcgacgtggaatccaacccaggccctactagtatggactggatttggcgcatccttttccttgtcggcgctgctaccggcgcgcattccttcgaacaagaacagctggttgaaagcggcggaggactggttcaacctggcggttctctgagactgagctgtgccgccagcggcttcaccttcagcgactactacatgagctggatcagacaggccccaggcaaaggactggaatgggtcgccacaatctaccccagcagcggcaagacctactacgccgattctgccaagggcagactgaccatctccagcgacaacgccaaggacagcctgtacctccagatgaacagcctgagagccgaggacaccgccgtgtactactgcaccagagatagctacgccgacgacgccgctctgtttgacatttggggccagggcaccaccgtgaccgtttcttctacgcgtgcctctacaaagggaccctccgtgtttcctctggctcccagcagcaagtctacaagcggaggaacagccgctctgggctgcctggtcaaggattactttcccgagcctgtgaccgtgtcctggaatagcggagcactgacaagcggcgtgcacacctttccagccgtgctgcaaagcagcggcctgtactctctgagcagcgtggtcacagtgcctagctctagcctgggcacccagacctacatctgcaatgtgaaccacaagcctagcaacaccaaggtggacaagagagtggaacccaagagctgtatccccgaggacacattcttcccaagccccgagagcagctgcgacgtgaagctggtggaaaagagcttcgagacagacaccaacctgaacttccagaacctgagcgtgatcggcttcagaatcctgctgctgaaagtggccggctttaacctgctgatgaccctgcggctgtggtccagc

SEQ ID NO: 3327 - DNA, 2294 bp, Artificial Sequence
  Synthetic Polynucloetide
atggccttaccagtgaccgccttgctcctgccgctggccttgctgctccacgccgccaggccggaagtgcagctggttgaatctggcggaggactggttcagcctggcggatctctgagactgtcttgtgccgccagcggcttcagcttcagcgacttttggatgagctgggtccgacaggcccctggcaaaggacttgaatgggtcgccacaatcagccaggccggcagcgagaaggactacgtggactctgtgaagggcagattcaccatcagccgggacaacgccaagaagtccctgtacctccagatgaacagcctgagagccgaggacaccgccgtgtactattgtgcctctggcgtgtacagcttcgactacagaggccagggcaccctggtcacagtctcttctggtaccggcggaggcggatctggcggcggaggtagcggtggcggaggatctgaattcgagattgtgttgacacagtctcccgataccctgtcactgtcacccggcgagaaggcaacgctgagttgcagagcaagccagtcagtctcctcttcttttctggcctggtatcagcaaaaaccaggtcaggcaccatctctcctgatttacgttgccagcagacgggcggctggcattcccgacaggttctctggaagcggatctgggaccgattttaccctgacaattagccgcttggagcccgaagactttggtatgttttactgccagcactacggaaggacacctttcacatttggcccgggcacgaaagtcgatataaaacgcgcctcgagggacagcctaaggccaatcctaccgtgacactgttccctccaagcagcgaagaactccaggccaacaaggccacacttgtgtgcctgatctccgacttctaccctggggctgtgacagtggcttggaaggccgatggatctcctgtgaaagccggcgtggaaaccaccaagccatccaagcagagcaacaacaaatacgccgccagctcctacctgagcctgacacctgagcagtggaagtcccacagatcctacagctgccaagtgacccacgaaggcagcaccgtggaaaagacagtggcccctacagagtgcagcggcagagccgattgcggctttaccagcgagagctaccagcagggcgtgctgagcgccaccatcctgtacgagatcctgctgggcaaggccaccctgtacgccgtgctggtgtctgccctggtgctgatggctatggtcaagcggaaggacagccggggacgcgccaagagaagcggatctggcgtgaagcagaccctgaatttcgacctgctgaagctggctggcgacgtggaatccaacccaggccctactagtatggactggatttggcgcatccttttccttgtcggcgctgctaccggcgcgcattccttcgaacagatccagttggtggaatcagggggcggtgtggtgcagccgggtaggagcctgagactgtcatgcgtggcgtctggcttcacattcaagaactacggcatgcactgggtgcgacaggcccccggaaagggtttggagtgggtcgccgtgatctggtacgacggatctaatgagtattacggagatcctgtgaagggaaggttcaccatctcccgcgacaatagcaaaaatatgctctacctgcaaatgaactcactcagggcggatgatacggcggtctactattgcgctcgctcagggattgctgtggccggcgcattcgattactggggacagggtaccctggtgacagtatcaagcacgcgtgcctctacaaagggaccctccgtgtttcctctggctcccagcagcaagtctacaagcggaggaacagccgctctgggctgcctggtcaaggattactttcccgagcctgtgaccgtgtcctggaatagcggagcactgacaagcggcgtgcacacctttccagccgtgctgcaaagcagcggcctgtactctctgagcagcgtggtcacagtgcctagctctagcctgggcacccagacctacatctgcaatgtgaaccacaagcctagcaacaccaaggtggacaagagagtggaacccaagagctgtatccccgaggacacattcttcccaagccccgagagcagctgcgacgtgaagctggtggaaaagagcttcgagacagacaccaacctgaacttccagaacctgagcgtgatcggcttcagaatcctgctgctgaaagtggccggctttaacctgctgatgaccctgcggctgtggtccagc

SEQ ID NO: 3328 - DNA, 2310 bp, Artificial Sequence
  Synthetic Polynucloetide
atggccttaccagtgaccgccttgctcctgccgctggccttgctgctccacgccgccaggccggaagtgcagctggttgaatctggcggaggactggttcagcctggcggatctctgagactgtcttgtgccgccagcggcttcagcttcagcgacttttggatgagctgggtccgacaggcccctggcaaaggacttgaatgggtcgccacaatcagccaggccggcagcgagaaggactacgtggactctgtgaagggcagattcaccatcagccgggacaacgccaagaagtccctgtacctccagatgaacagcctgagagccgaggacaccgccgtgtactattgtgcctctggcgtgtacagcttcgactacagaggccagggcaccctggtcacagtctcttctggtaccggcggaggcggatctggcggcggaggtagcggtggcggaggatctgaattcgacattcagatgacccaaagcccgtccagcctgtccgccagcctgggagatagagtgacaatcacgtgtagagcttcccaagggataagaaatgatctcgggtggtatcagcagaagcccggcaaagcccccaaaaggcttatatatgctagtagtacactgcagtctggagttccttcccgattttcaggtagcggctccggtacagagttcaccctcacgataagctcactccagcctgaggatttcgcaacgtactactgcctccagcacaacaattttccctggactttcggccagggcaccaaggtggagatcaagaggctcgagggacagcctaaggccaatcctaccgtgacactgttccctccaagcagcgaagaactccaggccaacaaggccacacttgtgtgcctgatctccgacttctaccctggggctgtgacagtggcttggaaggccgatggatctcctgtgaaagccggcgtggaaaccaccaagccatccaagcagagcaacaacaaatacgccgccagctcctacctgagcctgacacctgagcagtggaagtcccacagatcctacagctgccaagtgacccacgaaggcagcaccgtggaaaagacagtggcccctacagagtgcagcggcagagccgattgcggctttaccagcgagagctaccagcagggcgtgctgagcgccaccatcctgtacgagatcctgctgggcaaggccaccctgtacgccgtgctggtgtctgccctggtgctgatggctatggtcaagcggaaggacagccggggacgcgccaagagaagcggatctggcgtgaagcagaccctgaatttcgacctgctgaagctggctggcgacgtggaatccaacccaggccctactagtatggactggatttggcgcatccttttccttgtcggcgctgctaccggcgcgcattccttcgaacaagttactttgaaggagtctggacctgtactggtgaagccaaccgagacactgacactcacgtgtacagtgagtggtttttccttgatcaacgcaaggatgggcgtcagctggatcaggcaaccccctggcaaggctctggaatggctcgctcacatattcagcaatgccgaaaaaagctaccggacaagcctgaaatcccgcctgactatttccaaggacacttctaagtctcaggtggtgctgaccatgaccaacatggacccggtggacaccgccacctattactgcgcaagaatccctgggtatggtgggaatggtgactaccattattatgggatggatgtgtgggggcaaggcacaaccgtaacggtctcaagcacgcgtgcctctacaaagggaccctccgtgtttcctctggctcccagcagcaagtctacaagcggaggaacagccgctctgggctgcctggtcaaggattactttcccgagcctgtgaccgtgtcctggaatagcggagcactgacaagcggcgtgcacacctttccagccgtgctgcaaagcagcggcctgtactctctgagcagcgtggtcacagtgcctagctctagcctgggcacccagacctacatctgcaatgtgaaccacaagcctagcaacaccaaggtggacaagagagtggaacccaagagctgtatccccgaggacacattcttcccaagccccgagagcagctgcgacgtgaagctggtggaaaagagcttcgagacagacaccaacctgaacttccagaacctgagcgtgatcggcttcagaatcctgctgctgaaagtggccggctttaacctgctgatgaccctgcggctgtggtccagc

SEQ ID NO: 3329 - DNA, 2289 bp, Artificial Sequence
  Synthetic Polynucloetide
atggccttaccagtgaccgccttgctcctgccgctggccttgctgctccacgccgccaggccggaagtgcagctggttgaatctggcggaggactggttcagcctggcggatctctgagactgtcttgtgccgccagcggcttcagcttcagcgacttttggatgagctgggtccgacaggcccctggcaaaggacttgaatgggtcgccacaatcagccaggccggcagcgagaaggactacgtggactctgtgaagggcagattcaccatcagccgggacaacgccaagaagtccctgtacctccagatgaacagcctgagagccgaggacaccgccgtgtactattgtgcctctggcgtgtacagcttcgactacagaggccagggcaccctggtcacagtctcttctggtaccggcggaggcggatctggcggcggaggtagcggtggcggaggatctgaattcgacatcgtgctgacacagagccctccaagcctggctatgagcctgggaaagagagccaccatcagctgtagagccagcgagagcgtgacaatcctgggctctcacctgatccactggtatcagcagaagcccggccagcctcctacactgctgattcagctggcctccaatgtgcagacaggcgtgccagccagattttctggcagcggcagcagaaccgacttcaccctgaccattgatcccgtggaagaggacgacgtggccgtgtactactgcctccagagcagaacaatccccagaacctttggcggaggcaccaagctggaaatcaaactcgagggacagcctaaggccaatcctaccgtgacactgttccctccaagcagcgaagaactccaggccaacaaggccacacttgtgtgcctgatctccgacttctaccctggggctgtgacagtggcttggaaggccgatggatctcctgtgaaagccggcgtggaaaccaccaagccatccaagcagagcaacaacaaatacgccgccagctcctacctgagcctgacacctgagcagtggaagtcccacagatcctacagctgccaagtgacccacgaaggcagcaccgtggaaaagacagtggcccctacagagtgcagcggcagagccgattgcggctttaccagcgagagctaccagcagggcgtgctgagcgccaccatcctgtacgagatcctgctgggcaaggccaccctgtacgccgtgctggtgtctgccctggtgctgatggctatggtcaagcggaaggacagccggggacgcgccaagagaagcggatctggcgtgaagcagaccctgaatttcgacctgctgaagctggctggcgacgtggaatccaacccaggccctactagtatggactggatttggcgcatccttttccttgtcggcgctgctaccggcgcgcattccttcgaacaaatccagctggtgcagtctggccccgagctgaagaaacctggcgagacagtgaagatcagctgcaaggccagcggctacaccttcaccgactacagcatcaactgggtcaagagagcccctggcaagggcctgaaatggatgggctggatcaacaccgaaaccagagagcccgcctacgcctacgacttcagaggcagattcgccttcagcctggaaaccagcgccagcacagcctacctccagatcaacaacctgaagtacgaggacaccgccacctacttttgcgccctggactacagctacgctatggactattggggccagggcaccagcgtgacagtctcttctacgcgtgcctctacaaagggaccctccgtgtttcctctggctcccagcagcaagtctacaagcggaggaacagccgctctgggctgcctggtcaaggattactttcccgagcctgtgaccgtgtcctggaatagcggagcactgacaagcggcgtgcacacctttccagccgtgctgcaaagcagcggcctgtactctctgagcagcgtggtcacagtgcctagctctagcctgggcacccagacctacatctgcaatgtgaaccacaagcctagcaacaccaaggtggacaagagagtggaacccaagagctgtatccccgaggacacattcttcccaagccccgagagcagctgcgacgtgaagctggtggaaaagagcttcgagacagacaccaacctgaacttccagaacctgagcgtgatcggcttcagaatcctgctgctgaaagtggccggctttaacctgctgatgaccctgcggctgtggtccagc

SEQ ID NO: 3330 - DNA, 2295 bp, Artificial Sequence
  Synthetic Polynucloetide
atggccttaccagtgaccgccttgctcctgccgctggccttgctgctccacgccgccaggccggaagtgcagctggttgaatctggcggaggactggttcagcctggcggatctctgagactgtcttgtgccgccagcggcttcagcttcagcgacttttggatgagctgggtccgacaggcccctggcaaaggacttgaatgggtcgccacaatcagccaggccggcagcgagaaggactacgtggactctgtgaagggcagattcaccatcagccgggacaacgccaagaagtccctgtacctccagatgaacagcctgagagccgaggacaccgccgtgtactattgtgcctctggcgtgtacagcttcgactacagaggccagggcaccctggtcacagtctcttctggtaccggcggaggcggatctggcggcggaggtagcggtggcggaggatctgaattcgatattcaactgacacaatcccccagctcactcagcgccagcgtgggggacagggttagctttacctgtcaagcctctcaggatataaataactttctgaactggtatcaacagaagcctgggaaggcgcccaaactcctgatctatgatgcgtccaacctggaaactggcgtgccttcacgctttagcggctctggcagtggtacagacttcacttttaccatctcttcacttcagccggaggacatcgccacatattactgtcaacagtacggaaacttgccctttacttttggaggcggcaccaaagttgaaatcaaaagactcgagggacagcctaaggccaatcctaccgtgacactgttccctccaagcagcgaagaactccaggccaacaaggccacacttgtgtgcctgatctccgacttctaccctggggctgtgacagtggcttggaaggccgatggatctcctgtgaaagccggcgtggaaaccaccaagccatccaagcagagcaacaacaaatacgccgccagctcctacctgagcctgacacctgagcagtggaagtcccacagatcctacagctgccaagtgacccacgaaggcagcaccgtggaaaagacagtggcccctacagagtgcagcggcagagccgattgcggctttaccagcgagagctaccagcagggcgtgctgagcgccaccatcctgtacgagatcctgctgggcaaggccaccctgtacgccgtgctggtgtctgccctggtgctgatggctatggtcaagcggaaggacagccggggacgcgccaagagaagcggatctggcgtgaagcagaccctgaatttcgacctgctgaagctggctggcgacgtggaatccaacccaggccctactagtatggactggatttggcgcatccttttccttgtcggcgctgctaccggcgcgcattccttcgaacaggtccaactgcaagaaagcggacccggactggtgaagccttctgagacacttagtctgacgtgcacggtcagtggcggctccatctcctcctattattggtcatggatacgacaacccccaggtaagggcctggaatggattggctatatctactattcaggaagcacgaactacaatcccagcctgaagtcccgagtgacaatttcagtagataccagtaaaaaccagttcagtcttaaactgtcaagcgtgacagctgccgacaccgctgtgtattactgcgtctcactggtgtattgtggaggggattgttatagcgggttcgattattggggacagggaaccctggtgactgtatcttccacgcgtgcctctacaaagggaccctccgtgtttcctctggctcccagcagcaagtctacaagcggaggaacagccgctctgggctgcctggtcaaggattactttcccgagcctgtgaccgtgtcctggaatagcggagcactgacaagcggcgtgcacacctttccagccgtgctgcaaagcagcggcctgtactctctgagcagcgtggtcacagtgcctagctctagcctgggcacccagacctacatctgcaatgtgaaccacaagcctagcaacaccaaggtggacaagagagtggaacccaagagctgtatccccgaggacacattcttcccaagccccgagagcagctgcgacgtgaagctggtggaaaagagcttcgagacagacaccaacctgaacttccagaacctgagcgtgatcggcttcagaatcctgctgctgaaagtggccggctttaacctgctgatgaccctgcggctgtggtccagc

SEQ ID NO: 3331 - DNA, 2301 bp, Artificial Sequence
  Synthetic Polynucloetide
atggccttaccagtgaccgccttgctcctgccgctggccttgctgctccacgccgccaggccggaagtgcagctggttgaatctggcggaggactggttcagcctggcggatctctgagactgtcttgtgccgccagcggcttcagcttcagcgacttttggatgagctgggtccgacaggcccctggcaaaggacttgaatgggtcgccacaatcagccaggccggcagcgagaaggactacgtggactctgtgaagggcagattcaccatcagccgggacaacgccaagaagtccctgtacctccagatgaacagcctgagagccgaggacaccgccgtgtactattgtgcctctggcgtgtacagcttcgactacagaggccagggcaccctggtcacagtctcttctggtaccggcggaggcggatctggcggcggaggtagcggtggcggaggatctgaattcgatatccagctcactcaaagcccctctagtctctctgcctcagtgggggatcgggtcagttttacttgtcaagcttcacaggatatcaacaacttccttaattggtatcagcagaagccaggaaaagcacccaagctgctcatctatgatgcctcaaatttggagacgggtgttcccagtcgattctctgggtcagggtccgggaccgactttacgtttacgatctcctctctgcagcccgaagacatcgccacatactattgtcaacagtacggcaacttgcctttcacatttgggggcgggactaaggttgaaatcaagaggctcgagggacagcctaaggccaatcctaccgtgacactgttccctccaagcagcgaagaactccaggccaacaaggccacacttgtgtgcctgatctccgacttctaccctggggctgtgacagtggcttggaaggccgatggatctcctgtgaaagccggcgtggaaaccaccaagccatccaagcagagcaacaacaaatacgccgccagctcctacctgagcctgacacctgagcagtggaagtcccacagatcctacagctgccaagtgacccacgaaggcagcaccgtggaaaagacagtggcccctacagagtgcagcggcagagccgattgcggctttaccagcgagagctaccagcagggcgtgctgagcgccaccatcctgtacgagatcctgctgggcaaggccaccctgtacgccgtgctggtgtctgccctggtgctgatggctatggtcaagcggaaggacagccggggacgcgccaagagaagcggatctggcgtgaagcagaccctgaatttcgacctgctgaagctggctggcgacgtggaatccaacccaggccctactagtatggactggatttggcgcatccttttccttgtcggcgctgctaccggcgcgcattccttcgaacaggtacagctgcaggaatctgggcccggacttgtcaagccaagtcagacactttctcttacatgtaccgtgagcggcggaagtataagcagtggaggcttttactggtcttggatacggcagcacccaggcaaaggcttggagtggattggatacattcatcattcaggatctacacactataatccatcccttaagtcccgggtcaccattagcattgatacgtctaagaatctgttcagtctcaggctgtcctccgtcactgctgccgacacagccgtgtactactgcgcctccttggtttactgcggaggcgactgttatagcggctttgattattgggggcaggggaccctcgtaaccgtgagctctacgcgtgcctctacaaagggaccctccgtgtttcctctggctcccagcagcaagtctacaagcggaggaacagccgctctgggctgcctggtcaaggattactttcccgagcctgtgaccgtgtcctggaatagcggagcactgacaagcggcgtgcacacctttccagccgtgctgcaaagcagcggcctgtactctctgagcagcgtggtcacagtgcctagctctagcctgggcacccagacctacatctgcaatgtgaaccacaagcctagcaacaccaaggtggacaagagagtggaacccaagagctgtatccccgaggacacattcttcccaagccccgagagcagctgcgacgtgaagctggtggaaaagagcttcgagacagacaccaacctgaacttccagaacctgagcgtgatcggcttcagaatcctgctgctgaaagtggccggctttaacctgctgatgaccctgcggctgtggtccagc

SEQ ID NO: 3332 - DNA, 2289 bp, Artificial Sequence
  Synthetic Polynucloetide
atggccttaccagtgaccgccttgctcctgccgctggccttgctgctccacgccgccaggccggaagtgcagctggttgaatctggcggaggactggttcagcctggcggatctctgagactgtcttgtgccgccagcggcttcagcttcagcgacttttggatgagctgggtccgacaggcccctggcaaaggacttgaatgggtcgccacaatcagccaggccggcagcgagaaggactacgtggactctgtgaagggcagattcaccatcagccgggacaacgccaagaagtccctgtacctccagatgaacagcctgagagccgaggacaccgccgtgtactattgtgcctctggcgtgtacagcttcgactacagaggccagggcaccctggtcacagtctcttctggtaccggcggaggcggatctggcggcggaggtagcggtggcggaggatctgaattcgacattcagatgacacagagccctagcagcctgagcgcctctgtgggagacagagtgaccatcacatgcaagagcagccagagcgtgctgtactccagcaatcagaagaactacctggcctggttccagcagaagcctggcaaggctcctaagctgctgatctactgggccagcaccagagaaagcggcgtgccaagcagattttctggcagcggctctggcaccgacttcaccctgacaatatccagcctccagcctgaggacttcgccacctacttttgccaccagtacctgagcagctacacattcggacagggcaccaaggtggaaatcaagcggctcgagggacagcctaaggccaatcctaccgtgacactgttccctccaagcagcgaagaactccaggccaacaaggccacacttgtgtgcctgatctccgacttctaccctggggctgtgacagtggcttggaaggccgatggatctcctgtgaaagccggcgtggaaaccaccaagccatccaagcagagcaacaacaaatacgccgccagctcctacctgagcctgacacctgagcagtggaagtcccacagatcctacagctgccaagtgacccacgaaggcagcaccgtggaaaagacagtggcccctacagagtgcagcggcagagccgattgcggctttaccagcgagagctaccagcagggcgtgctgagcgccaccatcctgtacgagatcctgctgggcaaggccaccctgtacgccgtgctggtgtctgccctggtgctgatggctatggtcaagcggaaggacagccggggacgcgccaagagaagcggatctggcgtgaagcagaccctgaatttcgacctgctgaagctggctggcgacgtggaatccaacccaggccctactagtatggactggatttggcgcatccttttccttgtcggcgctgctaccggcgcgcattccttcgaagaggtgcagctggttgaatctggcggaggactggttcagcctggcggatctctgagactgtcttgtgccgccagcggctacaccttcaccacctattggatgcactgggtccgacaggcccctggcaaaggacttgagtgggtcggatatatcaggcccagcaccggctacacagagtacaaccagaagttcaaggaccgcttcaccatcagcgccgacaccagcaagaataccgcctacctccagatgaacagcctgagagccgaggacaccgccgtgtactactgtgccagatccagatggctgctggactattggggccagggcacactggttacagtttctacgcgtgcctctacaaagggaccctccgtgtttcctctggctcccagcagcaagtctacaagcggaggaacagccgctctgggctgcctggtcaaggattactttcccgagcctgtgaccgtgtcctggaatagcggagcactgacaagcggcgtgcacacctttccagccgtgctgcaaagcagcggcctgtactctctgagcagcgtggtcacagtgcctagctctagcctgggcacccagacctacatctgcaatgtgaaccacaagcctagcaacaccaaggtggacaagagagtggaacccaagagctgtatccccgaggacacattcttcccaagccccgagagcagctgcgacgtgaagctggtggaaaagagcttcgagacagacaccaacctgaacttccagaacctgagcgtgatcggcttcagaatcctgctgctgaaagtggccggctttaacctgctgatgaccctgcggctgtggtccagc

SEQ ID NO: 3333 - DNA, 2280 bp, Artificial Sequence
  Synthetic Polynucloetide
atggccttaccagtgaccgccttgctcctgccgctggccttgctgctccacgccgccaggccggaagtgcagctggttgaatctggcggaggactggttcagcctggcggatctctgagactgtcttgtgccgccagcggcttcagcttcagcgacttttggatgagctgggtccgacaggcccctggcaaaggacttgaatgggtcgccacaatcagccaggccggcagcgagaaggactacgtggactctgtgaagggcagattcaccatcagccgggacaacgccaagaagtccctgtacctccagatgaacagcctgagagccgaggacaccgccgtgtactattgtgcctctggcgtgtacagcttcgactacagaggccagggcaccctggtcacagtctcttctggtaccggcggaggcggatctggcggcggaggtagcggtggcggaggatctgaattcgacatccagatgacacagagccctagcagcctgtctgccagcgtgggagacagagtgaccatcacctgtagagccagccaggacatcagcaactacctgaactggtatcagcagaagcccggcaaggcccctaagctgctgatctactacaccagcagactgcacagcggcgtgcccagcagattttctggctctggcagcggcaccgacttcaccctgacaatatctagcctccagcctgaggacttcgccacctactattgccagcagggcaacaccctgccttacacatttggacagggcaccaaggtggaaatcaagagactcgagggacagcctaaggccaatcctaccgtgacactgttccctccaagcagcgaagaactccaggccaacaaggccacacttgtgtgcctgatctccgacttctaccctggggctgtgacagtggcttggaaggccgatggatctcctgtgaaagccggcgtggaaaccaccaagccatccaagcagagcaacaacaaatacgccgccagctcctacctgagcctgacacctgagcagtggaagtcccacagatcctacagctgccaagtgacccacgaaggcagcaccgtggaaaagacagtggcccctacagagtgcagcggcagagccgattgcggctttaccagcgagagctaccagcagggcgtgctgagcgccaccatcctgtacgagatcctgctgggcaaggccaccctgtacgccgtgctggtgtctgccctggtgctgatggctatggtcaagcggaaggacagccggggacgcgccaagagaagcggatctggcgtgaagcagaccctgaatttcgacctgctgaagctggctggcgacgtggaatccaacccaggccctactagtatggactggatttggcgcatccttttccttgtcggcgctgctaccggcgcgcattccttcgaagaagtgcagctggttgaatcaggtggcggcctggttcaacctggcggatctctgagactgagctgtgccgccagcggcttcaccttcagcgactactttatgagctgggtccgacaggcccctggcaaaggacttgaatgggtcgccaccatcagcaatggcggcacctacacttactaccccgacagcgtgaagggcagattcaccatctccagagacaacagcaagaacaccctgtacctccagatgaactccctgagagccgaggacaccgccgtgtactactgcgccagattcgacggctacatcttcgactattggggccagggcaccctggtcacagtctcttctacgcgtgcctctacaaagggaccctccgtgtttcctctggctcccagcagcaagtctacaagcggaggaacagccgctctgggctgcctggtcaaggattactttcccgagcctgtgaccgtgtcctggaatagcggagcactgacaagcggcgtgcacacctttccagccgtgctgcaaagcagcggcctgtactctctgagcagcgtggtcacagtgcctagctctagcctgggcacccagacctacatctgcaatgtgaaccacaagcctagcaacaccaaggtggacaagagagtggaacccaagagctgtatccccgaggacacattcttcccaagccccgagagcagctgcgacgtgaagctggtggaaaagagcttcgagacagacaccaacctgaacttccagaacctgagcgtgatcggcttcagaatcctgctgctgaaagtggccggctttaacctgctgatgaccctgcggctgtggtccagc

SEQ ID NO: 3334 - DNA, 2694 bp, Artificial Sequence
  Synthetic Polynucloetide
atggccttaccagtgaccgccttgctcctgccgctggccttgctgctccacgccgccaggccggaagtgcagctggttgaatctggcggaggactggttcagcctggcggatctctgagactgtcttgtgccgccagcggcttcagcttcagcgacttttggatgagctgggtccgacaggcccctggcaaaggacttgaatgggtcgccacaatcagccaggccggcagcgagaaggactacgtggactctgtgaagggcagattcaccatcagccgggacaacgccaagaagtccctgtacctccagatgaacagcctgagagccgaggacaccgccgtgtactattgtgcctctggcgtgtacagcttcgactacagaggccagggcaccctggtcacagtctcttctggtaccggcggaggcggatctggcggcggaggtagcggtggcggaggatctgaattcgacatccagatgacacagactacatcctccctgtctgcctctctgggagacagagtcaccatcagttgcagggcaagtcaggacattagtaagtacctgaactggtatcagcagaaaccagatggaactgttaaactcctgatctaccatacatcaagattacactcaggagtcccatcaaggttcagtggcagtgggtctggaacagattattctctcaccattagcaacctggagcaagaagatattgccacttacttttgccaacagggtaatacgcttccgtacacgttcggaggggggaccaagctggagatcacactcgagggacagcctaaggccaatcctaccgtgacactgttccctccaagcagcgaagaactccaggccaacaaggccacacttgtgtgcctgatctccgacttctaccctggggctgtgacagtggcttggaaggccgatggatctcctgtgaaagccggcgtggaaaccaccaagccatccaagcagagcaacaacaaatacgccgccagctcctacctgagcctgacacctgagcagtggaagtcccacagatcctacagctgccaagtgacccacgaaggcagcaccgtggaaaagacagtggcccctacagagtgcagcggcagagccgattgcggctttaccagcgagagctaccagcagggcgtgctgagcgccaccatcctgtacgagatcctgctgggcaaggccaccctgtacgccgtgctggtgtctgccctggtgctgatggctatggtcaagcggaaggacagccggggacgcgccaagagaagcggatctggcgtgaagcagaccctgaatttcgacctgctgaagctggctggcgacgtggaatccaacccaggccctactagtatggactggatttggcgcatccttttccttgtcggcgctgctaccggcgcgcattccgggccccagctccagctgcaagagtctggacctggcctggtcaagcctagcgagacactgagcctgacctgtaccgtgtccggcgatagcatcagcagcggcgattactactggggctggatcagacagcctcctggcaaaggactggaatggatcggccacatctactacagcggcgtgacctactacaaccccagcctgaagtccagagtgaccatcagcgtggacaccagccggaaccagttctccctgaagctgtctagcgtgacagccgccgataccgccgtgtactactgcaccagagaggacagcagcaactggcggagtagaggccagggaacactggtcacagttagctctggatccggcggaggcggaagtggaggcggaggatctggcggcggaggctctttcgaagtgaaactgcaggagtcaggacctggcctggtggcgccctcacagagcctgtccgtcacatgcactgtctcaggggtctcattacccgactatggtgtaagctggattcgccagcctccacgaaagggtctggagtggctgggagtaatatggggtagtgaaaccacatactataattcagctctcaaatccagactgaccatcatcaaggacaactccaagagccaagttttcttaaaaatgaacagtctgcaaactgatgacacagccatttactactgtgccaaacattattactacggtggtagctatgctatggactactggggccaaggaacctcagtcaccgtctcctcaacgcgtgcctctacaaagggaccctccgtgtttcctctggctcccagcagcaagtctacaagcggaggaacagccgctctgggctgcctggtcaaggattactttcccgagcctgtgaccgtgtcctggaatagcggagcactgacaagcggcgtgcacacctttccagccgtgctgcaaagcagcggcctgtactctctgagcagcgtggtcacagtgcctagctctagcctgggcacccagacctacatctgcaatgtgaaccacaagcctagcaacaccaaggtggacaagagagtggaacccaagagctgtatccccgaggacacattcttcccaagccccgagagcagctgcgacgtgaagctggtggaaaagagcttcgagacagacaccaacctgaacttccagaacctgagcgtgatcggcttcagaatcctgctgctgaaagtggccggctttaacctgctgatgaccctgcggctgtggtccagc

SEQ ID NO: 3335 - DNA, 2697 bp, Artificial Sequence
  Synthetic Polynucloetide
atggccttaccagtgaccgccttgctcctgccgctggccttgctgctccacgccgccaggccggaagtgcagctggttgaatctggcggaggactggttcagcctggcggatctctgagactgtcttgtgccgccagcggcttcagcttcagcgacttttggatgagctgggtccgacaggcccctggcaaaggacttgaatgggtcgccacaatcagccaggccggcagcgagaaggactacgtggactctgtgaagggcagattcaccatcagccgggacaacgccaagaagtccctgtacctccagatgaacagcctgagagccgaggacaccgccgtgtactattgtgcctctggcgtgtacagcttcgactacagaggccagggcaccctggtcacagtctcttctggtaccggcggaggcggatctggcggcggaggtagcggtggcggaggatctgaattcgagatcgtgatgacccagagccctgccaccctgtctctgagccctggcgaaagagccaccctgagctgtagagccagccaggacatcagcaagtacctgaactggtatcagcagaagcccggccaggcccccagactgctgatctaccacaccagcagactgcacagcggcatccccgccagattttctggctctggcagcggcaccgactacaccctgacaatcagcagcctccagcccgaggacttcgccgtgtacttctgtcagcaaggcaacaccctgccctacaccttcggccagggcaccaagctggaaatcaagctcgagggacagcctaaggccaatcctaccgtgacactgttccctccaagcagcgaagaactccaggccaacaaggccacacttgtgtgcctgatctccgacttctaccctggggctgtgacagtggcttggaaggccgatggatctcctgtgaaagccggcgtggaaaccaccaagccatccaagcagagcaacaacaaatacgccgccagctcctacctgagcctgacacctgagcagtggaagtcccacagatcctacagctgccaagtgacccacgaaggcagcaccgtggaaaagacagtggcccctacagagtgcagcggcagagccgattgcggctttaccagcgagagctaccagcagggcgtgctgagcgccaccatcctgtacgagatcctgctgggcaaggccaccctgtacgccgtgctggtgtctgccctggtgctgatggctatggtcaagcggaaggacagccggggacgcgccaagagaagcggatctggcgtgaagcagaccctgaatttcgacctgctgaagctggctggcgacgtggaatccaacccaggccctactagtatggactggatttggcgcatccttttccttgtcggcgctgctaccggcgcgcattccgggccccagctccagctgcaagagtctggacctggcctggtcaagcctagcgagacactgagcctgacctgtaccgtgtccggcgatagcatcagcagcggcgattactactggggctggatcagacagcctcctggcaaaggactggaatggatcggccacatctactacagcggcgtgacctactacaaccccagcctgaagtccagagtgaccatcagcgtggacaccagccggaaccagttctccctgaagctgtctagcgtgacagccgccgataccgccgtgtactactgcaccagagaggacagcagcaactggcggagtagaggccagggaacactggtcacagttagctctggatccggcggaggcggaagtggaggcggaggatctggcggcggaggctctttcgaacaggtgcaactccaggaatctggccctggcctcgtgaagcccagcgagacactgagcctgacctgtaccgtgtccggcgtgtccctgcctgactatggcgtgtcctggatcagacagccccctggcaagggcctggaatggatcggagtgatttggggcagcgaaaccacctactacaacagctccctgaagtccagagtgaccatctccaaggacaactccaagaaccaggtgtccctgaagctgagcagcgtgacagccgccgacaccgccgtgtattactgcgccaagcactactactacggcggcagctacgctatggactactggggccagggaaccctcgtgaccgtgtctagtacgcgtgcctctacaaagggaccctccgtgtttcctctggctcccagcagcaagtctacaagcggaggaacagccgctctgggctgcctggtcaaggattactttcccgagcctgtgaccgtgtcctggaatagcggagcactgacaagcggcgtgcacacctttccagccgtgctgcaaagcagcggcctgtactctctgagcagcgtggtcacagtgcctagctctagcctgggcacccagacctacatctgcaatgtgaaccacaagcctagcaacaccaaggtggacaagagagtggaacccaagagctgtatccccgaggacacattcttcccaagccccgagagcagctgcgacgtgaagctggtggaaaagagcttcgagacagacaccaacctgaacttccagaacctgagcgtgatcggcttcagaatcctgctgctgaaagtggccggctttaacctgctgatgaccctgcggctgtggtccagc

SEQ ID NO: 3336 - DNA, 2700 bp, Artificial Sequence
  Synthetic Polynucloetide
atggccttaccagtgaccgccttgctcctgccgctggccttgctgctccacgccgccaggccggaagtgcagctggttgaatctggcggaggactggttcagcctggcggatctctgagactgtcttgtgccgccagcggcttcagcttcagcgacttttggatgagctgggtccgacaggcccctggcaaaggacttgaatgggtcgccacaatcagccaggccggcagcgagaaggactacgtggactctgtgaagggcagattcaccatcagccgggacaacgccaagaagtccctgtacctccagatgaacagcctgagagccgaggacaccgccgtgtactattgtgcctctggcgtgtacagcttcgactacagaggccagggcaccctggtcacagtctcttctggtaccggcggaggcggatctggcggcggaggtagcggtggcggaggatctgaattcgacgagatcgtgctgacacagagccccgccaccctgtcactgtctccaggcgaaagagccaccctgagctgtagcgccagcagcagcgtgtcctacatgcactggtatcagcagaagcccggccaggcccccagactgctgatctacgataccagcaagctggcctccggcatccccgccagattttctggcagcggctccggcaccgacttcaccctgacaatcagcagcctggaacccgaggacgtggccgtgtactactgttttcaaggcagcgtgtaccccttcaccttcggccagggcaccaagctggaaatcaagagactcgagggacagcctaaggccaatcctaccgtgacactgttccctccaagcagcgaagaactccaggccaacaaggccacacttgtgtgcctgatctccgacttctaccctggggctgtgacagtggcttggaaggccgatggatctcctgtgaaagccggcgtggaaaccaccaagccatccaagcagagcaacaacaaatacgccgccagctcctacctgagcctgacacctgagcagtggaagtcccacagatcctacagctgccaagtgacccacgaaggcagcaccgtggaaaagacagtggcccctacagagtgcagcggcagagccgattgcggctttaccagcgagagctaccagcagggcgtgctgagcgccaccatcctgtacgagatcctgctgggcaaggccaccctgtacgccgtgctggtgtctgccctggtgctgatggctatggtcaagcggaaggacagccggggacgcgccaagagaagcggatctggcgtgaagcagaccctgaatttcgacctgctgaagctggctggcgacgtggaatccaacccaggccctactagtatggactggatttggcgcatccttttccttgtcggcgctgctaccggcgcgcattccgggccccagctccagctgcaagagtctggacctggcctggtcaagcctagcgagacactgagcctgacctgtaccgtgtccggcgatagcatcagcagcggcgattactactggggctggatcagacagcctcctggcaaaggactggaatggatcggccacatctactacagcggcgtgacctactacaaccccagcctgaagtccagagtgaccatcagcgtggacaccagccggaaccagttctccctgaagctgtctagcgtgacagccgccgataccgccgtgtactactgcaccagagaggacagcagcaactggcggagtagaggccagggaacactggtcacagttagctctggatccggcggaggcggaagtggaggcggaggatctggcggcggaggctctttcgaacaggtgcagctccaggaatctggccctggcctcgtgaagcctagccagaccctgagcctgacctgtaccgtgtctggcggcagcatcagcacaagcggcatgggcgtgggctggatcagacagcaccctggcaagggcctggaatggatcggccacatttggtgggacgacgacaagcggtacaaccccgccctgaagtccagagtgaccatcagcgtggacaccagcaagaaccagttcagcctgaagctgagcagcgtgacagccgccgataccgccgtgtattattgcgcccggatggaactgtggtcctactacttcgactactggggccagggaaccctcgtgaccgtgtctagtacgcgtgcctctacaaagggaccctccgtgtttcctctggctcccagcagcaagtctacaagcggaggaacagccgctctgggctgcctggtcaaggattactttcccgagcctgtgaccgtgtcctggaatagcggagcactgacaagcggcgtgcacacctttccagccgtgctgcaaagcagcggcctgtactctctgagcagcgtggtcacagtgcctagctctagcctgggcacccagacctacatctgcaatgtgaaccacaagcctagcaacaccaaggtggacaagagagtggaacccaagagctgtatccccgaggacacattcttcccaagccccgagagcagctgcgacgtgaagctggtggaaaagagcttcgagacagacaccaacctgaacttccagaacctgagcgtgatcggcttcagaatcctgctgctgaaagtggccggctttaacctgctgatgaccctgcggctgtggtccagc

SEQ ID NO: 3337 - DNA, 2694 bp, Artificial Sequence
  Synthetic Polynucloetide
atggccttaccagtgaccgccttgctcctgccgctggccttgctgctccacgccgccaggccggaagtgcagctggttgaatctggcggaggactggttcagcctggcggatctctgagactgtcttgtgccgccagcggcttcagcttcagcgacttttggatgagctgggtccgacaggcccctggcaaaggacttgaatgggtcgccacaatcagccaggccggcagcgagaaggactacgtggactctgtgaagggcagattcaccatcagccgggacaacgccaagaagtccctgtacctccagatgaacagcctgagagccgaggacaccgccgtgtactattgtgcctctggcgtgtacagcttcgactacagaggccagggcaccctggtcacagtctcttctggtaccggcggaggcggatctggcggcggaggtagcggtggcggaggatctgaattcgactacatccacgtgacacagagccctagcagcctgtccgtgtccatcggcgatagagtgaccatcaactgccagacctctcaaggcgtgggcagcgacctgcactggtatcagcacaaacctggcagagcccctaagctgctgatccaccatgccagctctgtggaagatggcgtgcccagcagattttccggcaccggatttcacaccagcttcaacctgacaatcaacgacctccaggccgacgacatcggcacctactactgtcaagtgctccagagcttcggcagaggcagcagactggatacaaaactcgagggacagcctaaggccaatcctaccgtgacactgttccctccaagcagcgaagaactccaggccaacaaggccacacttgtgtgcctgatctccgacttctaccctggggctgtgacagtggcttggaaggccgatggatctcctgtgaaagccggcgtggaaaccaccaagccatccaagcagagcaacaacaaatacgccgccagctcctacctgagcctgacacctgagcagtggaagtcccacagatcctacagctgccaagtgacccacgaaggcagcaccgtggaaaagacagtggcccctacagagtgcagcggcagagccgattgcggctttaccagcgagagctaccagcagggcgtgctgagcgccaccatcctgtacgagatcctgctgggcaaggccaccctgtacgccgtgctggtgtctgccctggtgctgatggctatggtcaagcggaaggacagccggggacgcgccaagagaagcggatctggcgtgaagcagaccctgaatttcgacctgctgaagctggctggcgacgtggaatccaacccaggccctactagtatggactggatttggcgcatccttttccttgtcggcgctgctaccggcgcgcattccgggccccagctccagctgcaagagtctggacctggcctggtcaagcctagcgagacactgagcctgacctgtaccgtgtccggcgatagcatcagcagcggcgattactactggggctggatcagacagcctcctggcaaaggactggaatggatcggccacatctactacagcggcgtgacctactacaaccccagcctgaagtccagagtgaccatcagcgtggacaccagccggaaccagttctccctgaagctgtctagcgtgacagccgccgataccgccgtgtactactgcaccagagaggacagcagcaactggcggagtagaggccagggaacactggtcacagttagctctggatccggcggaggcggaagtggaggcggaggatctggcggcggaggctctttcgaaagggcacacctggtgcagtctggcaccgccatgaagaaacctggcgcttccgtcagagtgtcctgtcagacaagcggctacaccttcacagcccacatcctgttctggttcagacaggccccaggcagaggactggaatgggtcggatggatcaagccccagtacggggccgtgaatttcggcggaggcttcagagacagagtgaccctgaccagggacgtgtaccgggaaatcgcctacatggacatccggggcctgaagcctgatgacaccgccgtgtactactgcgccagggatagaagctacggcgacagctcttgggctctcgatgcttggggacagggcacaacagtggtggtgtctgctacgcgtgcctctacaaagggaccctccgtgtttcctctggctcccagcagcaagtctacaagcggaggaacagccgctctgggctgcctggtcaaggattactttcccgagcctgtgaccgtgtcctggaatagcggagcactgacaagcggcgtgcacacctttccagccgtgctgcaaagcagcggcctgtactctctgagcagcgtggtcacagtgcctagctctagcctgggcacccagacctacatctgcaatgtgaaccacaagcctagcaacaccaaggtggacaagagagtggaacccaagagctgtatccccgaggacacattcttcccaagccccgagagcagctgcgacgtgaagctggtggaaaagagcttcgagacagacaccaacctgaacttccagaacctgagcgtgatcggcttcagaatcctgctgctgaaagtggccggctttaacctgctgatgaccctgcggctgtggtccagc

SEQ ID NO: 3338 - DNA, 2724 bp, Artificial Sequence
  Synthetic Polynucloetide
atggccttaccagtgaccgccttgctcctgccgctggccttgctgctccacgccgccaggccggaagtgcagctggttgaatctggcggaggactggttcagcctggcggatctctgagactgtcttgtgccgccagcggcttcagcttcagcgacttttggatgagctgggtccgacaggcccctggcaaaggacttgaatgggtcgccacaatcagccaggccggcagcgagaaggactacgtggactctgtgaagggcagattcaccatcagccgggacaacgccaagaagtccctgtacctccagatgaacagcctgagagccgaggacaccgccgtgtactattgtgcctctggcgtgtacagcttcgactacagaggccagggcaccctggtcacagtctcttctggtaccggcggaggcggatctggcggcggaggtagcggtggcggaggatctgaattcgacgtgcagatgatccagacccccgatagcctggccgtgtccctgggacagagagccaccatctcttgcagagccagcgagagcgtggacaactacggcatcagcttcatgcactggtatcagcagaagcccggccagagccccaagctgctgatctacagagcctccaacctggaaagcggcatccccgccagattttccggcagcggcagcagaaccgacttcaccctgaccatcaaccccgtggaaaccgacgacgtggcaacctactactgccagcagaacaacaaggacccccccacctttggcggaggcaccaagctggaaatcaagctcgagggacagcctaaggccaatcctaccgtgacactgttccctccaagcagcgaagaactccaggccaacaaggccacacttgtgtgcctgatctccgacttctaccctggggctgtgacagtggcttggaaggccgatggatctcctgtgaaagccggcgtggaaaccaccaagccatccaagcagagcaacaacaaatacgccgccagctcctacctgagcctgacacctgagcagtggaagtcccacagatcctacagctgccaagtgacccacgaaggcagcaccgtggaaaagacagtggcccctacagagtgcagcggcagagccgattgcggctttaccagcgagagctaccagcagggcgtgctgagcgccaccatcctgtacgagatcctgctgggcaaggccaccctgtacgccgtgctggtgtctgccctggtgctgatggctatggtcaagcggaaggacagccggggacgcgccaagagaagcggatctggcgtgaagcagaccctgaatttcgacctgctgaagctggctggcgacgtggaatccaacccaggccctactagtatggactggatttggcgcatccttttccttgtcggcgctgctaccggcgcgcattccgggccccagctccagctgcaagagtctggacctggcctggtcaagcctagcgagacactgagcctgacctgtaccgtgtccggcgatagcatcagcagcggcgattactactggggctggatcagacagcctcctggcaaaggactggaatggatcggccacatctactacagcggcgtgacctactacaaccccagcctgaagtccagagtgaccatcagcgtggacaccagccggaaccagttctccctgaagctgtctagcgtgacagccgccgataccgccgtgtactactgcaccagagaggacagcagcaactggcggagtagaggccagggaacactggtcacagttagctctggatccggcggaggcggaagtggaggcggaggatctggcggcggaggctctttcgaagggggaggcggctctcaggtgcaactccagcagtctggcgctgagcttgtgaagcctggggccagcgtgaagattagctgcaaggccagcggctacgccttcagcagctactggatgaactgggtcaagcagcggcctggcaagggcctggaatggatcggccaaatctaccccggcgacggcgacaccacctacaacggcaagttcaagggcaaggccaccctgacagccgacaagagcagcagcaccgtgtacatgcaactgaacagcctgaccagcgaggacagcgccgtgtacttctgcgtgcggtactactacggcagctccggctacttcgactattggggccagggcaccacactgaccgtgtcctctacgcgtgcctctacaaagggaccctccgtgtttcctctggctcccagcagcaagtctacaagcggaggaacagccgctctgggctgcctggtcaaggattactttcccgagcctgtgaccgtgtcctggaatagcggagcactgacaagcggcgtgcacacctttccagccgtgctgcaaagcagcggcctgtactctctgagcagcgtggtcacagtgcctagctctagcctgggcacccagacctacatctgcaatgtgaaccacaagcctagcaacaccaaggtggacaagagagtggaacccaagagctgtatccccgaggacacattcttcccaagccccgagagcagctgcgacgtgaagctggtggaaaagagcttcgagacagacaccaacctgaacttccagaacctgagcgtgatcggcttcagaatcctgctgctgaaagtggccggctttaacctgctgatgaccctgcggctgtggtccagc

SEQ ID NO: 3339 - DNA, 2697 bp, Artificial Sequence
  Synthetic Polynucloetide
atggccttaccagtgaccgccttgctcctgccgctggccttgctgctccacgccgccaggccggaagtgcagctggttgaatctggcggaggactggttcagcctggcggatctctgagactgtcttgtgccgccagcggcttcagcttcagcgacttttggatgagctgggtccgacaggcccctggcaaaggacttgaatgggtcgccacaatcagccaggccggcagcgagaaggactacgtggactctgtgaagggcagattcaccatcagccgggacaacgccaagaagtccctgtacctccagatgaacagcctgagagccgaggacaccgccgtgtactattgtgcctctggcgtgtacagcttcgactacagaggccagggcaccctggtcacagtctcttctggtaccggcggaggcggatctggcggcggaggtagcggtggcggaggatctgaattcgacgtgcagatgatccagacccccagcagcctgtctgccagcctgggcgatagagtgaccatcagctgtcgggccagccaggacatcggcaactacctgaactggtatcagcagaaacccgacggcaccgtgaagctgctgatctactacaccagcagactgcacagcggcgtgcccagcagattttctggcagcggctctggcaccgagtacagcctgaccatctccaacctggaacaggaagatattgctacctacttctgtcagcaaggcagcgccctgccccctacatttggcggcggaacaaagctggaaatcaacctcgagggacagcctaaggccaatcctaccgtgacactgttccctccaagcagcgaagaactccaggccaacaaggccacacttgtgtgcctgatctccgacttctaccctggggctgtgacagtggcttggaaggccgatggatctcctgtgaaagccggcgtggaaaccaccaagccatccaagcagagcaacaacaaatacgccgccagctcctacctgagcctgacacctgagcagtggaagtcccacagatcctacagctgccaagtgacccacgaaggcagcaccgtggaaaagacagtggcccctacagagtgcagcggcagagccgattgcggctttaccagcgagagctaccagcagggcgtgctgagcgccaccatcctgtacgagatcctgctgggcaaggccaccctgtacgccgtgctggtgtctgccctggtgctgatggctatggtcaagcggaaggacagccggggacgcgccaagagaagcggatctggcgtgaagcagaccctgaatttcgacctgctgaagctggctggcgacgtggaatccaacccaggccctactagtatggactggatttggcgcatccttttccttgtcggcgctgctaccggcgcgcattccgggccccagctccagctgcaagagtctggacctggcctggtcaagcctagcgagacactgagcctgacctgtaccgtgtccggcgatagcatcagcagcggcgattactactggggctggatcagacagcctcctggcaaaggactggaatggatcggccacatctactacagcggcgtgacctactacaaccccagcctgaagtccagagtgaccatcagcgtggacaccagccggaaccagttctccctgaagctgtctagcgtgacagccgccgataccgccgtgtactactgcaccagagaggacagcagcaactggcggagtagaggccagggaacactggtcacagttagctctggatccggcggaggcggaagtggaggcggaggatctggcggcggaggctctttcgaagctctccagctccagcagtctggcgcagaactcgtgcggcctggcgcttctgtgaccctgagctgtaaagccagcggctacaccttcaccgactacgagatgcactgggtcaagcagacccctgtgcacggcctggaatggatcggagccatcgaccctgagacaggcggcaccgcctacaaccagaagttcgagggcaaggccatcctgaccgccgacaagagcagcagcacagcctacatggaactgcggagcctgacctccgaggacagccccgtgtactactgtgccagacggcggtactacggcagcagctccttcgactattggggccagggcaccaccctgaccgtgtctagtacgcgtgcctctacaaagggaccctccgtgtttcctctggctcccagcagcaagtctacaagcggaggaacagccgctctgggctgcctggtcaaggattactttcccgagcctgtgaccgtgtcctggaatagcggagcactgacaagcggcgtgcacacctttccagccgtgctgcaaagcagcggcctgtactctctgagcagcgtggtcacagtgcctagctctagcctgggcacccagacctacatctgcaatgtgaaccacaagcctagcaacaccaaggtggacaagagagtggaacccaagagctgtatccccgaggacacattcttcccaagccccgagagcagctgcgacgtgaagctggtggaaaagagcttcgagacagacaccaacctgaacttccagaacctgagcgtgatcggcttcagaatcctgctgctgaaagtggccggctttaacctgctgatgaccctgcggctgtggtccagc

SEQ ID NO: 3340 - DNA, 2709 bp, Artificial Sequence
  Synthetic Polynucloetide
atggccttaccagtgaccgccttgctcctgccgctggccttgctgctccacgccgccaggccggaagtgcagctggttgaatctggcggaggactggttcagcctggcggatctctgagactgtcttgtgccgccagcggcttcagcttcagcgacttttggatgagctgggtccgacaggcccctggcaaaggacttgaatgggtcgccacaatcagccaggccggcagcgagaaggactacgtggactctgtgaagggcagattcaccatcagccgggacaacgccaagaagtccctgtacctccagatgaacagcctgagagccgaggacaccgccgtgtactattgtgcctctggcgtgtacagcttcgactacagaggccagggcaccctggtcacagtctcttctggtaccggcggaggcggatctggcggcggaggtagcggtggcggaggatctgaattcgacatcgtcctgacccagtccccagccagcctggcggtgtccctgggtcaacgagctaccatttcctgcagagcctctaagtccgtatccacttccggctatagttacctgcattggtaccaacagaaaccagggcagccacccaagctgctcatctatctggcctcaaacctggagtccggcgtgcccgccagattctccggaagtgggagcggcaccgactttacattgaacatccacccagtcgaagaggaagatgctgccacttattactgtcagcactccagggagctgccatttacatttggctctggcacaaaactggagatcaaactcgagggacagcctaaggccaatcctaccgtgacactgttccctccaagcagcgaagaactccaggccaacaaggccacacttgtgtgcctgatctccgacttctaccctggggctgtgacagtggcttggaaggccgatggatctcctgtgaaagccggcgtggaaaccaccaagccatccaagcagagcaacaacaaatacgccgccagctcctacctgagcctgacacctgagcagtggaagtcccacagatcctacagctgccaagtgacccacgaaggcagcaccgtggaaaagacagtggcccctacagagtgcagcggcagagccgattgcggctttaccagcgagagctaccagcagggcgtgctgagcgccaccatcctgtacgagatcctgctgggcaaggccaccctgtacgccgtgctggtgtctgccctggtgctgatggctatggtcaagcggaaggacagccggggacgcgccaagagaagcggatctggcgtgaagcagaccctgaatttcgacctgctgaagctggctggcgacgtggaatccaacccaggccctactagtatggactggatttggcgcatccttttccttgtcggcgctgctaccggcgcgcattccgggccccagctccagctgcaagagtctggacctggcctggtcaagcctagcgagacactgagcctgacctgtaccgtgtccggcgatagcatcagcagcggcgattactactggggctggatcagacagcctcctggcaaaggactggaatggatcggccacatctactacagcggcgtgacctactacaaccccagcctgaagtccagagtgaccatcagcgtggacaccagccggaaccagttctccctgaagctgtctagcgtgacagccgccgataccgccgtgtactactgcaccagagaggacagcagcaactggcggagtagaggccagggaacactggtcacagttagctctggatccggcggaggcggaagtggaggcggaggatctggcggcggaggctctttcgaacaggttcagctggtcgagtccgggggaggtctggtacagccgggtggcagcctcaagctgtcatgtgccgcatctggttttgactttagcaggtattggatgagctgggtccgccaggccccgggcaagggacttgagtggattggagaaataaaccctacttccagcacaatcaacttcacaccttctttgaaagataaggtttttatctctcgggataacgctaaaaacacactgtacttgcagatgtctaaggtgcgaagcgaagacaccgccctctattattgcgcccggggtaattactaccgctatggggatgcgatggactattgggggcaaggtacctccgtcacggtctcaacgcgtgcctctacaaagggaccctccgtgtttcctctggctcccagcagcaagtctacaagcggaggaacagccgctctgggctgcctggtcaaggattactttcccgagcctgtgaccgtgtcctggaatagcggagcactgacaagcggcgtgcacacctttccagccgtgctgcaaagcagcggcctgtactctctgagcagcgtggtcacagtgcctagctctagcctgggcacccagacctacatctgcaatgtgaaccacaagcctagcaacaccaaggtggacaagagagtggaacccaagagctgtatccccgaggacacattcttcccaagccccgagagcagctgcgacgtgaagctggtggaaaagagcttcgagacagacaccaacctgaacttccagaacctgagcgtgatcggcttcagaatcctgctgctgaaagtggccggctttaacctgctgatgaccctgcggctgtggtccagc

SEQ ID NO: 3341 - DNA, 2703 bp, Artificial Sequence
  Synthetic Polynucloetide
atggccttaccagtgaccgccttgctcctgccgctggccttgctgctccacgccgccaggccggaagtgcagctggttgaatctggcggaggactggttcagcctggcggatctctgagactgtcttgtgccgccagcggcttcagcttcagcgacttttggatgagctgggtccgacaggcccctggcaaaggacttgaatgggtcgccacaatcagccaggccggcagcgagaaggactacgtggactctgtgaagggcagattcaccatcagccgggacaacgccaagaagtccctgtacctccagatgaacagcctgagagccgaggacaccgccgtgtactattgtgcctctggcgtgtacagcttcgactacagaggccagggcaccctggtcacagtctcttctggtaccggcggaggcggatctggcggcggaggtagcggtggcggaggatctgaattcgacatccagatgacccagagccctagctcactgagcgccagcgtgggcgacagggtgaccattacctgctccgccagccaggacatcagcaactacctgaactggtaccagcagaagcccggcaaggcccccaagctgctgatctactacacctccaacctgcactccggcgtgcccagcaggttcagcggaagcggcagcggcaccgatttcaccctgaccatctccagcctgcagcccgaggacttcgccacctactactgccagcagtacaggaagctcccctggactttcggccagggcaccaaactggagatcaagcgtctcgagggacagcctaaggccaatcctaccgtgacactgttccctccaagcagcgaagaactccaggccaacaaggccacacttgtgtgcctgatctccgacttctaccctggggctgtgacagtggcttggaaggccgatggatctcctgtgaaagccggcgtggaaaccaccaagccatccaagcagagcaacaacaaatacgccgccagctcctacctgagcctgacacctgagcagtggaagtcccacagatcctacagctgccaagtgacccacgaaggcagcaccgtggaaaagacagtggcccctacagagtgcagcggcagagccgattgcggctttaccagcgagagctaccagcagggcgtgctgagcgccaccatcctgtacgagatcctgctgggcaaggccaccctgtacgccgtgctggtgtctgccctggtgctgatggctatggtcaagcggaaggacagccggggacgcgccaagagaagcggatctggcgtgaagcagaccctgaatttcgacctgctgaagctggctggcgacgtggaatccaacccaggccctactagtatggactggatttggcgcatccttttccttgtcggcgctgctaccggcgcgcattccgggccccagctccagctgcaagagtctggacctggcctggtcaagcctagcgagacactgagcctgacctgtaccgtgtccggcgatagcatcagcagcggcgattactactggggctggatcagacagcctcctggcaaaggactggaatggatcggccacatctactacagcggcgtgacctactacaaccccagcctgaagtccagagtgaccatcagcgtggacaccagccggaaccagttctccctgaagctgtctagcgtgacagccgccgataccgccgtgtactactgcaccagagaggacagcagcaactggcggagtagaggccagggaacactggtcacagttagctctggatccggcggaggcggaagtggaggcggaggatctggcggcggaggctctttcgaacaggtgcagctggtccagagcggcgccgaagtgaagaagcccggcagctccgtgaaagtgagctgcaaggccagcggcggcaccttcagcaactactggatgcactgggtgaggcaggcccccggacagggcctggagtggatgggcgccacctacaggggccacagcgacacctactacaaccagaagttcaagggccgggtgaccatcaccgccgacaagagcaccagcaccgcctacatggaactgagcagcctcaggagcgaggacaccgctgtgtattactgcgccaggggcgccatctacgacggctacgacgtgctggacaactggggccagggcacactggtgaccgtgtccagcacgcgtgcctctacaaagggaccctccgtgtttcctctggctcccagcagcaagtctacaagcggaggaacagccgctctgggctgcctggtcaaggattactttcccgagcctgtgaccgtgtcctggaatagcggagcactgacaagcggcgtgcacacctttccagccgtgctgcaaagcagcggcctgtactctctgagcagcgtggtcacagtgcctagctctagcctgggcacccagacctacatctgcaatgtgaaccacaagcctagcaacaccaaggtggacaagagagtggaacccaagagctgtatccccgaggacacattcttcccaagccccgagagcagctgcgacgtgaagctggtggaaaagagcttcgagacagacaccaacctgaacttccagaacctgagcgtgatcggcttcagaatcctgctgctgaaagtggccggctttaacctgctgatgaccctgcggctgtggtccagc

SEQ ID NO: 3342 - DNA, 2703 bp, Artificial Sequence
  Synthetic Polynucloetide
atggccttaccagtgaccgccttgctcctgccgctggccttgctgctccacgccgccaggccggaagtgcagctggttgaatctggcggaggactggttcagcctggcggatctctgagactgtcttgtgccgccagcggcttcagcttcagcgacttttggatgagctgggtccgacaggcccctggcaaaggacttgaatgggtcgccacaatcagccaggccggcagcgagaaggactacgtggactctgtgaagggcagattcaccatcagccgggacaacgccaagaagtccctgtacctccagatgaacagcctgagagccgaggacaccgccgtgtactattgtgcctctggcgtgtacagcttcgactacagaggccagggcaccctggtcacagtctcttctggtaccggcggaggcggatctggcggcggaggtagcggtggcggaggatctgaattcgacatcgtgctgacacagagccctgccaccctgtctctgagccctggcgatagagccaccatcagctgtagagccagcgagagcgtgaccatcctgggcagccacctgatctactggtatcagcagaagcccggccagccccccagactgctgattcagctggcctccaatgtgcagaccggcgtgccagccagattttccggcagcggcagcagaaccgacttcaccctgaccatcagcagcgtggaacccgaggacttcgccgtgtactactgcctccagagccggaccatccccagaacattcggccagggcaccaagctggaaatcaagagactcgagggacagcctaaggccaatcctaccgtgacactgttccctccaagcagcgaagaactccaggccaacaaggccacacttgtgtgcctgatctccgacttctaccctggggctgtgacagtggcttggaaggccgatggatctcctgtgaaagccggcgtggaaaccaccaagccatccaagcagagcaacaacaaatacgccgccagctcctacctgagcctgacacctgagcagtggaagtcccacagatcctacagctgccaagtgacccacgaaggcagcaccgtggaaaagacagtggcccctacagagtgcagcggcagagccgattgcggctttaccagcgagagctaccagcagggcgtgctgagcgccaccatcctgtacgagatcctgctgggcaaggccaccctgtacgccgtgctggtgtctgccctggtgctgatggctatggtcaagcggaaggacagccggggacgcgccaagagaagcggatctggcgtgaagcagaccctgaatttcgacctgctgaagctggctggcgacgtggaatccaacccaggccctactagtatggactggatttggcgcatccttttccttgtcggcgctgctaccggcgcgcattccgggccccagctccagctgcaagagtctggacctggcctggtcaagcctagcgagacactgagcctgacctgtaccgtgtccggcgatagcatcagcagcggcgattactactggggctggatcagacagcctcctggcaaaggactggaatggatcggccacatctactacagcggcgtgacctactacaaccccagcctgaagtccagagtgaccatcagcgtggacaccagccggaaccagttctccctgaagctgtctagcgtgacagccgccgataccgccgtgtactactgcaccagagaggacagcagcaactggcggagtagaggccagggaacactggtcacagttagctctggatccggcggaggcggaagtggaggcggaggatctggcggcggaggctctttcgaacaggtgcagctggtgcagtctggccccgaagtgaagaaacccggcgagtccgtgaagatcagctgcaaggccagcggctacaccttccggcactacagcatgaactgggtcaagcaggccccaggccagggcctgaagtggatgggcagaatcaacaccgagagcggcgtgcccatctacgccgacgacttcaagggccggttcagcttcaccgtggacaccagcgccagcaccgcctacctggaaatctccagcctgaccagcgaggataccgccgtgtatttctgctccaacgactacctgtacagcctggatttctggggccagggaaccaccctgacagtgtcctctacgcgtgcctctacaaagggaccctccgtgtttcctctggctcccagcagcaagtctacaagcggaggaacagccgctctgggctgcctggtcaaggattactttcccgagcctgtgaccgtgtcctggaatagcggagcactgacaagcggcgtgcacacctttccagccgtgctgcaaagcagcggcctgtactctctgagcagcgtggtcacagtgcctagctctagcctgggcacccagacctacatctgcaatgtgaaccacaagcctagcaacaccaaggtggacaagagagtggaacccaagagctgtatccccgaggacacattcttcccaagccccgagagcagctgcgacgtgaagctggtggaaaagagcttcgagacagacaccaacctgaacttccagaacctgagcgtgatcggcttcagaatcctgctgctgaaagtggccggctttaacctgctgatgaccctgcggctgtggtccagc

SEQ ID NO: 3343 - DNA, 2706 bp, Artificial Sequence
  Synthetic Polynucloetide
atggccttaccagtgaccgccttgctcctgccgctggccttgctgctccacgccgccaggccggaagtgcagctggttgaatctggcggaggactggttcagcctggcggatctctgagactgtcttgtgccgccagcggcttcagcttcagcgacttttggatgagctgggtccgacaggcccctggcaaaggacttgaatgggtcgccacaatcagccaggccggcagcgagaaggactacgtggactctgtgaagggcagattcaccatcagccgggacaacgccaagaagtccctgtacctccagatgaacagcctgagagccgaggacaccgccgtgtactattgtgcctctggcgtgtacagcttcgactacagaggccagggcaccctggtcacagtctcttctggtaccggcggaggcggatctggcggcggaggtagcggtggcggaggatctgaattccagtctgtgctgacacagcctcctagtgtgtctggcgctcctggacagagagtgaccatcagctgtacaggcagcagcagcaatatcggagccggctttgacgtgcactggtatcagcagctgcctggcacagcccctaaactgctgatctacggcaacagcaacagacccagcggcgtgcccgatagattttccggctctaagagcggcacaagcgccagcctggctattactggactccaggccgaggacgaggccgactactactgtcagagctacgacagcagcctgagcggctacgttttcggcaccggcaccaaagtgacagtgcttggtctcgagggacagcctaaggccaatcctaccgtgacactgttccctccaagcagcgaagaactccaggccaacaaggccacacttgtgtgcctgatctccgacttctaccctggggctgtgacagtggcttggaaggccgatggatctcctgtgaaagccggcgtggaaaccaccaagccatccaagcagagcaacaacaaatacgccgccagctcctacctgagcctgacacctgagcagtggaagtcccacagatcctacagctgccaagtgacccacgaaggcagcaccgtggaaaagacagtggcccctacagagtgcagcggcagagccgattgcggctttaccagcgagagctaccagcagggcgtgctgagcgccaccatcctgtacgagatcctgctgggcaaggccaccctgtacgccgtgctggtgtctgccctggtgctgatggctatggtcaagcggaaggacagccggggacgcgccaagagaagcggatctggcgtgaagcagaccctgaatttcgacctgctgaagctggctggcgacgtggaatccaacccaggccctactagtatggactggatttggcgcatccttttccttgtcggcgctgctaccggcgcgcattccgggccccagctccagctgcaagagtctggacctggcctggtcaagcctagcgagacactgagcctgacctgtaccgtgtccggcgatagcatcagcagcggcgattactactggggctggatcagacagcctcctggcaaaggactggaatggatcggccacatctactacagcggcgtgacctactacaaccccagcctgaagtccagagtgaccatcagcgtggacaccagccggaaccagttctccctgaagctgtctagcgtgacagccgccgataccgccgtgtactactgcaccagagaggacagcagcaactggcggagtagaggccagggaacactggtcacagttagctctggatccggcggaggcggaagtggaggcggaggatctggcggcggaggctctttcgaacaagttcagctggttcagagcggagccgaagtgaagaaacctggggcctctgtgaaggtgtcctgcaaggcttccggctacacctttaccgattactacatgcactgggtccgacaggctcccggccaaagacttgaatggatgggctggatcaaccccaacagcggcggcacaaattacgcccagaagttccaggaccggatcaccgtgaccagagacaccagctccaacaccggctacatggaactgacccggctgagatccgatgacaccgccgtgtactactgcgctagaagcccttactccggcgtgctggataagtggggacagggcacactggtcaccgtgtcatctacgcgtgcctctacaaagggaccctccgtgtttcctctggctcccagcagcaagtctacaagcggaggaacagccgctctgggctgcctggtcaaggattactttcccgagcctgtgaccgtgtcctggaatagcggagcactgacaagcggcgtgcacacctttccagccgtgctgcaaagcagcggcctgtactctctgagcagcgtggtcacagtgcctagctctagcctgggcacccagacctacatctgcaatgtgaaccacaagcctagcaacaccaaggtggacaagagagtggaacccaagagctgtatccccgaggacacattcttcccaagccccgagagcagctgcgacgtgaagctggtggaaaagagcttcgagacagacaccaacctgaacttccagaacctgagcgtgatcggcttcagaatcctgctgctgaaagtggccggctttaacctgctgatgaccctgcggctgtggtccagc

SEQ ID NO: 3344 - DNA, 2697 bp, Artificial Sequence
  Synthetic Polynucloetide
atggccttaccagtgaccgccttgctcctgccgctggccttgctgctccacgccgccaggccggaagtgcagctggttgaatctggcggaggactggttcagcctggcggatctctgagactgtcttgtgccgccagcggcttcagcttcagcgacttttggatgagctgggtccgacaggcccctggcaaaggacttgaatgggtcgccacaatcagccaggccggcagcgagaaggactacgtggactctgtgaagggcagattcaccatcagccgggacaacgccaagaagtccctgtacctccagatgaacagcctgagagccgaggacaccgccgtgtactattgtgcctctggcgtgtacagcttcgactacagaggccagggcaccctggtcacagtctcttctggtaccggcggaggcggatctggcggcggaggtagcggtggcggaggatctgaattccaggctgttctgacacagcctccatctgcctctggcacacctggacagagagtgaccatctcctgtagcggcagcagcagcaacatcggcagctacaccgtgtcctggtatcagcagctccctggaacagcccctaagttcctgatctacagcaacaaccagcggcctagcggcgtgcccgatagattttctggcagcaagagcggcacaagcgccagcctggctatttctggactccagtctgaggacgaggccgactactattgtgccgcctgggacgatagcctgaacggctatgtgtttggcaccggcaccaaagtgacagtgcttggtctcgagggacagcctaaggccaatcctaccgtgacactgttccctccaagcagcgaagaactccaggccaacaaggccacacttgtgtgcctgatctccgacttctaccctggggctgtgacagtggcttggaaggccgatggatctcctgtgaaagccggcgtggaaaccaccaagccatccaagcagagcaacaacaaatacgccgccagctcctacctgagcctgacacctgagcagtggaagtcccacagatcctacagctgccaagtgacccacgaaggcagcaccgtggaaaagacagtggcccctacagagtgcagcggcagagccgattgcggctttaccagcgagagctaccagcagggcgtgctgagcgccaccatcctgtacgagatcctgctgggcaaggccaccctgtacgccgtgctggtgtctgccctggtgctgatggctatggtcaagcggaaggacagccggggacgcgccaagagaagcggatctggcgtgaagcagaccctgaatttcgacctgctgaagctggctggcgacgtggaatccaacccaggccctactagtatggactggatttggcgcatccttttccttgtcggcgctgctaccggcgcgcattccgggccccagctccagctgcaagagtctggacctggcctggtcaagcctagcgagacactgagcctgacctgtaccgtgtccggcgatagcatcagcagcggcgattactactggggctggatcagacagcctcctggcaaaggactggaatggatcggccacatctactacagcggcgtgacctactacaaccccagcctgaagtccagagtgaccatcagcgtggacaccagccggaaccagttctccctgaagctgtctagcgtgacagccgccgataccgccgtgtactactgcaccagagaggacagcagcaactggcggagtagaggccagggaacactggtcacagttagctctggatccggcggaggcggaagtggaggcggaggatctggcggcggaggctctttcgaagttcaactggttcagagcggagccgaagtgaagaagcctggcgagagcctgaagattagctgcaaaggcagcggctacgacttcaccacctactggatcggctgggtccgacagatgcctggcaaaggactggaatggatgggcatcatctaccccggcgacagcgacaccagatacagccctagcgttagaggccgcgtgaccatcagcgccgacaagtctatcaacaccgcctacctccagtggtccagcctggaagcctctgacaccgccatgtactactgcgccagaatgtggaccttcagccaggatggatggggccagggaacactggtcacagtgtcatctacgcgtgcctctacaaagggaccctccgtgtttcctctggctcccagcagcaagtctacaagcggaggaacagccgctctgggctgcctggtcaaggattactttcccgagcctgtgaccgtgtcctggaatagcggagcactgacaagcggcgtgcacacctttccagccgtgctgcaaagcagcggcctgtactctctgagcagcgtggtcacagtgcctagctctagcctgggcacccagacctacatctgcaatgtgaaccacaagcctagcaacaccaaggtggacaagagagtggaacccaagagctgtatccccgaggacacattcttcccaagccccgagagcagctgcgacgtgaagctggtggaaaagagcttcgagacagacaccaacctgaacttccagaacctgagcgtgatcggcttcagaatcctgctgctgaaagtggccggctttaacctgctgatgaccctgcggctgtggtccagc
